United States Patent Application Publication US 2014/0057251 A1 - sequence listing, part 43

SEQ ID NO: 47626 - DNA, 1353 bp, Cannabis sativa
tgctcatgactctggtaggaagaagtcaaacactattggtgtagatgagaagactttaattgacctctctcttatgattttgaacatgctgctccaaacttgggtttggacttagtagagaaattgtgtgagaaaggctcctggcttcttgccaataatgaggccctgattggtgctagagctgagaacattccgttgtagcaattaattagcactaagcctccacacatcatagcaattaatgttacgatttacaatgacatgtgcttcaatgcaatttatactgcctaggtcgccaatggtaggaatcaatcattcaagaatactagttttcttgaaaatgaggtaccaaacttcatcgagcgggttcagagacatttttgctattgaatcttttaaagaagttgactttgctgtggatgttggcaaagcgattgtcaaagaagctttaggagttgaaggctacaacgttgagcgtcccaacattcctcgttctattagtgagatgcctcttgctgagagtgaaggcaaggaggagactcttgttaatgtaacaagcctataggaccttctttgagtccactcttcttttttgttttaagcattaagatttagtgtgatagtttgtcattctcaggcgacctttcgaagtggataagctttagtagaatgaaattattttttttttaattaaatcataaattatttccaacttaataaaacttcgattccaatagttataattttttttgttctactttatctgttaccacttgatcgtttaacaattgcacattacaccatgtcttaaaaactcaaatactaggaatagtgtcactatttacttaaatttatcgctaccctgagaatactaacatagatgtgcaacattttttgaatgctcttataacatatttctctcgtatatcataacataacatatgtgccccctagtgtttaaagaagtgccttgattggtcacttaccatacaaaatccccctaggccttttttgtcatgacttttgagtggtgctacacgtgtgagcactctccacttatctgaggattcgtgggttgcagtgtttactcacttgagaaaaaaccaaagttacctcaagaccaactctcaagctttacttaacgcttaaagagcgtcgtcatgtctgtgagttataattgtttaatttaaatgatgtaccaaaaaaactttacttatgatttttctcactaaattaagtacaatgacatccctgtgagctatgttaaaagaagaaagaatacactttgttgtagtagttgcatattttcttcttcatccaagcttagcaaaaagtgatcctcattatgttaat

SEQ ID NO: 47627 - DNA, 1290 bp, Cannabis sativa
caacaagtactatgactaaaaatacatttagtcacaataaattttgatttttgtgactaatatttttagccacggaccttttaatcacaacatatgaatagtgatttataattagtaacaactattttagtcacaaattttattgcgactaaaagtaaaaatttttgtagtaatagtaacatgagctcaattttctatacttttttttaatataatcaacttgaagataatttttagtgcgatcataacaattccagattgagttattataataacttttatttcaacaaaaaatcattttaaaatattattttatattatttttaaaattataaattttaatttattatttaataaaataaatgatctattaatttatttattttacaaaatacaatgcccgaaatattctaatagctaattaataagcaaataattatgttatatgttgatagatcatgatatcattgcttattaaataaagcatatagagcaaaataaatagtggtcaattttctacagctgctaaaagacaagagaatattcaaaactttctcaaagttgtcatcttttcattccaattatggaaagaaaaacaaaaaaaaaattatattattaattagtatataattaagttcttcttctacttggctttagctgcttttctagttcaagaatcaagaaattaagatttatatggtgtcaactcatctccatattttatttattattttggtttaattggtcaaattagttatacaaattttggggtgatatatatcatacatatttacttattttgaggggaaaatttatatattctaatatattatttggtatacaattatttgatatatttttaaaattttatttccataaatgtacgcagacaacacgttcgaggagaactcagtgtgggaatggtcagaaccccggggcgagggatgaagagctcaatcgtggaggtgcccaatctgtgagagaaagaacttatgaaacggaaagttgtcgcttgagacgccgtttggatgaagcacaatgtagaaacgctgagttagaacgtattatttgatatatttttatgttgtatgtctagttcttttattacttttgttatttgtatattatttttttatgctattttgatattattttgttattgtttgaatgttattttcaaacttttatgtagtttttttgtatttatataaaatattataaaaattaaaaaaaaaaaactttaaaacataaaagtgtaaattttgtactaaaaataaaaatttttgttat

SEQ ID NO: 47628 - DNA, 2073 bp, Cannabis sativa
  modified_base (2033)..(2048): a, c, t, g, unknown or other
gaagaaaagtgaagagaaattttgctatagtttctctactctaaaaattacactaaagagatatgtgtagaagttgtaagaggtgttccaagaggtctcatctcttccctatttatagccaaagtgagtgaattaaaataattaataaattaattcttttaatagttttctagaaatttcaatcataaatgaagtaggtgaaggtaaaatggtaaaatatagaaggtacaatttattggcttagagaaaaagaaaaatgagccaaataaatgccaaggaatataaaattataatgtattttgaaattgcatttcaaaataatttgaaaaatggcagattgaaggaggagacgacaagtgtcgctcatgtagaggctgctgggagagagaaggctgcagcgggcggacacgtgtcgggatgctggagagctggctgcgggacagcgggtccaggtgggaccccacgcgtctgacgctggcggcttggcagaggggagacaggcgatcacgcgcctttgtcttgccgtgagccacacgcgcgcgctgagcccctttttccttcgatccgacagctggtgatgggtctttgggctgcgggtgagtgggcttctcccaggcccgaaaatctgattttctttttgaaaaattactccttttcttcaattctttaattctcttcaaaattcccaataattttaattcctataataaaaaaaaattaaaaaattaataaattaaatctaaattaaatattttcaacataaaaatatatttcattaatctcatgaaaatattaatttatttttaatttatcttatactttaagcttactaaatatatatttttcactattaatcacttgacttgatcaccaagaagtttcgttgccatagttttctccattccagtgcttgttcaaagattttcttctatcttaaccaccacaattgttctccaatgcctttttttagcttatcctgcatgttgccttctaggagtatgtcctcaatagacggttgttggacttggcttttatttattcctctgtaggggtactactcatatgtaagccgataataagtctaaactcgatctgcctgaatctcatgtaatttttgtccacatgaaaccatatctcatcctcctttttattgtcaactttcatcttctgtaagagtaggccaatgccacagagaaaatcaactctccaacttcctagaagtatccaaaagggctagcctaatcttatttatcaacttcagctccttaaatttggtcttgatatgtctaaacctatttgaaccccgataggtaagacgttcagtgaaatgttgggaaactagaagtttaagtttactagccatctacaaaaaatataagcaaacatattaaaaattgaaaaaattacatatcgcaaactgcgtcgctaatatctcgttataattcattacaatagcaaatccaatttaactttaattaataagcaactttgatgttcagcagaatttagcgatactattaacaacgtctggcgacaacatgttgttattgaacatgtcatcagatgtcgcaaaatgtatcactatatatcgttgattgtcatgatgcatcaaaccataaagacaatatcgtggaatattgcgaaacgtcgcataattaatacaaactgataaaataaacaaaacatagacgccattagggacgatatctccaaatgtcgctatcattgtcgaaaaatgtcaataaatatataaatcaaatggaatcaaattgccaccatcaaaatccaagcccaaacacaaaaaatcaacttaaaactgaataaatttccttaatctcaaccataatcaacaaaaccaacataaaatttcaatacaaaatctaaaaattggaagaattactcaaaaattaaaaaaaataaaaataaaaacttactagagactgtgagaattgtgggtggggcccaatccaatacccatggaaaaattggcgtttttgagaaaatgagatggaaaaatgataaaatggcaaaannnnnnnnnnnnnnnnaatccaatacccatggccggccact

SEQ ID NO: 47629 - DNA, 890 bp, Cannabis sativa
aagccattcaatctcgcatctagcgtggccttcatctccttgtcaataatatacctattcattatgcgagctggatcatattgccaaattttaaaacacatgtcgaatgttagccttccatatttactgttcgaaatatgagaataaaatattgtagttttaagtaatgtggaggtttttaacacgagtgccaccattgaagatgcttttagagcacactcccaacaacttctctactccatcttttaaaatacatcacaaaaattttactttctctataaatgtagagtatggatagtaaatttttaaaaaataaaataaaatgaaagagcattttaaagcatctgccgtagcgcatttttactgtggttctttaaatttttctaagaagttttttttttttatttttacacttcaaagtagttttttttacatttttacagaaatccacataaaaattcacacagcaactaacagaggaacttaaatcgtaaccaaaattctcataacaattgttaggctactttttagcctagtttttgggtgttaatttaagttgtttttgagccgttcatgatgctttaggacaaaattatgcttgttcattatgttttaaggtttcctatagctgtgaaaattcgaggcttcaaaagggtgataaaagaccaaggcaagtgaatagaaatcaaaaaagcaacatttgattcaccagcggcgaatttattcacggccgcagccgaaatgttgcagaatggggggtttttacctagcccagtcgctgcgacaaggccaaagctggccgcaaccaaagcagcagcctagccgcgacagatttatttacggtcgcgacgaggacttagtagatagactcgagatcaaagcaacactct

SEQ ID NO: 47630 - DNA, 3586 bp, Cannabis sativa
ctattttgttggtagtttcctatttcctagtctcctagctttgtatataaatatgtactattctatgaaatatacatataattcgattcactattttctacaatatacaaactcaaccttctatagagaatacatatcacaatgctatatcaatccatgcaaacgcagagagttctttttgtcattgaatctattatttcgaaattagatcattccatatctatgattaataatcctcaaagcacagtaatgtttaattaacttcatggagttcagatctccacatccacacttttttctacaatgcaaacctatcttcttacctaagaaaggtaacccacattcacatattctaatcctagtaaaaaggtttctaaattctcaggcccttggacgagcactgcagtttcgaaaactactagatttttcaaaacacactgaagtttactacctcaacatattctcagcaatcaagtacaacattatcgaattctcttaacaaataacaaacaaacaaagttcatacctttcccctcattttatgacatgagataggaatgaaaaagagatcagcttgatccggatcttcagtacggaattgactctctcgaatattctggaagaaataaccctcacttgcatactttccggtgagctttctcggcgtctggtaaaaggttttgggatctccatcgggatatatataaactttaaaattcttctccatcgcggcgtagttcaatctgaaaacctccggagagtgatatacatccgaaagcacatccttatgttcttcttccaccactctctcttctactattttagcagaaaccttaaagagcccaaaaacaaaaaaggatcagagaaattgaagaaatttaccggaaaaggtggaatcccaagcaagtacctgaggagttggggtagggttctggaagtggatggatttgaaggagaaacaagtgaaggagattaagctgaatatggcgagagtgagaagagatcctcgtaaggagatgaaagaggaagatggcggcgccggagattgcttgccgccactcatcgccattagagtattcactactgttttcttccagtgatttgaaattggcagtgaattttctttggtgggtttttgcttctctttatttgctcctttcaatttaataaaaatgccacaactcttttatagcaaatactcaaacttcactatgcccccaaagaaaagttgagtctttaatctttataaagttttattttttatttttaagataattataaatatatttatttgtagttactattggttaaaattattaaagtgattgttaaaagaccaacaaagtttttttcttttcttcaaactacacttttaaatggaaccaaaagtgtcttgaaacttggccaaactcttttctttcttctcaaaatgtttatattcttgaaactttaaaatgccaatttacaagaaaagaatcctgtgctatatttcaaaccaagaaaccataatgtcctacatacctgaagcgaaatacatatgttttttatgtacaataaaaacaaaattaagacacctcatcttgagattatgccaatgctgattgagttttgtttgcacatattatattatgccacaatgtaattttcatatgaagaatgagaccaaaatttaatttctgggctgcagcatgtacaataaaatgccaccagcaactgaaacattgagagactcaaactgtcctgccattggaatgctcacaagctcacactcatgtcgagatttctctgataggccacccccttcactacccagaaccaagcacaacggaagatttgaataagaatcggcaagtttttgagaaagttggaagactggtttcgtttcatcacgactatctggatgtgcggctagcattttcgcttgaaattcacttatgaggttttgaagatggaaccaactgccacaaactataggcagctgaaatgaggctcctcggcttgctcggattgctttatcgttgaatggatcacaacagccaggaagtagaaaaattccaccctgttgaaaattaatcctgggattaggcttctcagttaaactcaacaaatcatgaccctttttttctgctatcaaacagtatttacatataacaaaagatgcaacagggtttcggggtagatattaatgagatatagaaaggaaacataactgaacaatatatgttaaaggcagtaaactgaatccaaaaatcagagatgattgacgaaaggctcagaagacaaaacagaactacaaagtaagaatgatgagtgttttaacttttcaactaattccatacccatttaaaggccatggctgatctgaccaacgtaccaagatttccaggatcctgcattggataaataagatgaataagtaacataatatgttgccgttaaataccagatataagaaaacacacttcattacattttaagcacagaaaaaaaggagattacaaaaaactttaatacataagtagagcaaaaatcacctggatgccgtcaaggaccagaatcctatgtgcaactgggaaccatctttcacagcctgcttcttgttgctgatcatctaagttaaagaaactggtaggaatgctcatgagaccaattacttctatagattcagttgattgcaacccagaaagctttttcatcactgcattgctcacacgcacagtacgagcagaaaagccacctatctcctcaggtatttcagctttatcgagtacaagtaaacaatccattctgacagttttctcatgtaatgactcttgaaatttatatatctccctgaaaacatgcctatgtcagaattttaccagtgtagataagttgttattgttgacattggattatgtggaattctaagttctaaatggaatctagaaagaagaagaagagagacagagagagagaaatttgaattgcaatcacagtagcaaaaaaaaaaactttaaaagcttaacttttcaacctataaaatgaggaactagtctagcatctaacttctccttttaagcagaaagccaaaaacggtgaactaccgttaaaacaagtatattaaaacccttgaatgcaacttctaaaacaagtagggagttggcagcatttcgagctaggagttgaaccaatgctgctattccaaataattcaatttgatgaaacaagtatataacagttaacactacactagtgaagttattctataagatttcattcaatatcccctataatttagatatctaaaacttttgctaaaccaatcactccctaatcctatgccagtatcccaaagaactaaactttttgctaccattttcatcagctggcattttaaagtttctaattattgtactatatatctattcaacaatcaagtggtcaatcccacaaggttttggctagaattttcctgtattgcatattagatttaggttcaatgattcaagccgccaagcaaacaattgatcatcagtagttagttaactattcgcaagagttgtttctttctttgccatgaaaaatggttgccaatttcatcata

SEQ ID NO: 47631 - DNA, 1706 bp, Cannabis sativa
tatccttaactatggaataacacttttaaacggtgctactattaatgcgcaatgctcctatttattttggtagattacatgcaagcatttatatcaaagaagacatgcaccacctcgattaccattctagggttatctatttttttttttcaattaatcaaaccaatattcccaaagctcatattaattaataaaagaaattattttataattcactttttaaaagggatatatgaatacatctttatctgttttagtattcgaaataattttttagtcaaaagttttcgatcatgtaaattatagttatttaagatattctgcaaaatttaacacgccaaaaattatattcaaatagtatgttacacagcgtgattattttattttatacgcgtataaaatagactgtaaatttatttttctatatatattataaattattttaaatttctcaaaattttatagaatataaatcttaaataattataacatacatgaatattaataaaatgtacagtaaaatcactcattaataaaatgtcttttcattattttttcttcttgtgtaattaaatgagggcattggtaacataacaatgtgccaaaagttaattctgatttaatgtgacccttttttttttgaatattaataaatgtaattatgcatggtttttaatgttacttattaattatcagagaaaattttatctatatatattttagatttagaccttgacatgttcatactctctttagtaaaagttccacagaaaagaaataatcttcatctatagctctggtaatattcctttctctttctttttttcctttcgttatttaaatttatagtaccattgaagtatttcttttttattattatttttttatttcttaatgaaaagcatatctaaagtcatattttttcaaacaaaaccttagaatttattcactaaaaaaattactaacttttgagagtaatatagtgatttcgataactctcccacttaaaatctatttgttttatggtgacaataatatatatatatatattatattatgtatgtatatataattaattgttcaatttgttgaaatatgtttctctcttttgatttttgttagtttataatatatcaatatatgatatatatatatatatatatgggcactaggtattaatatatcgattattttaattatttggaagaataatttattatttgttcatatatatataagtgatttttagttttgctgcatgcttaaaaatgcatgtataaaaattctattccaatttgggttaaatcttgttgtaatagttttacacttaaaagagtagttgtatcaattgattttttcacatatataaatataaaaagtaatttttgaaaaaatgttgttaatactcagtcacataaaataatttcaaataataattctctatttaaaaacatatatataatttgagtatttgtctaacattacagcaatggaaggtagcatcgacgaattaaaaagcaagattgatgcaataaagttgaagattgaggcggtggaacaaaaaattaatgtaatggcgaattgtttgaaaattaatgaagatgtagctgatctacaagccagactcggtagcgagttgaacaaattatgtcttagcgacacaattatatgtcaagcgatcgattttttagccacaagacatgatt

SEQ ID NO: 47632 - DNA, 1358 bp, Cannabis sativa
ttatttcaattatataatattaatatatacatatatacataggcgattaagtcagaaaaaaaatttaagtgtgctgattatgtatttttatagtgaaatgccaattaggacattttatggtgccataagtgttaaatttaatataaaatctcacttattttacttttgataataattatagaaaataaataattatttataaggcgctactcatgatggtactaaaactcatggtacttaataacaatgtttattctaattctatatatgatttcaacatttaataaaaaaaatatagaattgactacaataaaatataaaataataaaagattatgttaaaataaattttagtgtaataatattttaaatttattcctaggttcaaatcctaataattatacaaaatgtaaagggaaggtgaagagttttgaagtcgtaacatttttaaacttttcatatagatttaattaccactacactaaacaatataatttgataatatttgaccaaattaaaatttgtatgacaattttttttttaagtttaagcagcaaatactttagagccaagtcaaatttcacgtgaggcgatcgatcgcccacttaatttgcatgtgagttcgtccatgcaaatattctcacataaaaataattattaaaacttaaaataattaataaaatatttagatcaataaataatattatataattgtaaaatatatatgaataataatttttaaagaaactttaaaataaagaaagaattaaaccatatgttgtagcataattttagtacaatatttcattaaatttttcaaagctcctagttgtacaatttgtgtcccgatggatctcaaaatagtaaatatatagcatatatttatattattagagatgattattctaaacttcaataataaaatttaaggtattgtaaaatttaacaattagcaacggataaacgtctaaacgtcttaattttttttttttttgaataagataaacgtcttaattagtttaatataaagaaaacacaagttgtttactaattaattatcaataatacaaatatattagaacggtacgtaggcctaaaaaaaacaaccctagctgtccattttttcagcgaccatatgcaaatgttttttttttatatattatgtaacaaccccaaatataaaatttcattaaataccttctttgtgcggggttcggtgacccgagaaaattcattattttataaccctattattattattattattattattattattatttactttgactgcaatttataaccccgtgcgaaatactagtgagatcagttgtaatgatttttattattatttttttt

SEQ ID NO: 47633 - DNA, 691 bp, Cannabis sativa
acgtggcttggcacgtaacaatcacctagtatagttaaatgtgggaaagtcaaaagcacccagaaatttatttcatggaatgttaaagaagaaccaagaaatcacattgctagtttaagttgaagacatactagaaaataagctaccatacataaacagtacatactatcatgaataaaagataacaaaaagaggagcatattctttactcctttttgagtagcaatggtcccacattatcaccggttgctttgttgtgcttcacatgactcccgtcacacagaggaaaagttcccgacctccaacacctgttcaaattaaaaggttacccacatacatatagtttctttacaattaacaaacacatgaccatcacaaataaaatatgtgtacgactaagagaatgatgattaattatttatgaggccccatctaaattttaattaacaaaacatattatattaggaacaggacatcattctagcagttgtaaactacatatataacattaaaaatcatttttataaagttaggttggtggcttgaatatgttcttagaatatagtatctgtatagtgtatttacacatgctttggatcattggatgggtgaatagactaaaaatcattggaatctttgggacagacaacattgtaattattaatagtttggtttgagcgcatgggtgcaa

SEQ ID NO: 47634 - DNA, 1225 bp, Cannabis sativa
aagaacatttgttgggcatccacatcgtgattgggccagctcagagggatggctcagggaataggtgaggagtttgggacctacacacccactcatgtggtatctccaaagtttgtgcaactgaaggccctacatcaggaatcaaatctgggttaccgttattaacaaagtctgggctagggagctccaataaatgaggccgaatctgaaggatattctcgttctccacgttcaaattttcatttgccacattttcttgtcgtacaccaacattctcatccgtcactacactattgccactacttctactattactgacattctcgtactcgaatttgtcctttgtcccctgttcctgtaacggtgtatcgccagttggcttcccccaaaacggctctgtctccttccccttatctttctcatcagtcgctttaaccactgccggtcttctcttccaagttcccgtccgaccctttctgtgctgatcccacttcgggatactttcttctataatcaacctcgttactcctcttccattagagttgaagcagctactgtgccctgtatcactctttaactagcttccatatatctgtactgctttaccgtttctcgggtataccatagccatttgggcatgacatacttttcccagtgtgcaagtcttccgcagatgaagcaaatgataggcaacttctcatatttgaactgcacccaagattcagagtcacctcccgttttaaggaagaagcccgatggcaaagggtgtgtcatctagacatctatccaggctcttagataacctcttcttacaacttcttcttttctcttttcatccgacttagccagggaaccaaccttttttgccactatagggatgttatcattctagagaaatcttgttggtaacccatggaactgaacccagaacctggccacctcaaactctgccacacgaacctcaccttcgaccggcctcggtttgagatttagtagaaccccattaaccagccaaggtcttttgtccattacaaacgcataatcttcttcctcttcaaagaagaaccccataattccatcttcacacttcttcatcctccaagggcccaatcttctccagacaccagccagaatctttttcaccacagaggcaggcatatccttgcagccaatgaccattcctatgcaagccttactcgaaacaacgtcttccaatgtgatatct

SEQ ID NO: 47635 - DNA, 1265 bp, Cannabis sativa
aactttggggatttctagaagggggcaatgcctacttccccacagaaacgtgcggagtaacatcaaagtggaagatgagctcccatttttgtatgagcccagctccaaaagccaaagtcgaccgtgcatctacacggtgattcccacaaaatagaaagcttgttccaaaacaggccaagaatgttcttgaggccttgatcttcttcgtatgttcgaagtgcctcataatttttcaatttgtttgtatattgatcaatcttccatggagatgaattataccaaacttatggagctttgacttcgtctagctccaaaatctccacctcgtcgacttgagaaccaatggaagaaatttgaaaagaacaaaacgaagggccaagaagttaaatatccacactaaataagatagcaagggtacgggagattcctcccctaacatctcgtagagagttccccactagaccctacatccagatgcatgatcctcaggcatattgctccaggatgatcagatcaggaacatgtagaattagttgagaatttacaatttatccataaccataaggatctcggatagaggaattaaattcagccatacttgaatgcattttgctgaagtttggctattcaataggaaatttactaatagagacataatttcacaaaacctaataatgattatagatagtatatataaaaaaatgtccttattttgaagaatattcggaactactccaaaggcttaaatcgtactctttacctcttatggcagacatgcaagcataaaaaagaaataaaattggcagatatgctattatgaattattgtttgacctacccgaaatctaaacacgtttcaaaattacagaagtacaaaggttactcatgtgttgatggtgaaggtattggggaagggatttaaacatcgtgcgttggtcgtagggagggtcttgtggtgggtggctgatcaaggcgcacaataaaagattgaagagtgcgagtttgatttataagtttttccatctccgcttgaataccaaatggtttgatggcttcaaggaatcaatcgtgagaaatggaggtggtgcgcctagcttaaccgtgaacgaatttgaagcaaaagatgcagacactcattgcaataattggacattcactagaaataattttcatctgttctctctgttgggttttatgccctaaataaaaatctgtttcaatgtaatcaagattattcaatatcaataaaataacagaagtattttt

SEQ ID NO: 47636 - DNA, 911 bp, Cannabis sativa
atatatatatatatattatccaaacaccaccaccaaccctttaggaaaggaagggagagactggtggttatgagtcaaaaagataaaatatatttaaataaaggataagtaagaatacatgtaaatattatttcaaaaaacaaaaaaacaaaaaagaatatatgtaaatatttatatatattagcatcattagcggtatatatatgaagactttatcaaatcctacttatatattaatatatagctcaactactttttgacttatattatatttcacatacatacaagtacaactactactttcacaaaatatatacactcatatatgtatatgtatatatatatatatatatataatatacctaccaccctcaaagataaattagaatccattatgtatagagaaaatgcttttgcttacacattaccataaatggatttgttaattctaagcaataataatatcatgttaattgaaataatttacgatttttggatgggtcatgaaccctaatgtatagtactaactcatgtcaaagcttgatagtggtgtccgtactcccattacgtaaattatatggatatatacatcatcaggatctatatattatttatataaatattataggacccaatattatatacaataaataaatataatacttttggtctaaattactttgacttaaagtatgtcaatgtcatcatccttgaccatgtagaataaatattttggcactatttggcggccaactaccgaatctttatagttgatatatagttcttcctttgtaggaactcattggtttatgatccaaattcaaaatttaggtgaaagaacaatcattaatgtattttattaaaagattgttacttataaatgaattgacatcactttattactttagtac

SEQ ID NO: 47637 - DNA, 1211 bp, Cannabis sativa
gatgccttgtgttctggttcccttaaggtatcttaagatcctcttagctacattccaatgtgtgtctgttggagctttaagaaattggctaaggtaatttacagagtaatttatgtctggccgtgtatgacatagatattagagagctcaaatgagactcctgtagactgttggactattcatcttctttccatcatcaatagacagaggtttcccagctgttgtggtgttggacagggtttcaaatgctgcagattgttttcccttagaagatcctcaatgtacttaatttgagtgagatagagacctgtttcatctcttgcaacttcaatgccaagaaagaagtggagatcaccaagatccttgagtgtgaaatgtttgtttagctgttgaacaaactcattcaatttttgcttgtggttaccagtaagaataatatcatccacatagattagaacaaggatgatgatattgttgctgatatagaagaataaggatgtgtcaactttggaatttttaaaattccaatccagcaaggtgttcttcaacttttcaaaccaagctcttggagcttgcttcaatccatataaggatttatgtagcttacatacataatcaggtctttcagggtcttcaaagccttcaggttgacacatgtatatgtcttcttctaagcttccatttagaaaggcattgttattgtttaagtgcttgatgtcccaattccttgaggcaacaatgcttagcactattctcattattgatgccttgtttacagggctaaaagtttctccatagtctaagcctattctttgaggaaacccttttgtgactaatcgagctttgaacctctgaaatgagccatctgcatttctttttattctcagaacccatttacaaacaattagattgtaaccatcctttctaggaataagagtgtaagttttgttggctctgaaggctttcatttcatcactcatggctttgttccagccactgtgttgcagtgcttctttaatgcagcttggttcttcatagatgggtgtccactttgccttgttgagataggttttaggtttgaatatccctgctcttgctctagtgatcatgggatgagttggtaaattactggaggctgtcacacctattgcagttacaacagtggtgatttttgtgtcattcctattagtttcagcaaggttttcagcagt

SEQ ID NO: 47638 - DNA, 2265 bp, Cannabis sativa
cctaagattcaggtgaaaacttctatagactggtcatggacgatgactactgcacaaatacaaatggcaacatcagctttatatggaaatcgacctacaagtggttatacctttttctgacacaagatcaaatcttgtcccttgtgccagtccatggtagacgcatacgtacttcatgacatgcctcttgccaaacggcttgtctagaaagtaatttgtaaaggaaaaacctttgggcaacacatgtccctaatcccgatggtactagtcactaccgttgtacacagcaggatcaagaaggttctcgatggccgaatagtaagatcaaaagttgtattctcctaaccttgtagcgggttatggtacgaaaccataggtgggtaaagggaattccctgcccacatgtaagcttatatatacccccaccttttatgtacaaagggtgatcaaattttatacaagcctaacctttacaaaaactcctacatgctttcttcttcttcaagagaattaaaaggagtttagagttagggttatactgtaaacacacattttattacccaaatacttgctcaaagggccaatacaactaacttatagactaggaattattaagacccaaaccacgtaaaaatcatctgtctattatttttttgtattttctttctttctgaagccctaaatatttagattccaaaaatctcagtaaacattttggtactttccttgagagctaaagaaagtttgatatttgtcgcaccacctcgaccatggtgttcactctaaagaatgttggcaagaaagcttctaaagtgactgttatggtggaggcagactccctcgctcccagtctccaactaggcagtgtaagagagggtgttgctaatgtttaaaaaccgagaaaaagacgttaaaaacttgcacaatggtgttaacaatgaccaaatccctaaagacagagaagagaagaacgatagagatggttatgtgaaggatgggtactaagaagatggttattattatgaccacaacaaaaacttcttcgagtgaccaaggagttataagctatttagataatgttagctgagcaggagaaactcaatgaaaaaatgaagagaatgatggctcgtctacaagataagtttgaggaactagcggagtttgacgatgatccctcggtggaggtaatggcataagagcatgctcttgggaaaactgaggttgaaacctccaatcccgactaggataaaggtaaagtcaaggtaggtgaactcactcaaaagtcctctcctaagaccattttcaatggatggtgtatattttgggttaaatttggccaaaaatataccacaaaattatatttcgcccaatctttgtatttgtgctccaatgcacaaggtgcaaataaaggtgcaaataatctataaaagtcaataataccattcattctcattgaaaatatacaaacatttatagcattaatgagtggcaaataggtaattaaaaaaggttgcatttattgtgaggtaaattttggcacatgccacaatttttagctggaccaaatttggcacacattttacatcaccattggagtttatcgtttagaaaaatgttcttaaaaatggtaatacacaacatttatagctctccatttgagatgctctaaagctccacagaaagacacgaatcaagctgggcagccctttaagacatagaaggccatcagtgttttcgagcgttgatgcacttctgctcccagaggtaaaattgcaccaaaaaggcaaagtaaaccaaaggggcaaaaaaatggccctagtgactctgccaactaggatgaaaggacgactgaactacactctaaacataactggtccaccatagacctcgatgggcgactggatgctatgtaggaaaggtacaaatgtgaaaatacaaggtgatgtggaggcaaccttagatagtacttaagtgacaaaattcgaggacatgatcttcctgaaagtgacatgaaaaggtaggaggagaagatagcagctctaaccaagcttgttaaaaagaaaggtaatgacctctcatatttagaagatgcagacccagaactctgtattaagaggattttagagaccccactcccaaaaaaaatttaaaatgctacacatcgagtgtatgaaggaaggacaaatctgggaacacacttggaaacatacaacaagatgatgcgtttatcaagattttcgaaaatcgaataattagagcttaaga

SEQ ID NO: 47639 - DNA, 2739 bp, Cannabis sativa
  modified_base (72)..(75): a, c, t, g, unknown or other
aatgaatgaaaaattcttctgttattttattgatattgaataatctggattatattgaaatagagttttatnnnnggcataaaacccaacacttatttgtagcactagatgtttcaataaaaagatacaccaagtgcaaagtcataatcatggttgatggaactatcctaaaataaacatatgaagggacattactcttagcttatacacaagatatgcaaatggatacatttttctcgaactctctgttggatttagaaaataacaactcatcatgggtgtgatttttaaaaaaattgagggaagcatatgctgtaagagaagaatagtgcttgatcttagacagaattgagagcataattaaggatgctgctcatgtatttccagacataactcacggctactgtgtataccacctattgagcaacctaaaagcaacctttaagaagaatgccagcaaactcgaaaaaccattcttaatttgcagcatcaaaagcatacacagagaggaaatttgaataccatatgagcaagcttcatagcttggacaagcgtgttagaccctatttataacaagttggataccacaaatggtcaaggtatcacaataaacacaacaggtatacaactatgacttctaacatagctgaatctctaaactcgacaaatttagaagctagagaaccaccaatcactacacctatggagtcattgagagttttgatacaacattggacatacacaaataggaaaaaagtacaaaatacaacaacaattttcacacctatagctgagaagaagttaaccaacaattttgtcgactcattgacagaaagtataagaattcattgaatgaaaagttgcatgatagttgtgttgtagtttctttttagttttgttaacattaagtacgcagtaccaaatctgcatgtgaaaccaataaacgacggtatatttaaagtagtacaacaaataaggtcatggatatggtcattttaaaagaaaaaatatgcagtgacaacagattccaacaagacaaactaccatgtgcttatgctcttgctgtgatgaaagatatgagcttaaatgtttacaattactgttcacagcattacccaactaaaacatggcttgaaacatatagtgggtcaatatatcttgtacacaatcacacaacatggaatgtatctcaaaacatcaaaaatcatccccctataaatcaacttgtttgcccttgacattgccaacgtccttagacttatcaccttcacttgctacaacaccctcccattttcgctcaccaacatccaaaacattagcaaccccttgtcaccaaccacatcaacatcattgttatcatctttattatcaactctactatgcttgctgttcctgagaaccatcaccatcagaatcaataacattatcacaatcaacatcattcttctccaaatttggacctatattatcttcttcatcatcgtcggattttgactcttcactatttttacgaaaattaatttgtatgaaaatcatgaaacaactattaacaactaaataacagaaacaataaatgacatgaaataatcaaaataaaaacaacttaaaatgacaaaacatacctcaacatgagacctgtcacaaaaataagtaaccattgtctttagttcaccaattacatccaacacacccttgaaattaaccttaacaaaatctctcaaaagagcaaagttatcggacagtttattctgggaacaaataattttactgactttctctgtcaaaatcttgaaattagaagaaatgttcttccccaaagaagaaccaacattagcagaagacttaaccgatgcacgatcatcaataaaaatatcctcgaaaaaactatccagaggtaactgcttaaactcttcaaaagtgggcctcaagttcttcacttatacacagtaacatcaaaaaccaaacaaatacaaaaagtaaatttcattaaaaaaaaaaagggtaataaaaactataaaatacttgcaagcaaactgaacacttacaaggcaaataaaaaacctttaatgttaaatcttgtaaagctggagtacccttgccaagatcatcaccactgccccaattcaaaattctcagaatatgagaatgaagtcatttgccaaaatctcctaactttctcacacaacactcgtaaaatcacacctaaaaaacccaagggcaacccaataacctataccgaccttgataagcattaacacttacatgttcattctttttcttaacactgtgagcaacattacccttcaaagagtgtaagctcaaaagtctctctaccccaagagtactcgtcccatctaccactattaatattatcaatattagtccaacgaagctctttctcctttgtgttacttagaaaaaataatacacaaaatacaagatagcaacctttaaagctaaagcatcatcatccccccacatacaacctgaaatgacaactttaacaaatttttgagtaatcgatttaacactacggaagtatgagtcaataatgtagttgattcctaaacaaatttagatttgttacaatctctcatacaatccagatcgcacaccatgaccacaaatatttacccaaaattccttgacattcgactgctaggcctctctcaacaaaatatcatgaacaatttgagggtaaaatttaaaagatataatgtctaaaaatttaccaaatta

SEQ ID NO: 47640 - DNA, 1385 bp, Cannabis sativa
ttggccacgcatgaaagtatatgttatatagcattacataagatagcactaaccaaatgacgtaactatagccagctagctagggaatttgtattattattctctaattactacccatcaaatataaaaggcccctaacttattcaataataatataatttatacaaagtattgtttttggtataatttttatacttttacattttaaaaaaattatataaaaataacagcaacataaaaataatatacaaataataaaataataaaaagataacataaaaaataataagaacatattaccgtattttttgtaaattaagttttaagaaccgtaaaaatatttaaaatattatataattgtatttttgtaattttttattattatttttatgtattttataaggccaactccaatgcggcttgcattgatgtggcccatcaaatgctctcacaaagataaactaggggtggagtgttatacaatattggagaattttaaatagacaactacaaatgtttaccaagagcaactataacatttgtcttttttcgaactctataaattaatacataatctttcattacaaatgtatagttttgttgatttattaatcagtttctgttataaaaatttaaggagaggtagattaattagtaagttagtattgtactattaatttataattatttctaaattattatatgcaatatagtatcttaatattttataaatttttaacaatattaataatgtaattacttttaattaacaaataattaaaaatgaacacatgtactattatattttatttaaatgagatcacataaagaggattagttggtcccaatccatatatatgtatatgtatgaggaaccctagataggtaggttgtgcagcctgccccacccaccaatttgttctcatgaagcaacaaactaatatatgcctttcaatatgtctgtcgaatacttgggaaaaagcatatcacgatgggatttatgtagataatacagatggtttatatcaaatatgatatctatatatatatataaacatattaaaaaagaggaatctgtatccaataatatacatgatatatattactcaaatctcgatatacttatcatatatatagatattatattggggtgttgatgcatagaagatatatttattatattattattgttattattataatttggatacttttgaatattatctaacaattgagaagtttccttcaatttatttctttttttgaaaagcctttagatttgttaataataaattggtaatgtcccaaccaaaaaaataaaaataaattggtaatgttaaatttgtaaagagtattaattatgccatactcatttgaattcatat

SEQ ID NO: 47641 - DNA, 607 bp, Cannabis sativa
tcccatgggttcgacctcgttcttcacaatctcaatactacaataaagattcgtgcgcttgcgagttgataaatataaaacgtaccatttcggtatacaacagtatcatacctaaccaaacaagggataaattacatttaactttgtcaatatatcaattaaataaattttgactttaccttaattttttttaaaaaagaaaataatataatagtcaaacaattttactaggtagaaagggttttccagcttgggattttaaaaattaagaacacttaaattaaatgatgtattatttatttatttatttatttagaataaagaaagaaataatatatatatatatatatcatactatataattttagagaaccatatgcatacctttatccttccaaaaatatatacaaatatatataaaaaaattgataaacgatttaatgtaaaataatatatatatatatatatatatagttttactacaatataaattttattgttacttatattttctgttggaatggaactatacttttttatgaagaatttcatgtattataattacccaaattaatggcttctgttcaagaaaaaaaaaaaaaaaaaa

SEQ ID NO: 47642 - DNA, 721 bp, Cannabis sativa
tatttttggggttttgaaaaaaatgtcatagtttttttagggtttaaagttttggtttaataataaatttttttaattttttatgtatataaaatcaaaattctcattaacaattagtcgctattattgattattaacggtggataggaaatattaacaatagaatctaatttctgtcgttaatacccccactattagcgacggtttttgtctgtcgctaataattctgcgactaatgaccaccattcttgtagtgaaaagttcaataacataggcataactaaaaaaaatggaatcgccttcactatctcttcttactttgttaatgtttctttataattaataaagttataattataaactataattttatatttttggcctcacatttgatttgtctacactcacagaatcttacaaaatacccacctcggacatgtcataactatcataaataacattctgttatgacagttatgacatcaactctcattgtccaaatcctatgaaaggggtcctctccaattgagctcattgtcgaccagaaattgagtatgtgttattgagagagaattagagaaagaaagagagaaaccaaaattgagagtgagagagatgtgtgcctctttgtaattcaagcatagcttcactcgagatactatgaactgttcttgacaattcttgttgtaatcttctggtgtttcattctctatcaataatg

SEQ ID NO: 47643 - DNA, 857 bp, Cannabis sativa
ccaatatgcccacattatcttattcacagggtaaagtttatgcttgttatcccgtacgtggtttataatatattttctgacaatatactatattagcagttcttaaaagaattgttggtatctttaaatggatgattgcaaatcatttctataatggtattttgcctttttttaattagtgattaatgcttaattcgaatgttatctaatataaatagttttatgttccatccaggtagagatgatacttcaagctttagaatatgaaaatggtgagccttttccgcatataatatcctaatcattttattctcttcattttcttatctggtcttattctttagacaagacaagagtcatcacaaacttcattcttactccttctgatgtctctaatttataccactgaactttaattactgatttagatgaataatttttctactcacacccgaaactaacgaaaacatgtttctatctttttgcagaacaaggaaaggacttggatgagtttttccagtcaactgctggtatgaaaaacattctctaccttattcttttctaaccttattgatatgttgctaaagctcatttaatttcaaactctgaacagggaagttccagacagaattaggcaaggcttgggcctcagagatagcatcaagaagaaaaaagcaagaataattttttgatttaatttctttttctcactttatctttaaatgacactttgaatcttagccaacaaattgatgctactgatgatggaaagttaaaggttgtggttgcctaccatggcatttagccagtggctccaggaactctcaggtaaaagattagacaaccaaagactatta

SEQ ID NO: 47644 - DNA, 760 bp, Cannabis sativa
cccccccccccccaaaaaaaaaaatggaacattagcactcattacaagcattacagacatcatgtatgtggtgtcatgcaaccatcagtgtgtaatttgaggtacaactttcaagatagcattaaaatgtcccagacatcaaaaagacattcaatcaagtcatgttggatcaaagacaataatccgacacgggtcacccatccagacaacttcgtgatcgaggaagtccacatgcaattaagaagatcctgtgtggacttggggggaaaatattatccaaatttatgcacaatgacatggcatccatctaggtgacacgtggagtacatttcataacctgggcatatgattttactcttaataagccttacaggaaggattgatctcaaggtcacagacggaagttgtgacattcgagcaaagtaagaatatacgtttgaccaacttccatcacacaggttgttcgtatgcaccgaccaggggatgcaagcttgcaagtcatgacataatccctaaattcctgggatagattcatatctttagagaagaaaggcaatcaacctaagtttcctactttccttattgtaattatagaaaatgaactagttttccattttatttctcattgatttagggaaaccaatttcatgtaatcaatccctataaatagtggaatcatttcactattcaaggacacgattttattcagaaagagaacactcaagatagaaacatcgatctaagagtaaattacccacag

SEQ ID NO: 47645 - DNA, 2354 bp, Cannabis sativa
ggccaagataaaggctgtcgtcaagagctttagacatgtggagtgtagagcaaacctgtgcacgggttgtggcattagtgttgggactgaagaagatcgaagactttgagtaattaactttctggcttgatgcattttcgaagagatgcagtaggttggagatgctattagcaacacctcgtgttgcttggcaaaacaagtagctgtcgtctgcgaagaacatatgtgttattgaaggtgcacgttgagcaacacgacatccttgaatgagtctattggcttcaaatttttggattagagctgaaaaccttcggcacatataatgaagagataagtagataagtagaaagtggattgccttgacggattcctcttgacgggagatagactcaagtacatggccattatgaacaactttgtagcgaaccgtagagacacagaccataataagatcaatccatttcctagcaaaacccatacgattcataaccgctctaagaaattaagctccattcaacctgatcgtaggctttgctcatatcgagtttaagagccatgaagccttttttacctcttctttttcgtttcaggtagtgcataacctcaaaggcaaccataacattgtctgagataagatgattaggaataaaagaactttgggtgtcagagataatacagtcaatcaaatctctcatacggtttgccaaaacttttgagatgatcttataaagaacattacaaaaggatattggcctaagatgacccataacaacaaagtttttcttttttgggatcaaaacaagattggtgtcattaagaccacaacgcatttcttcggagccgaaaaactctttcactaagctgattacatcagcaccaacaatatcccaatggtgtggaaagaaaccaggtcccataatgtcaggcccgggagttctggatgcatagaaaacacagcctactttacttcttcatcatggatcggttgcaagagagcttcattgtgaatggacacatttggttagtctttgaattctatcatagtcaatatgatcaagacataaccaagctcaaagaaaccatatgatcacttctaatacaaaaactatagatgttcatatctttgattaacactaccactcaattatactatcgagatctcaagatgtaagtatgggctataccggggtaagttagtaacggacaaactaaagaactcgagtagcataattagcttaagacttaaccatgttaggattcaagtcaaatgaatctatatcaactcaatgttattgactgataatatatataacggtaagattatgatatgtctagtccaatgtaaacctatgattcatacaagtctactttaccaatatttagaaagaaaaaaaaaatataccactttccataatttaagtagaccacattgtcgattatcactttagtgtaaattcggttcactaataaatctcgagactaaaaatagtcaaagcatataatcataattatttttcattgtgatggcgtcactataactatgaataactatatgttctgaatttaatagaatttatatattaaatatataatcacgtaaataaacatataaatcaagcgattgataaagtcaaaatgtgatttttgaattttattaaaataaaataatattaaattgaaattaaattttatttaaggcataaaacccaacaaaatcttctatttacaacaacatcatatatcatggagtgacatatattcaatctaagcttgaggactttctttaaataccaactaaagtctcctctagtcctaagttgccaaaagtcttacccttttaaataaataatttaatttaactcaaaaaaaaaaacattagtatttagaacaaatatatatatcccaaatgtatttattgattattgatttattcaatttagaatcctctctaaagctaatctctcatattttatttaaaataaaatatttaaacactaatttattgtctaaaagtagaagtaaaagttgtgccaaacaaaacatatactttgatcgagaagaaaaaacttcattaatcgaacaagacaaatacaccctcaatctttctcaaagaaagaccaacctcacaacaacaattaattacaaatcattctctcaagtaaatcaatctctattcttgtcccttttcttttcttgatcatgctcaatctatactttacatcttctttaatgctttgaacaatacaattcactgttttagaataattcgagtatatacaattgttcctattcctccaaaaatggtatatagttgctgccaataaaaccaccagcaaccgacctatgaagctcgg

SEQ ID NO: 47646 - DNA, 1535 bp, Cannabis sativa
tctagtaaatgcaatttgcacaacaatttcttaccctgcccctgaatgttgaagatcgttcttgttggagtaagtgggttgttgtggcttcctttcaaatagaatccatcaagctgaactccactttgctccctcactacacgaactaaatcttctgctgttttgttgaagaagttttctgcaataagaaatgtctccctcccctgtttaataaaatcttcataagccaagttaagcttatccctttgctgaaaataatattcagcagccttgatgaccctccaattgagaacataaacccccatcagtgtaggaagagcacccaagattgagattagttgcttaatttctatgacttgtttaaccaacccctgcaaaggatagccccaaattttaccaaccaaccaaattgcaaccagaaaattaccactaggtggctctttcccatacgaaatacctagtaaaccaaattgatgttgtgaagttaggccatgcttaaaatttccaaaagtgatactctgtcctctggcaaaaacccataaaccgccaatcccaatgggtaaacgagagaaacatgaattactcacccaattgtcatagttgtgcttcacatgtaatactttagcacatatttcttttggtgctcttgcccaaaaccagtaggaaagaaataggggaaagtgaacaaatccctaagaatcaagggttggattattgagttcctatcatgggttgccacaaccactttgattttcttttctctgtgaagaatccatgtaattactagcccataggattcgatatcacttgataataatctcctatgtggtgttttaatgtatctgtttccaataatatcaatgtagacactcatatccattgacaatcttattcttacaatttcaacttgagatgacacactcaccataagaaaagatttgagtttaggttgccaaaccttaagtgaatctgatattaattttcctgcgttagccattaatgacttgtcctcaaggtgagaagataagttgctcttgaataagatacactttctacaggtgattcttctctctccgccaaaaacccaacgagtggatggtgaagttacatcctctatgtacccgaatcgctgacctccgaccgtcctcacggtgcccaccgtccttcgttccgtcatcggtggctgggagtcgtaatcgtccagtcgtagtcctggacgatgcttcgtgcgatgagaagaagggaacatagagacctgatcccacgtgacccatgtgttaactaaaataaacattgggcttttttttctttctttgcttaatggcccaccaagggttaggtcaaagtaattgggcctcagaccaagaaagggagaatcaagtccaattgcctcaataaccattaaggcacaccagtaatgttgaacgccattagggagctcgagaagacatcgcgacttctctggtctgggcgtcaaggatcgcagaagctgcttctcaggcgagaagattgtctcctccggtgccgatcggcag

SEQ ID NO: 47647 - DNA, 1900 bp, Cannabis sativa
tgtaaagggttttatttagggcacaaaacccaacaaatacaacccttatgctgccagaatttctagaaaataaaagggaacatgttcttttgctattcttattatttgcctgcttttggttatactgatgagagacatgttaatcataatttgtgcatattgttatttcacaacctagtctctgtgtcatcatacgtagatcatgtgtgcactcacctgtaggtgaaagacctaaaatatgtacatgaagtgaattgaatttgagccccggtattatggtggttatcaggtttgactacccagtttttagatgttgttttctatgattggtattgagagttaggggtctagtggacgctgtgatatacatttgatgcttgattttgtgattattcgcggtctctctattttgtttatatattttgataatggtgatgagatgttctatttttaaaagctaaccatgaatgaatcttttattaaactaagggtcatttgatactagatattttttactggactttataagcccaccccttattttctcacattctaaaaactcaatttgatgctagtggatgaggatggtcccgctgaggaaaaacgttgttattagtttagtcttattttatttatcatactttccattaaaaacttattttgtattcaagcttgaatgaatggtctggatgacttatattagctatgtactagttagaaatgaggaatgatggatgctagatattattttggtattttattgacttattaaatctacatattcgatgattatataattgtagggatattattgttatttattattgatgagtggtcctgattttgttactaatatttttttataaatatatgagttaatctattatttttgaataagtattttgtaatataaattaaaagattatttacaagtattatcttcctataagagtcaaagtgtgaccttttcaaattattgatattatatatttttcacggcttaaggctcgcatggtgatagatataataattatatttattaatctcatgattagtactccattataaatatgagacagaactcttgataattatagacatatatttacaaagtatgttattaaagaagaaaatataatttaatcaaaaaaaaaaaaagaaaaatataatacattgatatgattgttatacattttgtacatgttaattctctgttaatggttcataattaaaggaataaaattattgttttatcctttcaattaaatcttgttcctaaagtaccattaactttactagtgaaagttgggtcacaacaagttggcgacgtgagcacttgtaaccttatagttccaaaagtcaacccgttatttaatctataagaaattgtagatttaatatctgttaagctatgttttcagccatatatatatatcattgattctctaaaatagttatttttaggctgatcatctttacaaaccctaacaaatgaatttttatttgataattccttaacaaatcaattaaatgatcaaatgatgtataaaagagatcatagtagcctaagaatagaaattattgtgtatatgatcatctatttatttttaactaatactacgaaatgatgcttaaatgcgtacgtattaaaaaatcacacatggtccagtttaatatatcgttatatacaaagtacctccactaaaacttcttactatactagcgtgacccgtatctataataatgcaaccgtactagtagtaattaatctaaaaattctattattaagttcattattctaatatcaattgtctcataccaatatgagattaagatgaactttataatttgatatttacttaatgttatctacataacattggatatagtctatatatat

SEQ ID NO: 47648 - DNA, 1198 bp, Cannabis sativa
ctattttatccaagctttgcatagggctccacactgcgaggtttctccctctctttggaataagctgtggaatagtaaaatcctagagtgccataaggtcctttggtggtgcatcctgtctaaagcactcccagtgagatctgtgctcatcaagaggttccacattaatgatgtaggatgtactctttgtggggtagaggaggagtctatggaacacatgtttctctcatgcgacttggcctttcacttgtggcagttttcaccgcggggcatatttcctatctttggttctggcatttgtatgtgggactggaataaatttatttgggaattaaaatgccaaggtactaaagcaaataaagattttctttatgcttcgattatttttgacactatttgatgggtccagaatgataaagtacaaaattgttgacccccgaagattactaggtgtaatatttagagtcattaatgtgcccacgaccacagacccgcgcctccgtccccgcgccccgtgcctgcaccgcgcacctcacccaacaatgtaagtaaggagtatcagacaagataacgacatcacagtgagtaacaataatcggggaaaagttcatttcgtctagggtacaaaatgacaggggtatctttagtataacatagggtgtcagatgcatcagaccacctagaatccaatactattaggtgtgaaagtgacttcacatcatatggtcgggatctggtaaaattataaagtgttaagggctcactataaatagagtccttgagttcattgtaaagagaggctttttcttcttggaatgaataaaaacaggaacttcttggaatagaaaagcttttgagatttctactctaaacattcttttattaagtttttttaattaagagatagttccaaatcgtcattatatcgttgacgagttctagccgttaataatttggcgtcgtctgtgggaacgacaagctctagctacgttggttctcaaatcattcaccatcacttttgaaatgtcaagacatgccaatcgtctcaaagaaaatgggggtcactcagataaaaactagtcgaccaccatatttagaggccaccaacctcccgtcgctgagaaggccaaaggatgaacaaccaatgtgggggctgccaagttaatgctcgaaaagagctcccaacactgcaggactc

SEQ ID NO: 47649 - DNA, 2040 bp, Cannabis sativa
ttcctaaacttcgcggtgtatgtttaagagatgtaatcgtgcaatggggttatgccacgtaggctattgatggtgcttttagtaatttggtttaaaaggaaggggttttaaaaggaaaatgggtttaattgattggacagtgtaacgtctcatatgactatttgaattctctcgggtaataaatcttaggaatataaaagtaagataaagaaaaaaaaaaagaggaaatctcgttgaattgtaattattgaaatggaataatggagtaataataattaattaatttggagataattttttgcccttaaatttagacatgaaataaatgattatttttatggcagttaaaaaatttacatttatagatttaagagtttttatgtaattttatttaatttcactaattccatgattattatcacattatctatgtactaaatttgatatctatgtatcaaattatgtctcctaaactttaacatgttacattttttttacttataaaaatttttaaattcaactatctcaataattcatgagatatttttaagagtcttaaaaattcaaaaaaaaatataatttagtaaatgttagaattaaggggtcaaaatattctaattatagtctttttttttttaaattaaaaaaatatataaaaaagttatagcaaatctcactgccaatcttctcatttaaaattattacagttttttttttttatatctttttttaacaatgataataaaattaaggttttgttcaaaaaagtcttgccactagcagcaaagtagaaaaactccttcaaccaaccccacatcaatctaataaaaacatgaagtttcctttatcattggaaattttttcatctttttctttgacatttttattgttatacatttgattttactatatggtatatattttaatgtagaacaaaactttggaaaaagttaattgtttatttttatttacaagtgataagaatcgccattaagagtatagcaatggtattatagttaggttgacaaaaaaaatctaatcaaaatatgtttgatgtctactttaaaaggctgaccatttgttgattttcttcggatggatgaacaacaaattttatagaaacttaaaacaaaaagtatgtgatgaagagttggactaaggctgataacaatatgatcaagataaatgttgatgggattatttttgaagttgagaattctcactgagcggatttggtggcttggcaatctaatcgcatcataatcaaagcttttgttgtttatcacttggggtgtgtttagctcttgttgttattgttgaaataatagcttgttgttattgttcaacccgttgttattgttgaaactagtagtttggtgaatgttcaagaactttaaagtcatcttcaaatgctctctacatttaagtgtgtttggtaacacttttttaattaatttttagttttttaaattaaaaaagtgaaaatattttctaaaaccattttttattttttaattttttaattgagaatcaaaattttgaaaaaaaaaaaacaatttttttttcttaataaatattttagactctaacccttcttagatctctgaacccggaccccaactctgacccggactgcgacccaagacttaaaccctgagccgaaactggaaccaaaccccgggctggacctagacaccggaccccgaccccgacctagacccccaaacccgaacctgacccctaccctagaccagcttttgatctcagcctcaaacctggacccaaacccggacctagacaccggacccaaacccccgaacccgaacctggttccagcctcggaccaggccccggtcccggcctcaaactcgaaccccagatccggcttaaatagtagttggttgggtacccaatatcttatttattatctaataaaaaaattgtaccattaaatattacaataattttccttataaataaattagcataattttaacaaaaatttggaagagttcccattaaaaaaaaaaaaaaaaaggt

SEQ ID NO: 47650 - DNA, 3314 bp, Cannabis sativa
ttacgtaaacttggtaagtgactcgctaaatcaatttcagggacttaattttaaaactaaaagttttcctatcgataaagagtgtggcaataccctaaataccgagaaaatactaaaacaaatggaaaaattccccaaaacaggaggccatttctctaaaaatggtagacgtttttgtgggtctctgccagtaaaaatggtagactattttttttagaagcagtctgccattttctgctataaaaatcctaaaaaaactcatttttaaaccaaagcaaacccaaatctcatacaagcttccagaacacctatttacaccatataaaacatattccaatagataaaaacacaatcaagccacaaaaaccaaacttgccattgttgagtaagctttgagttcaagaactcatgcttgctcaacaccaacaacagcatcccaactcaacaaaatccaacaaaaccaacctaaatgaagctcccaaaacaaaaagccaaatagagagactaaggcagaatgggtggttaaggaggataaaaggccaaaagcaagtttcgaggcttcaaagattgaaaatgagggtttccaataagtaacaaaaatagggaagttgaagaataaagttgtcgaagttgtaacacagatagggaattctttccaagcactagatgaggataaccaaggcaagactcttgctattatgcaaacagatgaagcactgggagaacatgttaagacaagagaggggggaggtccctctcttgtcaatggataaagtcctatgcttgaatgttcgaggagccaacagccctcaaaagcaaagtcatattaaacaatttattatggctcaacatgtgggattggttgatctcctcgagacaagagtaaaggctaagaaacttggggccttatactctaacatattcacagggtggtgcttttctacaaatgttccctggcacaaaggaggaaggattgttttagcttgggacccgatgatcttcaggtaaacatattgagatgtactagtcaatctatgcatctatatgtttagagcacgggggacatgtttactagttacattactattgtgtatgcctttaatgatagccaaggcaggaagctcttatggaaagagttgcaggaatgcaacaaaacaaacagatggatggtaatgggtgactttaatgatattttggctaaagaagagagaattgagaaacgagtcaagtaccatgctgatagagagttcattgattgtattgagagatgtaatctggaagatgtaaagtattcaaggtgcttctatacctgaagtaataagcagcagggtgaggatagaattttttccaagattgatcgagtgttggctaatcaatcttggatagatgcctaccctacagctgaggtattattcctaaatgagggaacctttgatcactctcctggacttttgactatacatcctagcatggactcagggaaaaaaccttttaggtatttttggatgtggcagtcacataaagactatgttagcaggctaaaagaggtgtgggaactccaatatagtggcaccaggatgtaccagctggtatgcaggttgaaggaaatgaagaaggtttgcaaggaaacaaataaagatagattctctgatgttgtagctgatacaaccagggccaaagaaagactagagcaatgccaagatgcattgagaaatgaccctctgaactcagaattgcagggggatgaactggaagctaggcatctgttagtgcagaaatagaatgactatcattccttccttcaacagaaagccaagatcacattaataaaagctggtgatgacaatactgcaattttccatgctcgtatcaaagggaaaagaacaagctgatggcactagaatccaagaccctggtaagatcaccgatgcattcctgagctattatactgatctttcgggttctagtatgcaaaacaggaagaaagtgatggcttctgtcatgaaaatggggcctactgttacaccacaacaggttgttattctatcagcacagtttagttgtaaggaagtgaaacaagcagtctttgatatacctagaattaaagccccaggagctgatggatattctagtttcttctttcaagataactgggatattgtggggcctgtggtctgtgatgcagtaatatcctttttggaaacatggaagattttaaaagagatcaactctacaatactcactttggtgcctaaggtcaagtgtccaaacacagtgaaagatttcagacccattgcttccggcaatgtcatttataaggtggtcactaaactcatatgatctagacttaagcatatcctccttgatcttgttgcacacaatcaaggaggctttgttaaaggtcgatatataggtgacaatattatgatttgccaagatctactcagacattatggaaggaaagccaacaagcctagttgtatgattaagttggatctacaaaaggcttatgacagaatagagtggggctttattgaggaaattttaatagcctttaaatttcctccccagttcattcaccttgtgatgaattgtgttaaaacccccaaattttctgcatggattctttgcatcaaaaagaggtttaagacaaggggatcccatgtgtcccttgctctttattttgggaatggaatatctgtctagaattatgaagaaagtcgggatgaaatctggcttcaagtatcatgaaaggtgtgataatttgaagctgaatcatctcagctttgctgatgattattttgttatggtgacttcagtagtgtgatgtatctactccagggactcaagctattttcacttacatctggtttgtttcctaatgcaaccacatctgccatatactgcaacaatgtgtctgagagggaattgaatagaattactaatgcttctggcttttccaaacaggagctgccatttacatacttatgggttcctattggtgctaagaggatatctagcaaagactgtgcaatactagctgagaagatgacagggagattcagaacctggagtactagacacctctcttttgctggaagagttgtgttgatcaattcaattctaatgtctatccatgcttactggagccaggtgatgttgttacctgacaaagtgattaaggaaatagaatcaatttgcagggcatttctgtggaaagggcaccacatgtttcagggttctggtgccattgcttgggatatagtttgtcaaaggaaggcagctggaggtattggcttcaaaagagtgaagga

SEQ ID NO: 47651 - DNA, 924 bp, Cannabis sativa
agataaattctagtcatgatgtatagggtatcttaattaatcaagaagcaattgccacccataataataataaatattggaattatatatggtggtgtttagttaaggtaatgaaaggaataaaataatttttattttatttttttgtttgatttcatattaaaatattattaaaatatcattttaatgaaatgatttttctacatgtactatttttatatttttatttctgtcgactaaatgttacctaagtagtaattaaatcaacctgataaagttaaaattgagaaccacaaaggaagtctcatttccaccggccatgatgatcctgtggaacagtttagtacgtatgtaacgtgttacataaattttgaagggtcgagacttaaaataaatttaggatatatagatatatatacagtcataataataagagaaagagaaatgcttgcttagtatttttttttgtcataataataatttagtttaatatatataataatttttaaaaagtattgttagccaatatataacagcatatctaaaaatagtaagagctactaatacttaataatactctaatagaaactagccaaaaattatatgctttttatgaatattaattaaattgaactaaaatttgggtacttactcaactttatcagtgcatttgcaagctaattaatccataatatatttatatatgagtgtactcttaatgagtattacccataaataggtaatattagaaaattttgaatttttatgattaatttttttatttaattagaaaaatttctcattttcacattttatggattgtgattgcactactacaatatgggcctttagcttccctttttttaacccattttataaaaagggaagctaaagggtgtgagaacacccaccagattcgaaatt

SEQ ID NO: 47652 - DNA, 1600 bp, Cannabis sativa
aaagtccaattggtaacttttacaaaatatagggtctaaaatattatttatatgatgttaattgtttaaataaaccttgtttgtgaataaaacacgtgaaaaatatatgaaaatgactggtatataagctccaattatcgacgaccataaaaagaaaaataatatatttttttttaaaaaaaagtaaagaaaaataataagaaaaggacaaaatcatttacgctttatttatagttctcacttggatcggttattaatggataaatacagttctttttttggccaggattgaagaacgaagttcaaacatgcttaatttttttttttgtttgtttttggtttaagcttttgtcgatttttatgcaattgcgtattcaacttgtactaatgttaccaattggtaccaagtatgtctgtgtgttttttttaattgattggtaccaaaaatgctaattgaatatttgaacatttttcttcagataaaatatttgaacaattttattattactatacatatataaagaccgaaaggataacgtaaagttgaagggaaggaaggcaaaagtggcaaaaacatcattttcaaggaacacgcctacaaaacaaaaacatatgaagagaagatccaaggtagcatcatcagcaccacatcattattatcatgatcgaaataagggcttgtcatcaacttgtcccttggctctatatgcataagctattctcaatacctactatatataataatactctactcacactttaaataaacccattcaatttgttttgtcttggtccccctcccccccatcctcttcacttatatacttttgggttttacttcaaattttattcactataattatacatttattattggagtcataataaatatacatatgtaattaatttcattcatatagctaaaatagtgtgtggtactcaactcataatacctataattaagattaatcatataagataatatataattaagtgtacaaattgaaaaagtatgcccatcatgattatgtactataatatactatgaaatgagtagtgcattttataattgtagagggctttaaaaaaaattattgaatattttgagttataaagtagaaaatatgtaaaaaaacaatatgaagaagcaatcataaaaatatttccatcagcttctttatacaacttcattttaaagaatgggtttgttctctaaatttgctctacttgtagcgtaggggaaaatgattcttgaaaactttttttttttgttggaaagggattcgaactttgatcttctctttgtaaagagaggtgtgaaactacttagactatacctatggttataaccactcttcaaaactttttcaattaatattttgttgtttacttttttcaaaattatttatttttttttataattttaaaaaaattaacattttcaaatataatatattttttttttatttttttcaagatacttcaaatcttttttctgtcctggatccaaatgttcggtcatttttgaatgatgcttgcaatccgtatttcctttttaatagtgaactttcttgtaagaactagtattttctatagtgac

SEQ ID NO: 47653 - DNA, 1388 bp, Cannabis sativa
  modified_base (1304)..(1342): a, c, t, g, unknown or other
gccagtgcattaaaaactggtcaagtcgaagccatttttgatgagcgggattagggacattacctgcaagcagaattggtggtggtgggttcagaccaaggataaaatgatctaaatcatatgcatgaatggcggcaagagcaagggatctccagatagtgtaatttgatcgatccaatctgatattttggggcaagagattgttgttgggaagaggaggttgtatttcgactggtggattctgttgggccattctttcgtctgttggaggagatcttcttgccgattgatcgccattgttagacatggctcttataccatgaaggaactttgtaaaccagagttcttgagctgagagagaagtgatgaaatggagaaagaaaagagagaatggatggaatgaatactgtgaagctcaatcaattgattggcctttgatctctttatttatataggtggaattgtacaaaggagttagttacaagacagctaaaccagctagacaaaataacaaaatataaactaacttgctaattgtaagaacagttacttatatacagtaataactgattaattaccacctatatctccaataatggattaatatagtcaataggtatagattttataaataggtatggattcatatattcaataagttatacgatataggttttataatatttatagatttgttattttaattaataatttgaaatagttaaaatagaattataattaaggttatagaaaattaggtagatatctatggaatttttttttgaaatattttagtagctatttatcaattttttttaattaaaataatcattaataaatatattttttaattaattattaatatttataaacttaatattaatatattttttaattaattattaatcattaatatttataaacttaataaaaaattaaaaaactgagagaattaaggagaaaagagaaaagacatgtcaccaccttatatctctcctttatatatttatataaattgggttttgattgtaattattattataaatgagatacatgataactaattttgaaattatatgcaattattgtggtgttggagtccttcttgttcaccatgtcgtttaatcagattatgatatccacgcttttaatgaaagcaccaacctgttgacctcaaaaagtgatcaactgacagcggtgtcgtacagatttgatgcttaccacgtgtttgcataaataagaatgaaaaacaatagacaataagatttttttatagaggttcagctgttggaaattattttacnnnnnnnnnnnnnnnnnnnnnnnnnnnnnnnnnnnnnnncctaaatatgaactttctaaaacgctgaaataaacacatataaagt

SEQ ID NO: 47654 - DNA, 1726 bp, Cannabis sativa
aactttttggggagatcaaagaatgcatttggaaactaatacgtagttggaatgataaacttttctcaattggagaaaaaaaagttcttttgaaggcagttgtgcaatctatccctacttatgttatgagtttctttaaattgccttctaccttctgtaaacaacttgaacagatgatgactcaatattggtggggttctactacggataagaagaaaactcattagaaaaagtggcggtttctatataagactaaattgcaagggggaatgggatttcgttcgtttgtccattttaatcaagccttactccctaagcaagcttggcgtcttattgaatatcccaatgctctgcttagtcgagttctcaaaggacgatacttctccaataataactttatggctgctaaaaatggtggtttgtcttctctcacttgacaagggatttgttgggattgtgaacttttgctcaaagggttgagattgaaggttggtgatggttcaactatccacactggtattgatccttggataccacgtaacttagtgttcactcctctacggtttcttagcagccatgacacttgtgtttcgtactacattactgctgctagaacttggaatcttacattgctgcaacaagatttttctccagctgatcttgaatacattctcactatccctcttttgttttctaaccagcatgaccgatgggtgtggcattacacaatcacaagggaatactcagtgtagtcaggttaccatttggctagttccttaggtgatcataatcactcttcttgctcttcaaaccaagaatcttggtggaaatttttgtggaatttaaaacttccgtccaaagtgaaaatcttcgctcggaggctgatccagaatgctctcccagttgcctctgccttgtttcataggaaaataatagactatgctgcctgtagtattttttcaaatgcctgggagtcagtggggcatgcaatcttctgttgtaaatatgccaaatcagtgtggaaggagactggttttgctattaatttccattctgccaacatgttacatgatggtaattatattgctcacttatcctccattacatccaagtttgagtttgaacatatgctttgtactatgtggtttatatggactgatcgcaacaatattcttcatgaaaaagctacacaaaaatcgactaaattatgggccaaatctgtggcatactgctacaattttcagcagcacattgttatccattctcctgatgtttataatactactggtgcagccaattccacacattggtagccccccttttagccaatataaaatgaatattgataaataatttttaatatcaatcaccaaatcatgaaaaaaggataaagttggtgaaggacaattaagagagttcgtcaaaattaaggaatcagtttcaataaggtcaaaagatagatgatgatgtcgagcccaactaagaccatgaaataaacatttcgcttccatctcatgaggcctgaattttcccgaaaggggcatagaaagaacagcaattatttggccattatttatcctatctccctactatttgtgtgtctcatattcgtacagatgctaaccaagctgctcatggtttagctaaacaaactttagtgttagataataattatatgttgtttgaagaaattccttctaccatcttttcttgattttttcttttt

SEQ ID NO: 47655 - DNA, 954 bp, Cannabis sativa
  modified_base (926)..(928): a, c, t, g, unknown or other
ttttttaatttaattttcttttttcttttctatttgttagttaacttcactttcttatcaaaatcatttaatttaaggaaaggtgcctttggtgaagaatatttttaaatgttcgtttacttaaattgagaaaagggctatatgtgcttactttattattgtatatatatcaacacaactcattggaagttcttatttcatattttttccactggaaatgccttcaaaattagtatatgcttttagttactttcttcacctgttgaattttttatgctcaattagttgattaagtatcatatataaactccccaccgttttttcctttgagctggaatgtatcacgaagcttgaaagcatacatgtttgtagtatataatatgtatatatttaaagctatatccacttcatttttctgaaatgttaaggcatttatatatatgtaatatatataatgtcaagtgctttacaaaataatttctaccttatttttctcccattgtgtgttaatttacagtggttgtgcaatgctgacaaatcctcacacgaaccaacactaagattaaagtatgtttgtctttctctttgactcattcttatcataaataatattttgtaaattatttctctttggttttactgtttaaggtactagctagtagctaccaagtctttttgtaatctttggctaaatgttttttttcagggcattctttggatctctatacagatgtttagcaaggggagcaaaagcagtatttcaagtgtatcctgaaaatatgaaccagctagtgttaattttgagttatgcaagcaatgctgggttaactggtggcctggttattgattttccccataggtaacataagcttaaatttataagaaacatgaatatttaataacataagtggcgtttggtaacactnnnttaatcagttttttgtttttaaaagt

SEQ ID NO: 47656 - DNA, 1587 bp, Cannabis sativa
  modified_base (322)..(327): a, c, t, g, unknown or other
ttttttttttttgaaaaaatattgaaatttctttttatagatttcaatccaaaaaaataacattggaaaattttataatacaccctttttaaatggatacattgatgtactcctatctattttagcatttgaaataattttttaattaaattttttatgatgatctgtacgttataactatttaagacatcctgtaaaattttaagaaatttagaaaaatttaacatgctgaaaataggattcaaacttcaaagtgactattttattttatatgtatgtcaaataaattatttgaacactactttttatattgtaaattatnnnnnnttttttaaaattttgtagaatatcttaaataattataacgtaaatgaatataattttttttttagatgacaaagtaagggttgtagaatgagtcaataacatttatccaattataagctcatcttttgattgggctcaaaaatgcctcatcgttgaaaatggacttatctgaatgtaaacaatacaaggtttgatccttttaagcccgtaatgtaattcttttgggctttagggtttcttatctactacactcacataaacccttctctctctctacgatctcctcctcactgactccgcttctcctgtctgcctcatcttcctcctctcgccatcacaggtttcctcgccatcacaggtttcctctctttctctctctctctctctctctctctctggttcgatttcatgttcaccctctctctttttcatggaaccctgagaagaattacattaactaatgttcaacaaacaaaatcgatgtttaacatgacaacatatgtctaggttaaggaatatcccatttctctatttcaattcaagatccataaaaacgaaaataacatagtcatacaaatttatagcaaagaagttttctttctcttcttgtcaagtacgattatttattgggctaaaaaatgctctcgatttcttgttctcgatactattgtttgggtttttacagtctgatttttttttttggataatattttgatttctttttggatatctgtataaggtaaagctgtttgtagtttctcccatacttttgaatttgaattggttaagcttatttatttagctatgtggaagtttgagcaaattcttaggctgttgtcctttttatttttgtttcataatttttggaagttggagggctacgttatgtgtattgatgggaatttagtatataatttgatatgagatttgggattttattgcttggttgacgtgacccttcttgggttgattatacataccaattattggttgtccagtagataatataatgtagttgaaaagttaatggttttgaagctgaagaagggtcttgggatttggattaaaaatttgatttttgagattttttgaatgaattcttggtcataagggggtggatcttggatttgaaaatgtgggctagtgattaccatcagatgctgtattttagattcaggaagtttagagttcagtttttaggttttaaaattgtgtttttaaaagtgagaataggatatagttttttgtcattttaaaaat

SEQ ID NO: 47657 - DNA, 1352 bp, Cannabis sativa
gtatcagcagggctgttatgaaggggagtttggagaatcttattgacttggtaaagagggaagtagtgctttagacgagagacattccaagtgtgatcaggggttataaagaaagaaacaaaagaaagagagggatcaataggatggagaatggtaggagaggaaatgccaggaatccaatttgaagtagataaaggaatggtgtgaccagaacctatcctccaaactagaccctgcttaaggagttgacggccccagagaagacttttccaggtaaaagaagaattataacccttgggagcaagcagaaagtcagagtgtttaaattagcgagccttcaaaatagaaaataagagagggtcagggttataccaaaggcgccacgcctgcttggcaagaagggcttgattatgcaaatggagagtccgaaaacccaaaccaccaaaaaatttagagaccgtaagactagaccaagacttccaatggattttccactcattagaattagagccccaccagaatttagcagttaattgctgaatctgagtacaagtggatttaggaagcttaaaacaagacattgcataagaagggatagcttgaataatggctttgataagtgtttctctacccgcccgagagaaaagtttaccatcccaaagattcaaacgagaggaaacactttggacaaggtgatggaaaacagagttagtgaccctgcccacacagtgaggaacacccaggtatgtactaacaaacctttcacccgccaaatgtaaagccatccaaaactcattctgagaagtgtggggagtattaggagagaaaagaatggaagatttatcacgatttaccaattggcatatggcttggtgatagagattgagggcattattaatggcctcactagaactagaggtggccagagtgaaaaggatactgtcgtcagcgaataagaggtgggacaaggaaggggctcccctacaaatcctaatgccattaaaggtacccatattttcgtgcaaacggattacggcagaaaaaccttcagcgacaaggagaaaaagataaggagacaagggatccccttgtctaatgccacgagaggaatggaaaacttcagacagagagccattgagagaaagacgataagtaaccgtggaaaggcatttcatgataagtccaataaaatgtgaggggaaccccacattactaaggagatgattaagaaatttccatttaacacgatcaaaagccttctccatatcaagcttaatagctgcccaggctatttttccagttcttctagtgtgaatggcatggattagctcattggcaatgaggatgttatc

SEQ ID NO: 47658 - DNA, 1089 bp, Cannabis sativa
tagggataatcaggctcgaactgatgacttccaccacgtcaaggtgacactctaccgctgagttatatcccttcccttaccccccatcgagaaataaaactgactaatcctaaggcaaaaggtcgagaaactcatagtctccaacaagtattccaataattacatatccaatttgacatatggacgaatacacaagcatacatttcatgcttgtttgagtaatagcaatgagatacgccccgaccccagtattaattgaagtgggtcaagttcgacccacctccaattaactaagttattttgcacacaaattataaattaatagaaatataaattgtgtcgtgataattttttataaaaatttataaaataatatcattttgtaaagtgtcattataaatgatcaattttcacaaatgtttgaacacaataacattatttcatctttgtgttattgctttattaattctttgtattcattatttcagataatgatgggttgattggaagtagaaacaagttggtgaatgaaagaagttcaactcccaaaatgcataagaaagtaactactgcagttgctagaattaggacaattccaattgaagaggtaaaaaaaccaaattgggctctaaagacttgttccgataataaagggtttaaaaatcagaatccgaaccaaaaccagaaccagaagcaaaaacagaagaaggttcaagaacaagaacctgtgttgagaacaagccaaaaaaaaaggattttaaagagagttgccaaaccaaatcaagcttagtttgatgtaatacttgttcaattaattaattaattactcttttattgtacttgttatgatcagtttgtatgttggtttggcttgttgctgatatataaatatatatttttaaaaaattggtgcatgtggtgctaatctttgaccaatcataatcaataagtaaaattttaacagtatgtttttttgggtaaggatattttcaagaatattttggttacatttaaatatgattttgggtaaatactattttggaccatgtattttgcaaaagttacaaattggaccctgtgttttgttaa

SEQ ID NO: 47659 - DNA, 2950 bp, Cannabis sativa
tatcttctcaaggttaaagaaactgtagatcttcttgcatcggttggtgatgttctctctccaagagatcatgttcgtgcgatcttcaagggcttacctagtgaatatgacacttttgtcatatccactaatacaagactcgaacaatactctgtagctgaaatcgaagcacttttacttgcctcagaatctcgaattgagaagactgatcgtgagattgatctaagtgctaatattgctacaatggagcctgatccatgtcctgaagccaaccttgcaaattatggtcgaggaggatacaagcaacctttcaatcgattcaacaacacaggccctggcaactcctttccaaatagaggtaattttcaacccaacttcaacaacttcagtccttacaattacccctattttgctcctgttcgtggcaattttaatcctagcagaggtgctagagtgtctaatcctaacaataagcttcagtgccagttgtgtctcaaacttggacacactgtccaaagctgtttctataggtttgacaaaaattttccaggtccttcacacaatagcccgaatgctactcctaattctgcaacaccacaagctaatctactcacttcttcaaatgactgggacatggtttggtatccagactcaggagccaccactcactgcacaccagatcccacaaatcttgcacaaagttcagactacaatggacaagagcaactgtttgtaggtgatggatcaggtttgtccattaaacacataggtcaatcctttttatcatcaaaattgtctcctgaacctcttgtgctcaataacttgttgcatgtccctgctataactaaaaacttgttaagtgtatccaaatttgctagagataacaaagtgttctttgagtttcatcctgatacttgttgtgtaaaggatcagggtaccaagcaaattctgttgcaagggacacacaggaatggcctttatacttttgaggatctcaacattatccctacactgcctattcgacctggaaacaccacaactcaggacaccttctctcaatctgttcatactacttctgtagaacctttagagtcttgtacttcctgtaatcacagtagtaaactttctgcatttgacatttggcacaataggttgggacatccctccaagtccattgtgcattctgtactcaaatcatgtaatctttcaattgataataaagattctcgagttgtctgtcctgcttgttgtctaggcaagatccacaaattgccatttcctaaatttagcacaacagtatatgatgctctccttcaacttgtcgtttctgacttgtggggaccctcctacactgtttctaacagtggctacaggtattatatccacttcatggatgtttattccagatttgtgtggatttatatgctcaaggataagtctgagacacttaaagtgtttcaaatgtttaaggctgaggcagaattacagttaggcacacaaattaaaatggttcagacagactggggtggggagtttagaacttttcctaagtttttacaacaatatgggatcctccacagacacccttgcccaaccacacatgaacaaaatgggttagctgagagaaagcataggcacatagttgaaaatggtttaacattgcttgcccaagcttctatgcctttaaaattttgagatgaggcatttaggacagctgtgtttattcacaatcgactccctacacctgtccttcacaagaaaactcctttagagacactgtttcacaaagagccagactacacattgttcaaaacctttggatgtcagtgttttcccaacatcagaccctataacaaacacaaaatgcagtttaggtctgaaccatgtacattcctaggttatagtctaaatcataaaggctataaatgtcttgcatctagtggtaggatgtatatctcaagagatgtcatctttgatgaacatcaatttcccttttccaaaaccagtcacccaacagaacctattaatcctcatgattggcatatttctgttaaaattccaacacctatcagctgttctacttgtcctgatgcttcacacaatgtcagtgagtctgtctctcactctatcccatcttccagtgcctcactcaactcaccaactccaattcctatcagtccatctgcctcctcttgtcagccttctacaccccttataccacctggttttgaacatataattccctctgcaatacctcgatcctcagttgtgtcatcctttcctataacaagtgtctctgaccctgctatctcatcctcctccacaacaccacaccatgagtctactcctgttccttctgtacctacagtttccaataaacacttaatgaccaccagatctaagtctggtatacacaaaccaaaagtctttagtgtttcctccataccttcaacagttgctcaagcacttcaaatgcctcagtggaagggtgctatggatgatgaaatattggctcttgtcagaaacaaaacctattctattgttcctctacctcctgggagacaagcaatagggtgcaagtgggtttacaaggaaaaagagaacactgatggaatacttaacaagtacaaggctcgattggttgccaaggggtttcaccaacagcctggctttgattttactgagacattcagtccagtggtgaagcctgtcactattagagttgtgttaactcttgcattgtctcaaaattggcaaattcgacagttggatatcaacaacgctttcctaaatggtgtccttcaagaggaagtttacatgaaccagccacctggttatgaagacactacagtgcctaacctggtttgtaaactacacaaagccctatatgggctcaagcaagctccccgagcttggtttgaacgactacaactgtcattgcacaagtttg

SEQ ID NO: 47660 - DNA, 1308 bp, Cannabis sativa
aaaataatttccaacaagagcatcgtcaatggaggtgtaaataagtggtgaaaaaataaaatatagctcatttaacaaaaagtatgttctaatggtgtgcaaaaagatgatgtaaatttggcacatagtaaattttgtgtcaaatttggcacaatatttactatgatgtaaaatttacaccacaataaatacactattttttcatttacatttatgtcatttctattattttattagtactatcacattaaattatgaaatatttatatatttttttattattttacatattaaaataataataaaattaattataaagttattaaatttttttttttaataaaatattaattagatattaagttttacatcaaaattttgcaattgtacattggagtataaaattaaaatttaatgtaatttactgtaaaactacttttttttgtgtgtgttaaatataacacaatttttatatctattggtctaacactataacatccaacagaatgccaaacaacaacattaattccttttagtaattctccttgttataatttttataaaatttggataaccaatcgaggtgtcacttctaggcacgtgcgaatgcaaaatagcattgctctagaataaaagaaaagaaaagaagatagcacttcatttttatgaatggacaacagtcgcaatatatataagaaagttctacaacttcgttttggtcgaagttagaactatctctgaagttttaaactacaccgtaatagatcttcttcctctttcatacatgtatagctgaagatgaggggtacaaactatggttggttaatcatcatcttcttcttctcattatcacctcagaactccatagctcaaaacgccactactgacccttctgaaggtgagtttcattcatctttcccaaaatcagcatatttcaaatctgggtttgtatttaattctcttaatttctgtgcaagttataaacccattaccaatgtttttaagaaattaggtgagagagtttatcttcgagaacccactttgcacaaatttgttttggtttacttcatttgaagttggattctgggtctgggtccttaaaaattaaatctattcttggacaagtaaacaactttttgttttaattgattatttgttttgaatgtgtgtggtaagaattagaactagctttgtcggatagaaagagatgtattagattatacgcattgttgaagagaaagtgaaaggtgaaaacataaaattaatatttaatgtctcaaccatgatttatttattataatagttcgt

SEQ ID NO: 47661 - DNA, 1351 bp, Cannabis sativa
tgccgtgtggcagtaaaattgaaaactattaccccaaatccagtatttttgtaaaatgcccaatatatatgtataactgcatatataattttattaaagatcaataataccataaattttcaagaattaatttagggatgctcttgatatcacatgttaggaacactgtaaattctgaatttagccctaattaattcatgagaatcaaataatagaattatagattagtggaagcgtatcggagtccatagaattgattttaataaatggtatgatctatcttccaattttttcgcatcaaaattttctctctgaaataagaatttcttgatgatgggaattcaaaaataaacataagatatgtgaagctatacaaaaaaaatggggatcaatacctgtttattaataactgaaaaaatagtaaattaatcatttttgactatttttaatttgttccctcatcaaattagaaattgtctttatgatatccacatattaaaatcatgacaatcatgtccttaagtcataaattttattctaaaataaaccacataaatttgacttatttatttgataacccaacacacattttatatatacaattgtgatcccaataaatttctaacatatatatgtgtggttgaactttgagtttgaaaatcatttagaatgttgtttaattaggttttatcaaaactaaattaaattgttataatgattttagaaaatagctactattaacagctatactaactatgatttttttccaatgacctattacttgatacccacactattatcaatgattattctagcggatggttatataactaaacctataaggacggacatagtaatttaaaaaccgtctgtgatccgcacagttccaattcgggcatacaaagaagagctacaaaaacaaactagtaaaagggacaagtacaaattagaaaagagcatattattatcttggcttatatcacactacatagataacaagactttcttaacctatataggccaacaaaaatataaaaaactcatagtttaagataaatttatcaaaccacttgagactagctcaagtggtcataggaaagtgcatgtgtgttggagatcctgagtgcagattatagattatacatgattgtaataatatataaacgcttaaataaaaaaaataataaaaaataaataaatttatcaagtttaaaaataaagtattggctgaattagcctataggcaatgatacatatattatcatgttagacttttatttgggcttacattaaattttattggttttattaaaacttgggttgattggatagttctttgctgtgttagccc

SEQ ID NO: 47662 - DNA, 711 bp, Cannabis sativa
agagtaatcaaatttttaacttcctaatttaatccggaccaggacaaggccatgacaattacttttggcaacaatcgaaaaaaaaatgagaaatttattaaggttgttgtctcaccataaatgatcaaacaaatctatttcgactagtatttacctgattgcatcgctttcatttcagctgaaaaaaagaaaagaaaaaaaaaacaagatcaaagccgggcgaactgctccagggaacaagttacaatcatttgaagttgagaaagtacggactgcgtcaggtggtagagtgaatcaaatcaactcactgagtgatagctacagttcaaccgtacttcaacgaaacaagagtattatgtttctctgaacaaaaccgggtccggctgccggaccagctccgttcccgattctggttcactcttcccgaaaactcaaatagaaaaagagagaggatttgacttcaaaactacgtcgttgcgacaagaccaaaacccactaagaccgaccgatagtatagcacggtcaccagtcagcaccttccatatacccaattaaaatgtgtcactatatcatttaagtgagaaattgcttaatttcgtgggggtgggtccacatgattcaacccaatctaataattaccgaatttgtgctgtctaaagtagttataaaatgctctttttttattaaataataataagtaattataaaaat

SEQ ID NO: 47663 - DNA, 2541 bp, Cannabis sativa
  modified_base (1772)..(1774): a, c, t, g, unknown or other
ccaaacccaaccacccgaaaacccaaaaacttgtcccgtgtgctcccctactccagataactatactgctccagttgttgcgagcgctggtgaacaggccctaggatccattcaccaagttaagtttctggttcttatcctgagatggcatttttagagccttcctgccctctacctatctatgttggcataaaaggctcgcagatctgttcgctgcatgctaccaacaactggcagcactacaagactttcgaacaatgtgactgggagttaattaataagggtagcttcaaaagtctcgtgaagagacaaaactttcgaacaatgcgactgggagtttattaataagggtagcttcaaaagtctcgtgaagaggagttatgacctcatgttgtcagttagtttttatttctcttcttatcttttccctttttttatactttcccttttacatttcctcttttggttttatttctcacatgcatctctcttatcttttgcggctcaacagagaggtcttcaaagcgtagagatgcttgacaccgaacttttcaagtctagggaacatcgtgaggtttttgccaagcaatggtctgattcacaatcggagatctctggaatcatgaaagaggctaaagagcaacaaaagactctccagactaaccttgagactgcccaaaagtggatccaggagcttgaagaggcaaacaagactacccaggctgaggttgatagaaatctcgaggaagccaaggtcgatgctgatagaaagcttgaagaggccaaagccgatgccaaaaccaaggtcaacacaatcgctaggcgatccatttatcgagcttggtttgccaactcagggatggatctgagctttctgggagacaaggctggagagatgttagcatactacgagcaaaccaagaaggaagaaacaggcaatgctgaggatgaagtcaaagaaaaagaaccaactaagtctcctaactatgtagactttattatatatttttagaaatatggcccttatgccgagacaatagtttgccccttgtggcatttttttttatacattttgacttttgctttgttggatagccaacattgctgatctatatatttatttttatgcattttatcctacttttttcaagttatttatgtttatctcattgcgtttaaatttacaatcaaacattcttcttactcgatttagcttagaatattcttgggttacaagcgttccatcgttgccatcataatttagactagtagttaataatctatcacgtttttcgcgagcagtttataatttgctatattatttacgagcaattttgtaatctactacacttaacacaaactttaaatattttgaatagttcttttaaaaaactaacttgaatattttttgattttttttatatgaagagttaatcctctattcatatttttagcttaagtattatttctcaaggcacatttgtgtttcgtttacaatacatgctacaatcatgcgagccgttatttactcatatcacatataggtttctgttattttatgagaaaaaatctcacttacaactgctattttagtcttttcttttaaagaaaaagtttttcaattcttgactttatactgtccaaagacaattttaatcaattatcttttcctttgtgaaaaaaatttaatttttagatttttggcattacagtctatatttctaggtagaatctagttattgtacgcatatatgcccccaagtaatttaaannnaaataaactttgtaattacttgaacagattaattttattcataacaatgatcagccattatagagataaatacaatatttacataataaaactactggtaataaggtcgtaaatgttcactgttccagtgattatttattggcgagctattaagccaagctaatttttaaaccctgatttctacgacagcctcaataacatatggaactttccagtttgggttgaacactcttgctgctggatctcgcgtatttacaaatacacgtcttaatactaaatctcctactttaaacaatctttttcgaactcttttgttaaattatccgttattcggtattggtaagctacattggttattagcgactcattgtatctttcttcaagtagatccaatgacatattcaaaagttcttggttttgctcttgattgtagaaatcacgcctgtgggttgcaatgttaacctccatgggtaacattgcttctgagctgaatgccaatgagagtgtgtcctgtcgttgttttctctatagttctgtgggcccagagcacttggggtagctcatcaacccatcttccagcatctaacttcttcttaataatatcttttaaggttttattaacagcttctacttgccaattcgcctgaggccttgatactgacgagaagctcttaataattttattcctttcacataacttagtgaatagctcgctatcgaactgagttccatgatcagatactattttgattggaatgccaaacctg

SEQ ID NO: 47664 - DNA, 959 bp, Cannabis sativa
ttattcacacacaaaaattgtcgattttgattttgatcttgatcttgatattcaaaattatcatctgtaaaaatgtaaagtatttcccaaaactaataaaatataaaaaacaaattcagaaataatattaaaataaagatactcaaaataattcatagtgtctttcaaaaaaaaaaataaataaataattcatagtgtactcaaataaaatacaaccttcattaaataacatgttgccttctcattagttttgggacacctgcatggatagggtcttttgggaggtcctatagtaaaaaaaaaaaattctaactcgtacaatattttatcttctcatgtgaaacatcatgtaaatgacaaaatcaattaaatatatgaactagtagccctgctgtaatattatatatatagccaagtattttattatttcagtgtacgtacgtgatgatgtgcaacattattaacattaatttatatattaggatttgagaatattattttgtttgcactatatattctatataggttctttttttaataatatttttttaaaaggttttttaatattattttagagtggccagtacttgacaaattaaagtatgtatattatttttctttgacataaaaaaaaatatattagataaaattttgaatgggtataataatacaaataatatggtgtgaacatacaaatatgggaaaatcaacatttacattatatgtatgtggcacaatttttcattcacattttttagaaattaattactaaaaactaattataaatatataattaaaatttgattttatttataaaaataaatatttacaaattcttataattcataattttgtaaaatatgagtatcttatatattgtattatggctccatgtataacatttttatattggctaatcataaaattaagtgtaaatactattttggatcctatatttt

SEQ ID NO: 47665 - DNA, 738 bp, Cannabis sativa
tatatatatatattatgtgtgtgtttggtttcatatctttttaaattgtacatagaatatataggacttactgaatgaactgatcgtctaccttcatatatatatataatcatgtcatttttttattgattctctaaatggtccttgtctttgagatttaatgaccgaaaatttcagaaatataatttaactacgattaaattgaattaagaacgattaaattgaatagtaaattctatattgtgattataatattgaggttagctaataataattgtcgaaatttttgtgaaacaaaaaagacgtgtcatcctttgaagaagaggttatgaaggatgtagctagtcacacacactagcaaatgtatatatttgacattgtaataatttgtattttgtatgatgatatgatgagagaacaatttcaacattaattaattttcttgtatgtgttgttactgttcttcttcttcatcgcctgaatttcatgaaaaatttcaactttatcagtaataaagtacaaatcattattataacactacttgtttcgaatggggaaaaactaatagtagtttataacaaatgaacacttttagctaggatgattaaatcaaaatgcatgcatgggtgtagaattaattgatgaatgctgtaattaacaacatatatatatatataactgtgtacagtctgttgaatatatatatagaggcatgcaccaccaacaaaactatgttgg

SEQ ID NO: 47666 - DNA, 2203 bp, Cannabis sativa
  modified_base (602)..(602): a, c, t, g, unknown or other
caatataatacaatacaataaaatctaatacaacatttcaaacgagcccctagaagaataggcctatgtcacggactaaagagcttactaaaccgacgaatgtaaatatatatttttttgtctattttttatgcttttttttttgagaaatatttataatgctatctttgcatgcaatgatattgcttacttaatccaattcaatttacattattttactcatgatatatttatattttggatctactctaatctgtagagtaattcaaattcaatccaatttaattcgcaaaagtacggattaaatcaattttggatgagttattttttaatattaaattatctaatctttattaaaaaatatttttttgcataactaccactaaaataaaataaattattattgttttatgtctctaacaataaattaaataataaaacaaaaaataacaaattcaaagcaaaaagaaaaaaaattgtacgcgtaaagatgtttaatttatatattttcttataaataagaataaaatatacattagagttttaaaatgtatctatatcatatgtattagatttttaaattactattttttacattaaantattaattgtatatataattcttttaaaatatatattgttaactgaagtcggcaactattaattagagttgtgcgaagaaattaatgagtattaaagaagagaattttttatgtggttggagcattaatgaaccttaatccacgagtcactattgttgatgagagtttttctcacaaagaattttcagagtcctttcttttaaatcactcgggtatttataggcttataatggtggtaaaaaggtcaccattatcgtgtttgtgtgagtcatgctttgcaaaatttcccaggttagatcatagggcatgattgcctactttttatgatgtgctttaggcttgctataagtgtttggtgagacttgacttatctctttcttatgatttgatagcttattgtgtagccgtcaattaatgtatggggcatcatgaaatcaaaaaattatgggtttaaacccttgagcacgtattttcaaagtaatgtgatggatgatctttcctatgctgcattaaatgcatatacaacaactttagcctcgtgcagtgtgttatgctccgcctatccttctagaccttctctgggtcgaactctcttacgaaaaagaaggggcaagaacctatcatcctccaggcagaccttcccggagatggccaatccttttataattcttgcgaaataacatcctccagaagtgattagaggtggaacatcccgtagtctgggtcccattgtcacatggccagctcctggactatcatgtattttgaaagaaaatttaggcaacatttaaccccaagtccttttttgtaatttttgcaaaatagggcttgtgatttgcctccttgagtgctgacatcatgccacacacgacaatctttaatgatagtcattacttttctcatttttggtgaagatgattcgattttttttattttgatgtcttttttaattgcaaggtgtcaaattggtgcttgagtactgtaactgtctttttgtatttatctatttaacacttgtgccaccagccaatggattatgggggttttccaatattcaaattgggaccgtcggatgattgacgattcgtgtcgccttagttggtctataaaagccctacattttccttcttcaaaattttttatcctcacatcttctcagaactttaggctagccaaaattccaaacagcctagagtttcttctacactttctccgacgtttccaagcccaactttaccagtgtcgtacaccagaacctggaactggctgaactttttttatttgtaagtcattggtcacatgaacctcttttttgttactgttgcctcatttgttaatatgtttgcatgaatgcaatgttttcattgtatctgcgatttgggctttttcccagactgcctttatttttcatctcaggtcagggatctcatgtttaaggtttataggactccctactttctttattttcgttcttgtaccattattcttaatcatggtgcaattagcacctgatgcttagcataggaaatttctagtttctaaacatgctagcatccaaagagggccttttctcagcggttagggacctccatttccttgtt

SEQ ID NO: 47667 - DNA, 1017 bp, Cannabis sativa
atcacttccctgaagtgagtgagatcaacactgtctggggcggacaatgagctgtctttggagctggtcttaggaggaatcttggaagaagatacacgggtaactatttccttctttatcttattctcttttgtgtagctcggaccttaacactttttccgtgcaggtcaatgtgaagaggcttatgcttactcccgagccaaatcaactactgccaagacccttgccaccaccaccacactgcagagggaggtggatgtggccaaaacggaagctcaagacgtgaggaataagctcggggaggtgaacaaaaagctttttgctgctaacactagggttgacgagctgaccaaggaaatgcaagagatgccttcaatcgagcagctggaggcagataacgacgctttgtacaaggatgtcaatgagcttaaagacgagagggagagtcttcgtactcttctcataaagctagagggggacgttcgggttaagaagaccagagaagaagagctcgttaaggaggtggaaagcctggagacagtcgcccttgaggttttctacaaatctcgaaaggccaatcccgaaggaaagtttgattacctcgatgaatccaatgagatgtatcttgatttttgtgcgggtcagacggccaaagaaaacctcgaggcgaccacttctacagtttcaaccgaccagagcaacgacacccctactgctctgattgttgaacctctagcccttacagaccaggccgatccatacagagagcccgggaaccctgttgtttaaacacttttccttatcttcttttttttttgtatctgtttggcccttacgccctttttagacacaaatatgactagccaaacggtttttaaacttgggttatgttttttcatcttaagacaactagctgaccgggcagcttttaatcccggttttactgtgctttgttatcttttttaatgaatgttgacccttgttttgataatcatatgtgcaactgtgttttttttt

SEQ ID NO: 47668 - DNA, 857 bp, Cannabis sativa
tattttcagtcattattttcgaaatccaatggaggtatcgacattaaagctgctcttagaggtaaagtcccttgccgtataacttctgatgataataatgccttgctgaaaccatttaccagcgaagaaataaaggccactatattccaaattcatcctctaaaagctccgagaaaggatgggttacctggtctttttttccaaaaaaattggaacttaattgaggaagaattcactgctgcctgccttgatatattgaaccacaattcagattgcagaaaaataaatgagacccttatttgcctcattccaaaggtgaaacaacctacaaagatgtcggaattccgtcctattagcctttgtaatgtggtttataaggtggtgtctaaatgtctcgcaaaccgaatgagaataagtatgaattcagcaatctttgaaaaccaaagtgcctttattggtggtaggatcatacaagataatgccattattgggttcgagggccttcatagtatgaggaaaggtcggtgtggtaatggaagtaaaatggctttaaaacttgacatgtctaaggcgtatgatcgagtagaatgggactttttagaagcgatgatggaatgccttggttatgaggatgagtggataaaaaaaattatgaactgtgttcgatcggtctccttctccgttttattgaatggatcggccaaagggttctttcatccgggtaggggattacgacaaggagatcccctctctccttttctttttctcctatgttcggaaggtcttacttgtcttatcaatgaagcggaaagggctggtcaaataacaggtttacgttttggcaacttagctcaacg

SEQ ID NO: 47669 - DNA, 616 bp, Cannabis sativa
gtaggttttgaggggctgcattgtatgcggaaggatagatttgggaatgggtcgaaggtagcgttgaagcttgatatggcaaaggcatatgacagagtagagtggcacttcattgcggaagttatgaggaagctgggatatgcggaaggttggattcggaagattatgatgtgtttaacatcggtcaccttttcatttattgttaatggggaggtatgtggaagggttgttccgcagcggggattaaggcaaggggatccattgtctcctttcatgtttctgttttgtgctgaggctttctcgagtctcattcgccgggaagaggtggcgggtcggataagtgggttgtcttttggtcggaaagggttacgagtttcccacttattttttgctgatgacagcttggtcttttttgatgcttcgatggcggaatgtggtcattttaaggatgtgttggataagtatactgcggcatctgggcaggcagttaattttaataagtctgagatgtgttttgggaaagttgtggataggagtctccgaagtaggattgcagctttgttggatgtacgggtggtgaataattatggtaagtatttgggacttccgtcgtttg

SEQ ID NO: 47670 - DNA, 850 bp, Cannabis sativa
gtgaccccaattatttttaacaataataaaatactatatataaaaataaaattagatttttaataaaaaaattgttaaaacacaaaattttaaagtagaaaaaaaatcataggaagctcctcataataaccgactccatcgagttcctacggagtctgttatttcataacaatcgatgtcaaaaggacactctatagtgttgcttggaacagcgtcggtagtgaattttgccaaaattgacgctgaaaggcttaaaaattacctctaaagcccagttttgcagtaatataattttccaactaaattcccagattaataattagacaggttgcataacaattatttcatagtcaaatcaaacattatatatatcagcataatccaaaaatatgtacaaaaatataaacaaaaaaacatagtagtatttgtctcaaataaatcagcattataatactttgtctcaaaaaaatatagtaaaatttgtataatataaattttgagtgatctgtttaacaccacgaaaataactgtcaataatttggtttgaatcttgagtcaaattcgttttgttacaatctcccatacaatccaaactgaactcttcaacactaaaccgaatgcaaggactagtaatattcacccaaaattcatttgccttagactgttgcacctctcttaatagaagacgatgaactacttgagggtagaatttatacggagaaacgtctaaaatttaccaaattggatagcatgaaacaaagtcttgacatttcctaaaagagtgacattgagcttctcaatgacattgtaagtgaaagtgcagactattttcgatttatagtgatcaaat

SEQ ID NO: 47671 - DNA, 686 bp, Cannabis sativa
ataagaatttaagcatttcactcttctttgagaaacaacataaatatggcctgcactaagcctataaattacaataataaacaatggtagcaaagtacctgccatgtcaagacccaagacattaatcataaaaggttttgttgcaagctttgacatgcactctgcaacatttcttgctacaccacccaatacatagtttatctgagagtaaaaagatcccaaaggaaagaattataaaattctcatatattgtaacaagaacctattatccgaaagaataaacaagtatttttccgctctaaactttgtccttaataagtttctgcccccccaaattattagcgatgttaaatatttcccctcagctttgaacattactgaaatatgagacttttattagatttcgttaaatttctattaaataattaacaattttacctccggaagtatgatcactatcatattttgcccccggaacttttatttgctttaacaaaaggggtacgatttgacactcgaaaaatttgaggggcaaaatatgatagttcatagagaatatgggcaaaaacccaatttattctatctgaaaaatgcctctaatagaaattgcaaatccattccattaaaacaaagtttaagctacaatgaaatggcagccattaatccaaatgggcattacaacaaca

SEQ ID NO: 47672 - DNA, 939 bp, Cannabis sativa
ttttttttatttttgtatatatagatacaaaagatctattatatattttaacctaactggacaataaataatgtatataatataatattaaattaataagaggtgtccgtagagagttttgaaacttgtatacgtataaagcatatggtttttgatataaattggcattggtatctctagctttacaaaataatacaacgtagaagattttggtgtgtggtaggtagtgtcaatagtgtgagtataaaatataagtaatggggttaataataattaataagttgggtaatatgaagagaattatactaataataatggtgacattattatcattatcttcatcagtttggggtcatattgtaataccatacgaagatcaaccactatccaagattaacattcttaaaactcagcttgatttacagggcactgccactatttctgctcaacctcttcaactttatcaaaaggtaattattatatatttaagtaataacattttgtctcattattcattaatatttattgaattttggtaaattatacagggacgtgtggaagctgaactagaagcagaatgggttactgtgagtgttaagaactccaaaccctccaacgacgactgggttggtgttttttctccaggaaaattcgagtcagtacaatactactctactaaattgctattattattattattattaataaaaatgtttatatacatatatgtgcacttcaaattaaacaaataaattaaataatatgcagctcatcgagttgcccaccaaaaggaccagaggacaaagagctagaatcgccatacatatgctctgccccaataaaggttataattaattttctacgtaataaatcaagctagctatattatgtatatacatatacatactagtaaaaaattacgtgcgaggcacgtatact

SEQ ID NO: 47673 - DNA, 1618 bp, Cannabis sativa
ttttcaatacggaaaactaggatgtcctaattggtaatgccatctcataatatcaatattagaagcaatacaatcaatatgcagacttttattaccttgagtagatgacggatcaacatcaaagtagtaaaactcgctacattctcttgcacttccaatggtcttccctgaggacatttctttgaaatcacaacataatggtgagaattttgcaatacaacaatcaaaggtaagtttgctaattgtgaggagattacaagatagacttggcacatggaggacatttttgagagcaagggaagaagatagataaactgaacctttacctgccacagttgatagagagccatcaacaatttttattttactcttacttggacaagggttgtaagtaataaaatgccaagatcaactagtcatgtgatcagatgcaccggagtcaatgatccatggtgagattttagtagtgaatgcaacaggagtgtgagagttcatatctggtgcagaagttgactttagcagccctatggagatgagcaatctgatctgtggtgaaaggaaatgctccaggttaggcaacaatcatattgtaaccctttaaaattgtttctaggagctgaacggtgatgggaaacaacctcagtgaccatggttgattttcaatggtcggaataaaagtttgttaagactggatgaagcagggtgtgccgagaatgaaaatgtcggagaaaagggcgtcgtcgaagtggtaacacgcctacatgcactggtgcatgaaggagatggcagtgacgaacgacgacacgtgggattcacgtgcgggtttgctgggcatctgacttcggggtttcgccactgagagttcgggtaatttcgctttgctggaggtaagaatagaaaaccactccaaattagttttctaagattgagcctctagtgtattaaaccctaattttgtaagagtagggtgaaagaagaaaattggaaattttccaattttttgagtttctacagctgtgataccatgtagcaatgtagaaaaatatacacttgagttatttttattactattggaaaaaacctttaggtagactgagtacaattttagacattaaatacacctggattaacagttactaacacctcaactaagcagcctcttaaattctgattatttctacatatgatgtaatacaaattagtggcgaagctgtgaacatcggaaaacatgaaatgattttttgtctaaaattttcttgaaattggtttgaatcaaattaatgatatttatgacttttaaagaacaaagataatgtgatacttgagggtgaaataaatgtcctaatgaaatttcttacacttttgttgcccaagttgggaagaaaaatggatttagtgcaacatagaacgtgttctttcaattgtattacactttagaattaaatagtcttcataaataatttttagtggaactttgcagaagagctctttaaggacaaataaatagtggtagaaggtcaaaatcttggtggcttcataggtttataaaacaaaagtttttggttatttgcctttccaagagatcagtagagtgtggggatgtatcttgtcccaagat

SEQ ID NO: 47674 - DNA, 1714 bp, Cannabis sativa
atttttaagaaattataaaaagttaaaataaactactaaataataaactagattaaaaactttactatgaaaaactagagaaaacttagctaataatttttttgaaatactgataattgactacaaataattgagaggaagagaataatataataaaaatattctttgtaaaggatttgatattagagcttttttctctctggaactctctagtaagtatgcaaacccgttcttctcctggtgtgagtctggtccctgtaatgagggttttggtccatccagattgtctctgtggtggctttctctttgatttcttgtctaatcgaggttatcctctaataaatgagagcattaattgctctaagtattatactcctctttccgatctcgtttgtcctactccgagcatttattgcatttcaattcgtcttcttcttctaattaatccaacctgtcatttctcttctacttcttcaaatctttgcattaaaaaccatcccttcaccttctcttttgcccttgaaagtcgtaagatggaggcagaggaaggattttttgaagctcattagattttttttatcattggggctactccgactaagtttagggttatgattaagggattttcgagagtcatcctacggggttattggttctacctctataaagcaagattaaggtacatcactattttctcatctcttacttgttttttttttccttcgttttctttgctgtctaatttgtctttctttaatatggatgaatttctgagtagtgtttcaagttcccttgtcctttctactgatgaaaataccatatttacccatgatgctaatccctcaaatgattctccagcccctattagtttgcttctcaaacttcacactgtcaaaccctttaataggccttccctcatgaaaaccctctcgggtatctgttcatcgcagtgtaggtttcatgtctgtgtctctgaacatgctaatggtttgttcatggttacatttgggtgtgaaggggataagggtagaatcctagaaggccaaccttggcactttgctcaaagtattactatctttgctgcccctaagagctcttttcctatcacccctgataatctttgttatgtccctttctggatacaagtgtatggcattcattttatgtgcaaatcccacgagttagctaggtttattgcctctgaagtaggggatctaattgaagttgacagggatacagttagggagggtgtagggccttatttgaggcttaggatcctcttagatgtcaatctgcctattagaagcggtatgaatattcgctttatcagaatggggaaggagtttatcaagtggcttgatttttgcttctattgtggtcgccttgatcatactaagaggtattgtcatgctttcttgcagaaatgcgatgaaactctttctgaacctctctgtccttttaccattttattgaggggtaaggagaaaatctctgataagagtgtgtctttccaatatccacacccacctgcaataactttgcttgatattcctcctgttgaccttaatattcctgccaggggttctctggggccaaccattagatttccttcattctttactaactaggttacttctagttcccattttaccccttcccaccaatttgttgctgtcatgatccctacgctcctcaaccccaatgttggtgggat

SEQ ID NO: 47675 - DNA, 2985 bp, Cannabis sativa
  modified_base (2405)..(2406): a, c, t, g, unknown or other
ttcttgttttgtgtgaaggtctaagctttattatttgtttaatttaattataggttctggcaaggaaggctaagaatcaatatacatggaaagggtttgaggctatacccaaggctctaaaggaacttaaggtaactacgttgagttcaacttgtttgaagtgtaaaattagtctaacaaaaacctttgggactgattttatgctcctttggttacgataggatgagggtttgaaggagaatttcagttcatttgatggcaacgatgattcaaaagtaagtatcaattgttttaggattgacaacactgtatatccatttactaagtttttattagtgtaattttgatttgggcttaatattctctgtatcaggtgtctgatgatgaagaagatgatgagagaatttctgacactcgtactgaaagtcaacctgacaaattaaaccacagtttaaatctcaaatcctcagcttcttctaaaccaggtaatgctatttaccatactattgttttgtatatctcagcaactatttcgttttacaaattatgtaaaggaaatattatatctatgttatttactagaaccgtttgttttataataaaaaaataaaaggttaaatttataagcgacacaaattctgtttatttttagaagcataagtacatcatgtttgtaaaattgtgattttcttttagttttgtcaatacaaactttgttttgatattattaaaagaatattaaaagtaattgatactatatgttactgtttaaataaaagaatttataatttgtgatttatatgtgtcttgttaaagacaataataaagtttgtgttaacgaatttaaagaaaagttacagtttctaaaagttaagtacttaatgtccgccaacaataaatatggagtttatatcacttataaatttgaaactttaaatacttatgtcgctacctacgcaaaataaaaatataaatacatacatctatgtttaaatgttaatgtagatatttgattaagtgcactaattatattttaacttataagacattaacaatagttggtaattgcgtgcgcaattttaattatacatatgggtttcatttttattgatgaagttatattctgtatattaatacacaatattttacacttttgaataagctggttggaaattagctatgtactattagtcatgtctaaaggattaattaatctatttcacccgtagatccatatgagttgaatcaaagattgatattgccaattactgcatttagtttgggttttacttgtaattttttttccttatactaagtacagtttttgttcttggcagaaaatagaagggaaaagtcattggcacttcttacccagaattttgtgaagctctttgtctgcactagtgtaagtgttatttgaggtttttcttttaaaaattgttttgttttagtcatttggttgttcgcatcacttgatagttcctcaaaattcttcaggtggatttgatctctctagacgaagctgcaaagttattgcttggggatgcacacaattcatcaattatgagaagtatggtaactaagtcttcatctttaaaatagagggtttgagtctctgtatttaatatgttatctattgtggttatttcagcgaaagtcaggcggctttatgatattgcaaatgtgctgtcctccatgaatctaattgagaaggtaaaacatcattgagatctttactgtagttactgtttttgtgctttaataaggttactctagtcaattaattagctacaattttgcacaagttttaacctgctgtggaaaattatgcagacacatacatcagatacaaggaagcctgcattcaggtggttgggatttggaggaagaggacaagctgagcataatgtctccgcccatgaatcagttgtaactgaatcaaaaaaacgaccatttggagcagacattacaaacatcagttttaagaggaataaaatggatttaggtgagagtttaaatatgaactttagcaagcagaagcaagtgaaacaagagagttatgtagatgagattgatagaatcactttcgatgaagattcaaatgaaagtacaaagagctatcagtttggcccttttgcaccagtcaccatagcaagagttggtacctctgagaataatccaaggaaagttcatgacttggagaagcttgctactatttatcgtcctcagtaccaaaaccaaggtaaggtatcaatcatttcatgactgcaagaaacttgcctctattttttgttcaagcttttaatctctgctaaaaggaaagacttaaagttttattatttatttaagggtaaatagcggcataagtaactaagttttaagtttgtaagcggcataaacccaanntttatttttaacggcataagtacccaatgtttataaaattgtaattctcttctggttccatcagtacagactttgttttaaatttattaaaagaacatttaaaagtaattgatactacatatttctatctagacccaatgatctagaattttggattttatatgtgctctgtttaagataataacagagtttgtactgacaaaattagaaaaaaattatagttttacaaacattaataaccattgagtttatgtcgctaaaaataaacattgagtttatgccgcttacaatcttagaactttgggtatttataccgttatttatcctttatttaatatcactaatttaatgtagtttttgcaaccatcttgcagccctgaaagaccttttttcacattacatggaagcatggaaaacatggtactcagaagtatccgagaagaatccaattagaatttcatgatactcaacagtgattgatcaactttatgggggagtggggttatggtagaagtattaggtttaagattttgtgtcttgagtcttaaatgcttgttggccacatctaaaaagagtcaa

SEQ ID NO: 47676 - DNA, 1310 bp, Cannabis sativa
atttatctgtattatataagtatgttttgtgtgtgagagtttgtgtggtggtgtatgtatataaacaaataagtctcattctcatcatcatctacatgtgccattcccgtgcaatgcaatacaggtagttagattgagacctttgacggagactcatttatattatctttcaatattatatatatggattggtgagattttaaaatctgtatgaaggtctaaactgaaacagggtcttcattcaattaaggttgggctaaatcttttgccctagcaggcagcagctaccatcactctttttctcttttagcttaatattaaatgtcaactgtgggtggttcctaacctccaaataatacgtcactatctatatattaattattacacttgataaataagcttttatttcaaccctcagtcaaaacaataataaggattgctttcaataataataataataatttatctcatctatagttatttttgttagaagaaagggatggttaataaataacaataactatgaccgtcaatggaggaacaaagtaaacacaattaatatgaaataagatgatgatttgaataataagagaatatacatttaattcaaatcctataattctaaactacgcccgcttgagcttctcattatttatcttttttacctaattgaagaaaaaagaaatcctaaaagttaatttgttgcccacttgactatagtgttgtcggagcacgatagtctgtcacgacatgagcctaggaggcatgcgagcacgactcgacatagaacaagatgagctttgaatctagtatgatacaaataaatatgagcttcgacatgacagtaaatatatgggattaagtacggttcaaacagacatgtatgaaatcataatagataaacacgaattatatccataaatatatattttctcaatgatatattcatattatttatgtttaaaatatacaatattatttatttattatttaagtttaaaaaataaaattgtttaaagaaaaggcaaacatacaaaaatttgggcttatataaaaatagaatcatatttaggtccgtattcaagcctgtattttgatttatcaaagctccaaacaatcccaacataaatattttaggctcatgagtcggtctgagccgtactctcaaaatatgggctaacccaactgttggcaagagtagcgtggcaaggacgatgacatgtggcacaaagttataagagaatgaacatttgaggaggatgaaaaatcacctttatacaagaaaaaaaaataccaagcacaatgtcaag

SEQ ID NO: 47677 - DNA, 2755 bp, Cannabis sativa
  modified_base (1530)..(1530): a, c, t, g, unknown or other
tacgatctttgggacatcaaggcttttgctgtttagctgcttggcgacaacaattttgtatatgaatagcaaacttttgtaaatgtattttgtaacgggatcctggaattttataaatgtattattttatgtttttaattaattaaacaaattttaattaatcacatttttcattaatctcgttgattagtaacgagatgcacagtacgtttaaaatcacattaacatgactcattagttagggtattacaattattcgcttggctgctccgtagtgaacttcacttggatcatgcatgaaccttgatagaaaaataactctgtacattatgtcaggtcttgtagcagttagatagagtatgttgttgattagacatcgaaattatgattcatctacttttggtgagccatcttctcttttgagagctttgttgttatctaatggagttgatacaatcttacatctctccattttgaatttctaaaagagtttctctatatactttttttatgagatgaagatcccatcttttttttttggttatttcgatcccaagaaagtagtgcattaatcccaaattgatcatcttgaaactcttcatcatgccttctttaatcttctttatcatcttctcattgttgtctgtctagatgagatcatcaatatataaggagacaataagtgtttcattcataccgcgagttttgatatttagtgttggctcacttttgctactcatgtatccttgttcagtgaagtagtggtcgattctactgtaccaggctcacaaagcttgctttaacccattcaaggtcttttttgacttgataactttagcttcatgtccttgtagcatgaacccttgaggtttctccacatatttcttcttcaagataaccatttaagaataccaactttaatcgagttaaaatcttccatttcttttgtgcgactaaagctattaaagttctaatagtgtccaggaatgcaacttgaataaatgtttcattgtagtaaactccataatgttgagagtatcctttcgcaactaatcttcctttgtgcttttggatagagtcatctgcattgagctttgtcttgtagaccaacttgaatcctataatgtctttgtcttgttgtcgatctataagctcccaagtctcattcttctcaatcatctttatttcttcattcatagcttttctctatacttcttgtttatgagatgcttcaaagctttctcactccataagcactaagtttcacgtctcttagatttcttatagaggtcttgttcgccttatttgtgactcaggtgggattcaatagcttgtgttggttcttgtgttgttggttgagtaagaacttcattttgatcagcttcttgtcttggcaatagaggagtattgattgtctttctttcaaattcttgtatcttctagatgtagcaacatctccgtcaagttttacgtatcaacttattattagtgtatttgattctaagctatagactcgataaccttttgatngagtactatagcctaagaagattcctttttcaatcttctcatcaagcttctctcttttctcttttggaatgttagagtagcatatgcacttgaagactttgagatacttttcttgtggcttacgtccactctatgcttcaattggcatcttattctgcatagccttggttggacatcaattgagctagtagactacagtggttactgcctctgctcaaaatcattttggtagacctttccctagtaacatggctcttgctggctccatatcagtcctatttttcctttcaaatatgccattttgttctagggcgtatccaacaatgagttggtgctccatccctttatcttcacaaaacttgatgaattcattagaggtgtattctttgcctctatcacttctaattgttttgatatacactactacaaaaatgggttcttgctttggttttaaagtgacaaaaaaataatttatattagttggggtaaccgacgcaataactatacatgcaaatagtcatattttttgcttaattttagaactgacacaaaatattttttgcttcggttatgaattgaagcaaatagtagagtgtttttgcttcagttcataattgatgcaaatagtagtgcagcgatgctaattagcttttatattttagttataaaataaagcaaaagaatttttttaaaaaaatatgaaccaacattgcaccaccaccacactattacaacctaggaacaacgtacattcacaataaaaccaagaagtagagaaagtaaaggaatatataaaactatccaagtgaagtttagaaaattttcattaccctaccaattacaaagagcattatgagaaagcaagatatcaatcattaaccagacatatatacttatatatatcactataaaattaaaaaatgataagaactcatcataggaaaataggcaagaacacaactactataaagattcaataaatacaccaacaagactagaacacaactagtattttgtcattatagcttaatttcttagtaatgaaaactaaagtacaaacagtttcaccatcaaacatctcatgtatgtgtatataggattttatatatagtaagtgcagtcaatgcttaatcagcaatatataactccaacatgttcttatgttagagattttataacaatggaagaaaatcagattcattacaactctattgtaaaataatac

SEQ ID NO: 47678 - DNA, 1102 bp, Cannabis sativa
ttaaccttaattatcctagatcaaccacagccctcagatcaaataactcctctatctaacggttgttgtacattacagaatacattccgttaaagtacatcacgaacaaaatcgtattcctatctatatatgtatatgaaccgatatgtgtcttgcacgataaaaatgatatgggatcgtatacgaatacgtaagtgacatatatatatatatagttaacttgtactggaagatattataactttctaaattaaaggctaattataacccatattgcttttatcacatttatcatatatgatgcagcatgggagtgaaaaagcagtacgtacttaacttgttaaaattaaactaatatatataatatatcatctatttttttttatttaagtgttttatatattacaattatattgagattcgaactcaaaacttccaacacacacgcactttcctaatgccacttgagctaatcttaagtggtttataatatatcatctataataattaattaaactgattatatattaatggtacatatatacatagaattcagctccaaaaccaaagggaaaactcaacggagaacaggctgtagcattgaggatatcaggagacaaggcagcttttcacaattgcaaatttataggttttcaagacacattgtgcgatgacaaaggtagacatttgtttagagattgctacattgaaggcaccgttgacttcatcttcggcaatggacaatccctttacttggtatgcatattaattatagtactttatatattttaatttattgcctacctatatatatatgatgagatttataattaagtgatggtacttgatgtagaacacaactataagatcggttgctaagcaaacagttatcacagcccaagcaaggacaatggtgtccgaaaacagtggattcacttttgttcattgcaaaatcatagctgagggtgacacttatttaggtcgagcttggaaagatatgccgagagtgatatttgcatatacttacatgggaccccatatcgatgttaatggctggtctaatggcatgtggcctattcaagcgcaagccaaaaagtacgta

SEQ ID NO: 47679 - DNA, 1675 bp, Cannabis sativa
gttcattgggcagattaaaatctacacttattgcaaaaggctacttccaaacacttagaatcgattatgatgaaacatttttgcgtgttgtcaaactagctatggtcagaattattactttagttgtatcttttaattggacttttaagaaattagatgtgagcaacgcgtttctgaatgacactcttcatgagactgtgttcatgcattaacttaaaggatttgtggatccatatcaacctacttatgtgtgttaattacacaaagctttatatggattaaaacaagcccctcaagcttggaatcagatacttaaagacacacttatgcaatgaggatttagcgcttcaaagtctggcaactctttattcacctatggctcgggaactgatcttatcattcttatagtatatgtggatgactttttggtcacaagtccatgcgttcaactcatagataggtttatttcagatctaaacaagtctttctccttgaaagacttagggcctattcactatttccttagagtggaaatatttagcgataaaacaagaatgtatctttcacaaaccaaatatataacaaatctccttgtcaagctcaacatggaaggtgccaaaccctctccaaatcccacaagttctagcatcaaattgtctctcacagagggtgaaccatttgaagacaagaccttgtatagaagcactttggggggtattacaatatctaactcctacaaggccctaatgttgctttcattatcaacaaactaagccaattcatacatgctctaactgccactcattgggaggcatgtaaaagactaatgagatatttgaaagggacaatcatgcatggtcttcatcttacaccagctgccagtttgacattagaaggctattctgatgctgactgggcttcatgtgttgatgttagaagaagcactggggatatgttatgtattttaggggtaatctggtatcctggccagctaagaaacaacaagtggtggcaaggtctagctctgaaagtgaatttcgcgctcttgccaatgttgcaacagaggttaagtggttggtctcactcctctttgaactacatttaaccaattctcagtgtccaattgtgtgggtggacaatcaaagtggttctgccatagcagcaaaccctgtgtttcatgccgatccaaacacattgagattgatttacactttgttagggatcttgtcttgtccaatcaactcttggtaagataggtcctaacatttgaccaagttacagatgctctaaccaaatcactgtccactgataaattcacctacttaataaccaaactcaaaatttctgatacacctctttgtttgaggggagatgttaaccaatttttgagtggtgtcacttatttttatttattagttaatgttaattggtaagttagttaaagtggttggctttttattgtaagctgtttctttctggtttcttaatttctcgatataaataaagagtaagctaactcatttagagttaatgctttcattcacaatttgattatgtttccatatctcaattcagctatatctagcttcttcttcctttttttttttttttttagttttttggttctttatagtctttacttacaaaattatttatattttctacccatagacca

SEQ ID NO: 47680 - DNA, 1695 bp, Cannabis sativa
taaatgtattagatttataaattaaaagatatatatatatataagaatagaatataaatttgatctattatgttttgaaatataattgtattaaatgtattagatttataaattactattttttattttaaaatgttaattgtatgtataattttttaattttttttataaatatgtgtggattgaattggatcaattacttttacatgtcaatcaacatccaatctgcacaagtgtagaaatcagcactttacggattggatcgtgcagattggattggatcggctattttatgaacacccttactcacagtgttttcttcatggtttgctcattgttgtgaaaactaatatacacaagtatacacaatctcacaagtaatataatgataagtaagattgtctccacagagattgtaaatgaaatttaatgtaaaactaattatttaacaatttagaattttaagaaaataaattgattgaatgttgtgaattaaaatgaaatgatcgaattggaattaagattaaaatattgctacaaatgctaaaaaattatttaaaagaaactgttatcaaaggaacaaacagacttgaataatgtctaaaactgctcagttgctacaatattacttcaacaaaatgcaaagaattaactagaatttccaatatgctcatgggattttttcaaaactcatggataaagttctatcatctaattcaatatattcctatattaagtaagatctaagaacacaatgcaaacactaattctcaaaattatgtaaggtaaaaaaaatattcttattctacttattaagaacaacctagaaaatatcattcaagtaccaactattaaatctaacccttccagtattaaacctaggttaataacctgctattgatttccaaagaacagttaataaacatgaagctcacttgaataaacaatgatgatttaacttaagtaatgcattcaaacttgaaatacatgacaaaataggtctttaatcattcaagtctcaaaagtttatctcataactaaattagcaaacataaaccaagatagaaaattaatatccatgagtactaaaatagccatgtaaaataagaagacacaaaatagagaagaaagaaagaatgagaacaaatcctatattgatgatgttgtgaatcttcttgtactcatctttccctttcaatttcttgtgttttcttctttttcatgctcctttgataatttctgcaacttttctccaacaatggcagcgccccttttatcaaatggtggctagtactttctttaatatgccaactaaggtaagaaaaagaattccttccaaaattagaaagtccaaatctattttccttcactttggtccactaaaatggactacatttctgcctaaaacgtccagttgggcgtcaattaatacttcctgccacataggcgccgaatcaagcaaaaaaataaaacatgctggcctttcttccacgtcatcaaattatcctcaagaatgatacatcgtcctgattttttagcatctaccaattatttcagctttttctttcattttggcttcctagtttccttttataaccttcccatggatcactttgattccttttttacgcataaatctagcacaaaataatcatttactttcaattagcatctaaaacacttaaaattactagc

SEQ ID NO: 47681 - DNA, 921 bp, Cannabis sativa
ataataaaacaaaaaacaaatactaaaatactattaatatttgaactgatattaaatattagccaatgtgcttcgaggtgagttcatgcacggcggtgtcgttctcgactgttgcctccacgatgattcttccgcgtatagtgtcggtgccgacaatacagtgagacagttagttcgttttttcttttttcatatgctttagttttctgtttggttggtgaatcaaatttgtaacatttttgaagattatggttgttctatcgataattataatttgactggttttggtattttaggcttgtttttaactacaataaggggggcattctaggtcgacatgatgcacctgtaattcagtcggactcggagcatcttcgttcctcttcgtcaccaacgccaccaacgccaccaacgatcgtgatttctaccaaacaaccgtcgcaagagacacacctgacgcttctaccggctatttccaatgccgcttggacataaatgctaccgtatgccaagaatgcgtcaaaaacgcttctacagaggcacttaagcggtgcccactagaaaagggagccataatctggttcgacgagtgctgggtctcgtacccgcgttaccgttgtctaatgtgcagaatgtgacggaagcggagcgcttcaaccaattgttgggagatgttctgaataaagtggcggaccaagccgttagttccgagtcggctaagaagtacgcgacggaggaagagaacttcacgagttcgcagactttgtacagcttagcacaatgctcatcagatgcaccaacctctttttgcaacatgtgtttgcttagcgccattggtttcataccagggttctgtggtggcagacgaggtggggctgtttacttgcccagctgcatcattagattcgagctctacccctt

SEQ ID NO: 47682 - DNA, 955 bp, Cannabis sativa
tcaacaaaattaccacatggcttatgatcttgactacaaaagattgtatatggaaaaagttgattgtcaaaaatataaagattattagtgcttttcatttaaatttataatgtgtcccctatcatgacttcttattattattaagtatttttaaatttttacatttctcttataatatctttatatattaaaaatatttgtataacaaaaattcttagtgtaatgattttttaaaacggtttctcttttatgtataagagtaataaaaggaaggttaacattaaacgtgaaccatctaacaattgaagaatagtttattgattgctttctttttcttctgcaatctacaagccaggtctactcctctttgttgactcaaaaatttggagtagacttctaagccacacttggtcgctagattggagagagtgaaacagttattaagtaattataatggagacacaacaaattcatagtatttcatgccctgcatcgcgacagtaataaagctacgtctactttgagtttttatttctcacgagatggtattacagaaaaaggttaagtatcaaaaggtcaaatttctagggagagaaactagagagataagctctgacattgtaagtagttttttgaaagtaaaaaataagctaacagagctctccttttatatgtgaaagaggcccacaaaaataggaaaaaagtacaaattagatttttttggactatagaagatgatctaacgataaaaattaacttctggtggtgatgaccatttttcggagcccaatgagatctgctgtagataacccagagcttattttcataaatcccttggggtgaaatatggcgtcaatatcttgagaatagcgattgaaatttacgacatgacttgatagaatattgaattagcttcaaaatgcaagttgagttgcgtcaatcggatcaatattga

SEQ ID NO: 47683 - DNA, 2669 bp, Cannabis sativa
taagttgaaattaaaagagatacaataataatgaagattaaaggaagttgaagatgttttatgtgaataccttgttagtggttgattttattgtggaaagatctttgaaatcaccaggtgatggtggtgtgtcagatgaagaggaagagtcatcatttttagataattgttgaagtaaaaattccttgttcacttcacacctatatgtcacatagtacaatataacttttattagttctgagaatgaatttggaaaagcattattatgtaggttgatgttggaaaaagaaaataataagaataagaatataccagtccttcataatatcatcagcaggtatcttaggttcgagaagtaaggaactatgtgcattagttgctaatgatatacatgtgtcaataaagaagatatacaagaaattcaatcattatgtgataatacaagagaaagattagttaatattatgtgataatacacaactacaactttattacctttatatgatcccactttaagatgcttagcaagtaaactaggagtgtttttaattatctttctaatttcagcacactaagcatccaagaggctattccacattgttagcatgattttttgtttcctaaaatttgaacaatatgtataaatataagataaattatatcatagtaaaaataatttgagttgatggtaatgaaaagaataacctactctgtattaactattgtgatctctttgagttttgttcgaccatgtattgtttgtaaatctcttgggtccttaatagcaacaactattcccaaaagatttgaaatatattttaaatttatggagataaaaaaatatacattatgatcaataatttttttgtgctaattgtatataataagaacataccgatttctgtattagtcttgacgtaattttgtaactctgagaaagggacaagtgagcattgaggaatagtaataacagcttaagtttcttttgcttcttcaattagggtgctgctgttgattgtccattgaaatacattgtttgttagagtatgactctttggtgcatgcttgacatatgcatttgatatatagtaagtcctgtgtaatttgagtttatctctgaacaagtcaatactatcttcatagagtgttgcttggactgagtagcgctgcttaaaaaaaaattctagtgatatacttaattttattttatttaaggctaccagtatttaattagctataataatttactgattctaatttaagagaaaagtaaaacacataaaacttgatgagatcaaagttatatgaacaataaaaaaaattataaaagaatacctctgaatcagataggaccatgtgctggtgtctatttgaagtatgttgtgagcaacgttcagtaaattttttagagacaacaaccctagttgtccatcgttgtggtccattagttattttgttaaaaggtgttaactgttttttcattatatctataattagaaaataatagttatatattaatagaaaataataaattatatatgattgataaaagaagaacataaataatagaaaggaaaataatagaaaaaatagtttgaagacaaatgaaagaatgaagtagattgtcaaaagaaaaatgaaaagaaaaggtgtgagtttgagaagacataaataaaaagtagaatttgtataaagtgacaaaaaaagtatgaatttgaaaggggaagaagataagcaaaagaaaatttgagtttgaaggaagaacatgaatgtataaaacatcaaaatcttaccaactaaaaagaaaaatggtgaagaagccaatattctgctctcttaactttgttttatgttttctttgaaatgcatgcttttctcatgggtagaagtggaatggtagtataagtgttgaagtaaaaaaacaacacatgtaatacagatgtaaaacaaatactaatgataatactaagtattttttaaaaagaaaagaaaattagaataagaggaacattttgttaagaagctttttatgaattatataaaatattaaattcaaataaaattactaatttataatttattatatttgtctttataatttgttatttttttaattagtttaattaaaataataataataacaataaaatttataaatgtataattatattaaagaaaataggtagagacggaatggtggtataagtgttgaagtgaaaaagtaacacctgtaatatagatgtcaaaaaatattaattagattaaataattaaaataaatgttaatgataatactaagtatgtttaaaaaagaaaagaaaattagaataagagaggattttgatgaaaagcttttttatgaattatataaaatattaaatttaaataaaataattaatttgcaatttattatatttgtttttataatttattctttttttaattagtttaattaaaataataataataacaataaagtttataagtgtataattatattaaaagaaaaatatataaatttataagtgtatatctatttttgtttaaacagctatacaagagttagtaattaagaaatgagaaaaatttattattctgtattgcatggtcatttgataaagtgattgaattaaatcaaaattaatttgatccaaaagacattaatgggaa

SEQ ID NO: 47684 - DNA, 2062 bp, Cannabis sativa
aattctctgtgtgatatttccatacataaattactacattagattaaaaatgaattaaaaaaagtatcctcatttataaaagtaaaagtaatactcttaactaaaggattcctctaaatatatatttctttgtaaaaaaattttctatttctataaaattatatgttttttgatattaattttaaatgttatttttagaagatatatacgatggccaaaaaaattgtgtaaagtgcaaaaaaaacccaaacaaacaaactccacctagaaagagtaaacaagtttttgccattgcatatgtgtattcacagttcactcccctatcaaatcaaaattggtctctatgttcagatagaaaatatatactctattattaagacttaccgtttgttccgttgatacacttatagtgtgttaggtattaccgttatttctgtttctgttgacacatgttgagtcttttttttcttgttagagtcagttggttagtatctgattcctaactttttctagcttggtcatcttcccatatctatatatatggctctactttgtactctatattcattcattcacattttaataaagtaattcctttacttcttccgcaacatggtatcagagcaggaaagtaatgctttcctttgatcttgtgtcgtcttcctccttcaccatcactatgtcgtcttttccggcaatagctacgtctgcagtgaagatcaattgtcttcatcgacatcccaactatcccatgttccacgtttttgcatttttcttgcagataacttgttttctattcaaaaatgtcgactgaagatcaagctacaagaacagaagatagcaattctactccgacagccgtagacaaaagtctaagttcaatcaatttgggtgatcagagtcttcttgtggcgcgaccaagaagtcatctcgacgatccctccgatccatattaccttcatcatggggataaccctagaaatgttcttgtgtctcaacctctcactggccaagacaactatgtggcttggagcagggctatcaactcgccatatcaatcaagaataaactcggattcttggacggttctatccctaaatcctctctttctgatccttctctttataatgcttggatccataacaataacatagtaatttcttggattttaaattctgttcgaaagaaatttcatctagtatcctttacgatgagtctgctgctgctctatggagtgatcttcaggtcaggttccatcaaataaatggatctcatctgtacaatttgaaaaaagaatcttgtgaatcttatgaatcttaaacaggaaaatcacattgtagggatgtctttcaccaggctcaaaactatttgggagcagctttctaatttcagaccaacctataccgtgcaatggatgcacttgtgggggagtcaaaaagtttcaagaacactacaacatggaatatatcatgtctttcctcatgggattgtctgatatgtatgctcatgttcgtggtaatatcttggttatggatcccttgccagaaatcaatagagtctttcaccttgtcacacaagaagaaaatcaaagaaggagtcataatcccactacagatccaaatctgaatgtggcctttgctttccatggttataaagcttcaggaaataaggataatcatggttcaagacaacaaccaccaaagaaaggcagacccttttgcactcactgcaattttcatggccataccattgaaaaatgctacaagatacatggataccaaccaggttatagcaagcctaataagcctaaagaagctgcagcaaaccaggtccaaaccaataatgagaactgtgcctctattggagacagtcacaccatgcttccccaactcactgctgcataatatcaacaacttctcaacattcctgcaatgcagcaaaagtgtaaatacctctgaccctggaacctctacaggtaacactggtgaagtccttgcccatgttatctttaagatatctgaggaatctttttgctccactccagtgtgttgggttttgtgcc

SEQ ID NO: 47685 - DNA, 1497 bp, Cannabis sativa
  modified_base (183)..(190): a, c, t, g, unknown or other
tacaattcaattggttacatttttaagctaaattgctcattatcttattccaattgggataaggagctaaaatattgaacgcacataaatatagtttttttcttttaaaaaaatgtaaatatagtttatttaggaagtaataatgtcacacttatattattttgggattattttacaaatacnnnnnnnnaataaaaaattacaaaaatacaattatgcggaattttaaatatatttctttttacaatttttataattttatttatagaaaatatggtcttttgatatatttttatgttgtactcttgttcatttgttattttttttgaacaagaagaaaactttttattcaaaacaaccacaaactacaagcaaacaacatctgcaacacgctagcaagccacccaaacaacaattaccactcattaactacattaaaaatgtattcctcgaacctattcgtactactagaacagaagcccataaatctaattttaacaaccctcctaatttcattactaacaactacaattgtcatagaattaaaaagacaactatttctaatcaaccaaacataatacaaggttgttgcaataaacgagtttatgactttctcttgcaaactttgaagaagctttgagtaccaaacactgatattaataggccaatcaaagacacccaaccatttgctaatctcgttaaccaccccgttcgtaaaggaacactccacaaaaagatggctatgagtctctctagcaccatcacaaactgggaaaaaatcaataggtatagtcagaattttactgatatgatctctagttagaagttggctgttgatagcataccaaccaataaatctatgcttcagaacaatcatcttatgccaaatattagtagcataatccactctttagccttgaacaaaagataagtagaatttttttgctttgaacttaccttttttactagcttcaacaatatcatgtttttccaccaacccctgaagcctcaaaagcttcttcaagtaccaactcgcatcttgcataaaagctaccgactagaagctttgaccctttaagtaaatgacattgatccaacgcacccaaaggttgtccttcttgctcgaaatagcccaaatgtatttctccatcaaagcaacctttttaataagacgggagataaaattttcttcgattgccaatggttccccaaagaaaatctctacaatatttatcaatggttccagtaactttttggggaagaatagataggctcatccaaaagtttcttatacccaagagcactgagtgaattaattgcgcccttcctacaaaagacaaatttctgctagcccagttatgaagcttcttgtgaaccttgtctatgatagtaccacaatcagcagattgccatttcgttggtctaaggtgggctcccaggtacttaagaggaaagctacccttttccatttgtaataagcctaatcgagttttcatt

SEQ ID NO: 47686 - DNA, 2108 bp, Cannabis sativa
agtgcagtgagtctttcttaatttatcagcaacaacaacataagcaataatacaacgtaccttggaggaaatcatcagtctcaggattatcatcatcagaagagatgttggaacccaaatcagagtcatcttcatcatctccatcagactcttcaaaaccctttatttcttcttcgttttcctcttcatcagaggagacatcagaatggtcttctttctgggacttcttagcagtgaaaagatcatcactttgcttcttttttagagaagctttttgggcattggccttggccttaccaccttttttcttattaagaagagcaactccagccattgaacaaagctggtcgaaaccgtacctgtgagtctgagagtgaggtaattgtggtaatgaagccgagttcgacaacccaatggcctatactcaaacggaattcctcctcttccgatcagttggtgaaggagtttgataatctatctagggcaccgctgatagagatggagtaacggagagagagagacaaggagttgtcttacgacttcgaatgaatttgaaaccctaataaaccctactaaaacctaatccacatttttcttccatttttttatgaaaccatttcatataataattgaaaattagccactcttagataataaaaaattagatgtatatattttataaaataaatagaatatttatccataattatttttttagtaaaaaaattatctcaaattatcaaagtaactacaaattttcctatttcgtcacattttgttactagtaaataacctgtattttgaggcgaatgtttaaaaaattttaaattataaaaaaattaccatatattatttttaactttttttaaaaaaatttactatttgagtttctaaagtagtttctctaatggtttctatagggaaatttgaatttctatgcttacattaccttaaaattttttcctaaacttatacttaccaatatttttaatatatgacaactttattgtttttcccaaaataccctcccccaattacatcaactcctctcttcccatcttttcccctaaacgtaaaatgaacccatcaggcccaaagaatcggacccatcggacccatcgggcccaaagaatcggacccatcgggcccaaagaattggacccgtcgggcccatcgggcccaaggaatcgggctccatcggacagggccatcgggccatcgggtccatcggcctcatcgggcccaaggaatcggaccgagccatcggaccccaatatcaggccatcggccgtgggtcacatggtccggtcggccgtgggtggtctgccgtgggtgggtggtctgccgtgggtgggtggtctgcgtgtgtgggtgcggcaccgagcgagagagaaagaaaggcgaaagagagagagggcatcaagtttcaaatgagggggtattgtgggaattaagaaaatgttatcccattttaccaatattccctattttaagtttagggaaaaaattatcccctaatgtaagcatagaaattcaaatttcccatttaatatatatgtatttttaatccatgattataaaattaaactttaataatagtgtataatgtagtttaataaatttaatacaagataatataatgttaccataaattaaattttacaccacaataaatattacttttttatttacacacttgccacttcctaacgtaattaataaatttatgtgtttttatttatatttttaatatatttttatattttttaaataaaaatttaatatttttgttgatttttttacactgtcttattaaaataaggtttattttaccttcattttgtaacacttaattccttgtgtaaaatagttggtagcaactctctttattaactaattaaagaactaaacagctttttacgcggtgtgcgcttgtattgctctcccataactctattttcgcggtttaggctgctcccattttgcccgccgctactatgggaatcgcttttgctttcttttcctctggctgttaagatgtttcagtactctaggttgtctcttgcctgccaatggattcagcagcagttcgaaaggttaacctattc

SEQ ID NO: 47687 - DNA, 1298 bp, Cannabis sativa
tttataacagctgcctaaaaagaaaaataaataagagaataagaaaaaagtgatattttgcaacattaaaaagattaacagatggaatcatagaagtctcaaaaatgaaaggggaatttactacttgtctgtgatatatcaacttcttaataagtctgcatctctcccaaagtcccaatatgcaaaaaaaaatgaccaaataatatcagaataatatattacaaaatgtaaacataaggtaaaattgggaacaacatattaaatatattaatatgtgtatgcatatatgaactttatatagtacactgtagttttaaattaataaattgtaggattttcttgatttccaagaatgcttccctacaccaactcaatatcaatcaaaacgacagggttaattttgaccaagaattaaaaatgacaaattaaccaaacgataagagatatcaagttgtttcttcctgcacgacaactcgtttagaccaaaatgatttgtcatctcccagaaacaaaacaaaaaacaaattaatgagctaagcctagctcagaattgaccttagaaccttcgagagtttgagaccaaactatctctccctgttcaaagaaccctagaacccagatccccttctcgatcaaaccaggtcgatataaccagtaaccttccccagaaatctaccccaaactcatacacgcataagatcaagctttaagcagtaaagagatataagaaaaccaaacacagggtttatagaggttcgccctaaatccaagggtacgtcctcttttgagctcgccttgaagaacgatctcagatttgtactatatttgagaaatattacatcaggtgagaaatccgagtcacaaaaatcgactgatattttagttctttctctcttctctctcttccgtgtatttttcttttgttctcactaactctctctttcttttccttgcatgtacactctgaaacaatcaacacgagagctcctctctcataacctgggtcttcacacttgggttctctcaactgagagatttgtaagtagttctgctcctcttttataggttcagttctagtagtagatgagtaacagaatttttattgcaaaacagaaattcagttaggtctagttgcagtttgttgtgtttggtgaatgagtaaagtcacgagccttttatttgtattttatctttcctgtaaaactgtaaaacatcaggggggggatctaattttaacaatttccaccttagattcctctcaggtcacttgttcttatagtgcatcattcttcaagggt

SEQ ID NO: 47688 - DNA, 1828 bp, Cannabis sativa
tcgattggtgatagagttgatgaaatggttgttggatttgggcaagaaggcttcccgctttggcagatctagatccctcaagagctaagtgcctggcccttttttcctcccttctgggatgagggcagtgctggcatatttcagtaatgcatccacttttggggcagagtcttccctactttattctttaaaatatattacaaaaatctcacttttctattttatttcaagcttgtacattagtttcttttaaatatatcaccaaaattttacttttttttcaaaaaaaaaattaatatatttaatttatccattaaaaatatataatattaatgtatatatccacatataaaaggaatagtattaataaaatatgtctagaaaaatgaatagtatttataaatatagagcatgaataataaatattaaagaaacataaaagaatgagtttaaagcatgtgatgtttattttatttgttacttcaaatactttagaatcccaactttagagcatttgaaatgagtgttctctaaagtgtacttattaataaaataccaaattctaattatagtaaagttgtgtcttagttatctaattaattaaagatatttttttgttttattaaatgataaatcggattttgtactttttaaaatgatataaaataatacgctaagtttaattattgtgaaagtaaaacttaataataacatgatctaaaatattaactagaatgtttactttattatttttattcaactaaaaattaagttcactattatattaagaaaatgacgaaaattgaagttagtattattttgtatcattttaaaaaatataaaggcataatttatctttaacaaaatatatagtaatgataagaatgatatataaacttgaacttgcctgcaattggattaaatcagatcctcgtcgtatatttttgaatagactgagaacgagttgaaggagattgggggccttgtattcatcatgtgaatcagcaaactctagtgataaaggtttcgttaaaataaccttcgtctcctccttcgtactccatatctcctccttaaataacattattaattgcaggtataatgtcagtaaaaaaaaaacattattattttaccatacagtattttcaaatgtaattttatcaaataccttaatagtatttttaattgaatgattttgtcatcgttttaaataaaagaaaaaaagaaagaagaaaacaactcaaataaaataaatatttagaaatatctctctaaaattaaatcaaataacttttaatttagaataaatataaaatttcaaaattaactaaatatgtgactaaatttttgctcctgagaatatgtaaaatattatttcacacaaaattatagaagtttaattaactttccaatatatttaatttattcaaatcagatttctagataaaaagttataattaaaatattatgaaagatttgtgaaaattcatgataataataaactatatcatttataactttaacttgcaattattttttgaattaattgcgtaaagatacctacttttaattttattttcagaaatgcacttatttatattaatataaataatactgtcaattttttaattattttgtacgcgtgaatacggaaataaaacaattttagttttaataaacttagaaatcatttttattgggaaaacactaaatgtcttttttggtttttttttggggttttttcaataatatacttaaaattgattttatttgtaaaaatactttcaacaaatttatttgcacaaataccgatgtgtcacgtcagcat

SEQ ID NO: 47689 - DNA, 3321 bp, Cannabis sativa
cgagtgaatcaaagaaactagtaacatgaacatgagttcatgataactcaatatttaggtcgatctactattgatcatcgttatgatataaattaggtatttataataaacaacatgttcataaagacaactttattcatatcggtacttgtcatatataatctctattatatgccacaccttttcacttagatgtcttaatacattagtaatccaaaccaagatcacttacactgtagaacgggcatcagtgaaccctactagcaaccattgattaaatatttaataaatttaatatgttgctgattgttttattcatagctaagtggtcttagttctctgtacagctacaaggcacaacctcatatatgaataatttttttccaatatttgatacaaattattcaaataatgaatattaataacttaacattcatacataaatcaaatgtttaactctttatttaataaccagaaaacgtctttacaggctttttagtgcataaacactaacacaaccaccatgtgtacttattttctctagtccatataaatcaaaatgtatgtattctatgatatgttttgatttatgggtgccagtgttaaatttcaatcagtggtactttcctaaaatacaatgttcacaaaaatctactttagataccatatctttactaagtattttctggctcttgattatttgtagccctttttcactaatgtggcctagtcttctatgctacaaagttaccttatcatcttcaggtggtggaactatgtttttgcagcttactttaggttccccacataggtaacacaatccatcttcctttattcctttcatgatcaccatggatcccttgcatagttttatttgtccatctttgattttgctttcaattggcaagtcatcaagcacacttaggaaattaaatttctagatagattaggtacatacctacataccttacacctcttaggaatctgatcaccccatcaaacatcttgaagctcacaattcttatgccttctatttcacatgtttgattgtttcccaatatgacttttcctcctctaacatccctataactagacagtagactattgttgttagtcatatagaacgtacaactagattctaaaatccattcattccttagggtagttaaagccatatagacttccccactatcataaccatcactctagtttatttcttgatgatctttatgcttgtaactgtctaatttctttgagtttttgtcttgcccatctaatttgtatttgttattttcttcccaaatagtagtctctcctaagatttcaagttttccacaatggtagcaaccatttagatcttttagacttcttgtctgaaactttggtttccctgagcagtgatccttgctagagcttctacttgagcttcttccctttttatgccatggttttttatgatttggtcttcctctactaaggttgagttcaccatgagatccattgtgtttttccatcttcatttccaagtcctttgacttcaaggcaaagataacttcctccaaagtgatctctgttctaccatacttaatagcattcttaacttctctatatgattcacatagggagttaaggattataattacttggttctcatcactaaggacttcattttctcctgagttagccaactcaatatgcaatatcaagaactcatctaaattctattcaagggtttagaatgtaacattttaaatccaaagattctttccttcaaatagatcttgttggtcgaggatttcttttgaaattattcttctaacttcttccagattttagcaggtgtttcttccttgtcaacttgtttgataatagcatcaaacagattgaatatgattattccagttgctgcttcaagaaactcttccttctgaacttcggcatttccattaggccattcatttggatcatctagcactctaagcagcttctgttatgctagtaatgacctgatctccagatccatcaaacctgtcaatatcgacttttatattgctcatgtaatttaattcacaaaagataacaaatttcttttaagagaattctcagtttgtttattcaaactgttctagatgaagacctcttttttgaggattagcttcctttaattttgatctccttctcttgagttattctttctttcaaaaaccacaactctaatgccactacaggaaatttcacaaatatccctacacaactcacacacatatattagtgcacaaggtcaattttgacctttcttttgtctcaattaatgaacacaaaatggacatgtatcactttaatatttttagtttgattttattttataaaattaccaatatgtcttatttgaacaggcttcaaagaacaaaacaattaggccaaaaatttcaagaaaaatgagggaccatcagctctgttctagctctgttcttgagctcgatgagaaaaagcatgcagcaaaaatggacaataaataaagtaaaagatgtgaggtaagagagaaacaaacatagagagattttacaaggttcaccacaaaatttgggactacgttcttggtgagctacctcagagaagctcagttcacaatccatgatcaagatcaacaattacaccatgatttcaaagctttaagatgcattcatcatttggtagctaattttcaccattacaagtatgttttttctctccctcacttttattttctctctgattgaatcaatcctcttactcttctctccctaactctcttcttttcttttcttgaacacgagagcaactctcactaggtctgttcctcctgaatctaccactttcttggttagaggagttgtaatgaagctgtaagtcttctggtttttgactcctttctattcatagtgtttgcgttgtagagtaagttagtgaggagtaactaacgaagtcttggatcttggattgttctaagttagttaggctctaactgtattttaactaagtgttttatgtgttcgttgtgacaggtcagcttatattggaaattaatttctacacaaccaaactacataattctttcttaattatgttcaaaaatcagctgtaaaatatactgaacatcactcatacatgactacactgtctttgttttaccatttacttcatttatgtcacgattaagaaggttcacgttaagcatagtcaaagaaataaatcgacaacacatactaattataaacttttattctataattaatcataaaagcttatcacaaaagcatttaataataatacactcaaact

SEQ ID NO: 47690 - DNA, 1156 bp, Cannabis sativa
  modified_base (164)..(165): a, c, t, g, unknown or other
tttaaggacttttgtctaatttcattcaatattgtttacgtactaaaccattctcttcaaacttttatatatatcaaattatgttcctcgaattttgaaataaactaaatcatatcccttgatcgaactttcatctatgtaaattttttttactaaaattagannaaagtccttaaatccaacaatttcaatagttcacggagtatttttaacaaccttaaaaatttaaaaagcatgatttggtacatgtcaaaattcatgaagcgaaatttctaattaacctaaagaaaaatatgtttttatgcccagcagccctgtatgcatatatatatatatatatatatatcgaaagagagagaaggagcaatattggatacaacatgggactcattctcactacttgtcaaataatggtgtgctgttaaatttgacaatctgctgttgttttttttcttttggggggtggaccccatgatgatcttacgttcttcctaataaaatttatgttttcctcagaaaagaaaagaaaagaaagaaaattgtattggtaataactaataatgatgctaccgacatttttggtactttaggagttaggaggagagaccgtgaccatggtactctcactgagacataatcatatactcaccacatgtccttcataactgcccttcctcatcacaaatccaatatataatcacaatttaatattaagtctcccatattttaatttaaaaataatataaaaaatgggtgatagcaatgctcttagctcatttcaatttgacaccaccactatattgtgagtatatatactcttattatgtatatatatatatttatatttatatttatataataatgtataatctatgtatgcatggcaacagaagtttactagttaatttgtctaaaaggaccaaaactgcacagaagttataatgcttggtgggagaaacgtctctgtcaaaatctttacatttaatttgtttacacatctctacctatactaatttattatttctctattttctcatcatttctttttgtattgttgttcccaaaacaaataaatattcataaagattataaatcttataaagaaaagaagagatcaaaagcataaataattataaccaatgaatgtacaactaaa

SEQ ID NO: 47691 - DNA, 1309 bp, Cannabis sativa
aattaatacatcgccagtgggatcaaaccctccaagacatcgaattacagcttcttgtttctcaaaagcttcagcaaatgtcgcttcactgcttctacctactatatattgcttgaaggcccctacttttcttgttttactcaactcctccgcaaaacctttgattaaacaagtaaataataaattgattatcaaaagtaaaagtggcagagaaataaaagtaaattgttggaagaatcaggcaagggcatacggagaagagtgaatgactcggagctgatttgagcttctccttcagaacccttttggccggtgaagacccctttgatcttgttcacccatgaactttgtagctgcgctgttgagaatattgatcgatactgtgatggaacaaactgagatccatggtggcagaagcaagatagagaaaaaataatttcagaatttttcttgcacaaagtgttgccaatgatttgtgaatacattctgggatttttgcatggaatgaagctgacccactgtagtgcttctcctaccaaccaattaagagcaagtaccaatcatatatggcctcaccaaagaactttctacaaaaccaatatattattctcctaaatttatcgaaatcctctacagcattttcacaaattaagttgagcactgcattaggagaaagaaagaaagaaaaaaatggaacagagttatgttcatccacattccataccttgttcttagtaaaaactgagtactagcacaatatctcactttataaatttaaataaactcattaaaccaatgaaagtttaattctttccataacatgttgcaaggtttaagcaaactcgacagtgcaaggcaaaatatgcataacatcaaccgaccaaaagctacataaaatgagagaaacaattcaaaacaagaaaataaatcaaatatgaaaaccaattcaaacacaaaccaatcactcaaaagcaaaagctattcttccccggtgcatttcttaatcaaacataccgcattaacatgtttcacacaatgaaggttcaaaggaaggaagtcaaacttcacctcctaaaataattcaaccacaaatagagtattgatcctgagtcagagattaaaatttaacagcttactaagctaacaatgaacatacacacacccatataataataataaaaaaaaaaaaaaaaaaaaccagatgaacttaagccaactaagttgagttctttcacttaaatgtgtgcacagtgacggatccagaatttttaatctgtgggggcttaattgttataaaaatatttattat

SEQ ID NO: 47692 - DNA, 1914 bp, Cannabis sativa
  modified_base (427)..(428): a, c, t, g, unknown or other
  modified_base (491)..(500): a, c, t, g, unknown or other
aaaatccaccattagagctcaagcaagcttgaagctctctaccaaacctgcaccaaaacacctaaaacaactctatacaacacaaattcaaaaatatatatataatctaacctataacaatttgtaaagaagaaaaacacttaaaacacataaaatcccaaacttaaattcttacaatacaaagagaaactaagaataaagattaccttgattatctcttcaacaattttaccttaacctacccgacaaaaaattttacttttaggcacaacaaaacttgtgactaaaagagaaaaagttgttactaattataaatcatcattcctatattatgactaaaaggtccttggctaaaagtattagtcacaaaaattacaatttgttgtgagtaaatgtagtttacaatacttgttgtgactaaaactannttagtgacaacttgtatctaaaaactatgttttagtcataagtaacattttgttgtgactaannnnnnnnnntagtcacaaaaaaattatgttatgactaaacagttatcaccaaaagtagtaactttttgtagagctaactcaaaaccttaagaaattgatgaaaaagggtctaaactatttaagttagagttggatttcttggttcctttgttacccaagcaaaagagagagagaggaagtaaggatagattttctttattttcctttttttattattaactgaagtttatctaatgaaacttaaactaattaatctattaatttccaccagcccctaactcattaataaaacaaaagaattaacttcaaagaaaaaagaccatttcattcataacttaacacttagaaaactactctaacctaggagtaatctggtcataatcaattaaaattagatttttgaaatattacatatcccggccgtaaaatttgtgtcatatattcgtgttcgtgtgctgtgttgaaacccattttgcacccctacccctaagaaaaactctagacaggctttaagcaaggcatttcatttcaatatatgaaaaagaagcctcagataataaagtattgctacaactttcaaagttagatttcaatctattacaatccaccactatataaaaataagctttagtgacctatatatgttgagggattctaatagtctttagtgaccctccaccgcgcgtcactacgtgagtggaaagattgtattttgtgacactgttgggtcactaaatctttttagagtccttcacaacacgttattgtacctttttgcatggagtcccacattatccgaatgtaaagataccagtcaccctcatagtgtgccaatatgtacactattttttttttaattttttaattttggctgaataaatttaaatttgtatgattaatataatttataattagtcacaattattttatttttagtcacaagttttgttgtgactaaaactaaaatttgtagtgataagttagctaggtatgtatttgaattttgagatgtacacatctctatctttaaaaaatatgacaataaattgctatgggaaactgagatttagctatgaatgacatttattttcttgaaatgtgaatcttcaaaactattttaacgcatatgtcactatgtgatcactatatatatactatatttttttaattttttaattatggctgaataaattcaaatgtaatattaatttcaattacaaaataatataaatggatttaaccttgttttcatgaccataaattattgaaaaacaccttgcatattataatgataatataagtccactacaacaaaaatatcttttagctaccaaattttattggtagcaaaatgtagcttattgctaccaaattttagtagcaaaatttcttagtagcaaataccaaacaaataagaccaaat

SEQ ID NO: 47693 - DNA, 1090 bp, Cannabis sativa
  modified_base (1028)..(1030): a, c, t, g, unknown or other
ctcttttctattttaaagaatgagctattttaaaggaactaagaacatcttcagtgcaaaatgtaatttatgctaaatttagcttaaaatatacaccaaagctacatttagtctactttttataattgtgcttcaatgcacaatgaatgaaataactaaaaaaaaagttaataagtaattaatgtttattgaaaatgcaaatacaattaatttattttattttctttatgaataattttcttttagtgttgcaaattttgagcttaaaatgtaaattaaaatgaatagagtttttttaattaataaatgtaatattgaatgttaagatagttgtttaccgagatttttagcaactaaatatttttagagcttaagaaatgaacaacaaaataaatagtaagctaacaaatgagagatttttacgtggtcatgcgttaactatccttagtccacgagtctattttattaggcacatcagtcggtaactgcttatacaaataaaaatacaatggactggaactcctttcccccgtgtttctcttaaagaagaggaaacttagtaggaatattctggagttttttttagatgtaatacttaatacaaatgtttgcaaagaatggtgaagaatgagtttttttctgtctctggaaaaagtcctcatttctctcgtgcttttcaggggcattgatacgccaacttctcttcatgtgcgggcatggattaatcatccttgggcgaagttcgaccgttggattggtaggtggcattttttccatatgacatttaagggtgtcagatcgtacaggctggacctcctacgcgtgtcgtcccagagcctttcctttttgaatttcccttatccctagtcgttggatcatttggtcaggtacgatgagacacgcatgctctgtacgatagtgtgttgtgggggataacttttgacgtcttacttgaaaaagcttggttattaagtccgtagtctgacatgtataggtagatgtgaagaccgcttagctttaatttggannntagcagataattagggctttattatgaaaatcatttattaatattaaattaattatttat

SEQ ID NO: 47694 - DNA, 1156 bp, Cannabis sativa
caagattggcttgtaaatttagagatacatctttcatagcattatgatgttccaatctattttcatgagacatgagtagagcttgaactttcttaagagataaaaaaattacttcagaatgtgatgccaaagactacataatcaaactcaccacctacgccatttaatagttaaagaacaagattttgattacttatagcaaaaccaccaatggctagagaatcgacaagagattggactttatccacataatcagagacggacaaattgtctttttgatcatgggagaattggccttcaattgaagtaatcttgccagagattgacttgagaacttctattccaaagtatgccaaacaacaaagtaagtgtgatgattagtaatcgaggcaagaactacttcaatcgtggaggattgaagctaggaaggagctaatcacacgtttcttccattgcttatgtgcagaattgttggtaccatcaatcaagctttgagttggaagaataccattgaataagatttcatcaagaccatggccaattatcgttggaacaacttgagacttccaaaaaacgaaattaacacaatccaacttgatcgtgaggggggaataggaagattgagaatgggttccatataaaagaagtaaagtcagatgattgcgtagacgagtctgtagtaggtgcttttcccatttgagtaaagatcaaatgtgagaattactataactctattggaggtgattgataccatgtaaaagtttaactaactaacttaaaattagtaaagactaagaaatcgaagaagaaaactcgaagagaaaatgctgagaaaattaaccaaaaaatttagctcacaaaaatgagcttatttatttgtagagaaactaaatacaaggcaaaagtaacaacattaacttagttgagaaactaatcgtctttaccattagctaagattagaaactaatgagttttattggttaattattagtgatatcatatttattcataataataatacgtgaaggtaagggtgaaggtaagggttgtaattcaagtcataacacataaatttgatacaaataggattcgagattctatggattcgacacgatacaaaaattatgcaaactatgttcatattttataaattttt

SEQ ID NO: 47695 - DNA, 1639 bp, Cannabis sativa
tagtgtgaagctcagctgataaacttgtaacaatatgatggagatcttggattaatgatgagtttgattcttttttatcaacgaagaatttttgagacctaatccctttaatatggcgcttagtctctttctctctctctctatgttactattaaacccctatttatacttgtattttttttatatttggaatataactttaaatacttaattgtagtaaaactagttaaattaaagaatgtttcaaaacataaaaataaaattactaaattactaattagtaactaactatagtatactaaatatatttttgtaactaactagtaagtaataataatttgtgaggcttacgcctcaaacgcctcgagacttacgaattctaactagtaactaattatatactagtatattaaattactaactagtaactaattatagaatactaaattattaattagtaactagtcctaattttattgaaattttggcagcataacagctatcttgaatgctcctaaaatttttaaagttattaataacaataaaatacaatctaaaataatataaaataatcacaataatatttagtaatacaaaaatttaccacccatccaaccgcagtacatgtattcgtagaacttacttcactacaaatgaatatttaggatattcaaactcatttaacatgcatattattctacccatccgatcacaatacaatatatcatagaacttacttcagtacagatgattatttaagatatttaaactctactaagcattcataattaataaataatcaaagttagtaaatatataccttaacctagctagaaaccaatcaacactaaataagtcggttcctatagcaaattgacctcacaacttacgacacaatgaaatactacaaaattaaaaaattctttatttaactacttactagttatataatttataagtaagtagttactactagtttttaatgagtaactagttagtaacaaaaatacatgaaaaaaaatgaaaatttgtaacttgttaagtggttttaactaattatttactagctactaaaaaatagaaacacgtgaataaaattaaaaataaaaaaaaatagaattaatttctaaacttttgtttataaactaattttttacaaattaatttctaaacgtttttttaataccctcatatctcattctcattcacaatatttaacaaaactattagtttaaaatattcaatttatacatatacaatacataaaaaagatacaatacaattacaatatttttatacgtacacatacaatacaattacaaaatatatacatacaatacatattcaataaaacacaaaatacatacatatatatattattaaagtttagattttttaccttatttctaaaatctgaccaccaataccaaccaaaatctagctaccatgcaccaccacaataacgcaatcttaaaaatctagaaaactcctaataaaatttataaaatgaaaaataaagcaatttaaattaataaaattattagaaattagatttatactttaatagacattcagattcaacgatttttccaccaaaagcggcggccagagctacaacaaccacaaccaccacctctaa

SEQ ID NO: 47696 - DNA, 1043 bp, Cannabis sativa
tcaatcaatcaagcttcttttggtgttttgtgcattagagaaaacaagatttatgaccgtttagacgagtatgatacttccttatagttggttagtgaaatctacggtccaaaatttatgtctcgaatatgtctcacctcccacatatcatgcaatgtcatatttttagccttcattgttttgctaattatttattcatgatacaaatgatgatacaaataagatgccatgtaatgataggtgggacatgttagagttatgaaattctgaaataggtgagattttcttttgttaaaaaatagagaaaaaaaaaataatggacctttggaagagcaatagtaataatggcaatgataataatgatattgatgatttgtaataagatgttgctagtgaagtattgcattttctgttacaattgcaattgcagaaagcattttcttaatacgcattaatattgtaatgctgaatggtgtcatgcaatgattctggttagaaatcaaactgagaccatctccaatgcaaggtccaaatattgtgctaaatttagctcaaaaaactaacaagtgcaatatttgctattgtgtattggagcacaataggcattttatgatgcaaattatgacaaaaagtataatataattaatgataatcaatagattaaatattttttaaaaaaacaactaatgacaatattgtaattgaaaaatgtgtacgaaaacttatcattagtctgcaaaactataattaaaaatgctacatttattgtgtgccaaatttggcacaatgctatatcttgtgccaaatttggcacaatgttatatcttgtgcctaatttgacacaatgttatatcttgtttaaatttggtacaacttttagttgggtcaaatttggcccaagatttagcaccctattggagaactaattttattaaaaatgctaaaatataacactacactattttaacactcaattggagatgctctgatggggcattaatttcttaattctaaaaagagtgatattagaattatgtgatctt

SEQ ID NO: 47697 - DNA, 937 bp, Cannabis sativa
  modified_base (51)..(56): a, c, t, g, unknown or other
  modified_base (910)..(911): a, c, t, g, unknown or other
atttcttatctatattaataagtaaatctgattattttgaaatgagttttnnnnnnggcataaaacccaacactaagtggcttgccctatccaacatggtcctgtacttctcggctatcccgtagtacgagttagtgcaactaatttggacatggaactttgggtaccaactatccaacctatgtgaaatgcgatctatgagaaggggattccaagtgtaaaaattgtaatgactatctcgaaatgacacttccgaggggcgatgctctggagataatgttcccaagccacgcaatcctgagcttcctcattggctaggacgggaacctgctgccaagaagaatacttgggatatttataatcacaagtaaactcattgtcagtaaggagacccacagacgtcaagttgacctcgttcaaaagaaactcacatgaccgaaggccaaatggaagacccaacaggagcctgcgtcgctcggccatcttaagagttggaactggtctttgctagacaactgtcaaaaataaaggcaaaattaaagtcagccgaatcgcgtaaaaagacatggaatgatttaaccaagtcttaagtaaaaattacttacgtattatgcgaaaggtggttgtgccgattggggaaagaccaatcgtctagaagaagtcgcctttaaagggagttttatttggcaaatccacaatgatcttacgatcacttgtgtgagtccctaggtagtaaaaaaccccctgctgcattctttctcgcaggaacagccttgacagagtaaagatacactatttcctagggagtggggaactcctaattcaaaattctatacaaaaccttcaaacttgcgtgaattctgtatgaaatgggattcaattggaatggggtgttgggttttatgccctnnataaaactctttacaatctgattagt

SEQ ID NO: 47698 - DNA, 1558 bp, Cannabis sativa
aaaaaaaaaaaatttaatgacctagaccaatcaaggcttgccacgtggtaatttacttaacagttaatcaagtacctaccgagttccagaattataacttaagtattattaccgctaaaagttaaactagtatttatttaaaaatagaagttaaacataaatatttatacttcaaattactctatttaaaaatatagagttttctgtatgaataaatctatatatttatataaagttaaatttaagagtagtgatgtggctttctatatttttttttaatctatttttcatattttgtgagtgattcttaacataatgtacatcactctcaatttctttaatatacaaaaatctcacattattaaaaaactatttattggtacttaatgtggtatataaataaagcttttattttttcactttaatttgtcttgacattaatttttaatctatataggtaattgattaatattgtgtccattagttataacaattttctaataatttaatatcgtgttaaattgttaagaaaatttcattctaacaattttcttaaaaactacacattctcttaacataataataataataaaaaaataaatacatatataaaagagatattggcggctaaaccacctgaactttacagtttgtgacacataaccacaaaaaccgaatttttggcggctaaactacctaaatcctggtttcgttttgctctgcacacatccgtccaaaaatcacagttaagtgccacggtggattgtccacgtgtacgcacttatacgtggaaaatttttagtggtccacgtatttttaattttaaaaaataattataaatatgtaaaaaaaaaaattaaaaaatcttttttattctttttttttctctttttttttttctttttctttttctttctctttctctttcttctcgaacttcttcttcttttgccattctcaccatgctcgtaaatcaccaccgcctcttccacctccgaaatcccattcctattttcattttgccccaaacaaaaataaacgagcaaatggaacagcgaacaacctcagctcccagctcaggccaaccaaccccacctcaaactcaaactcaaactccccctcctccaccgcaggactcaaacccagtcccacctccgcccaactttaaccctgttttacagtctccgccgccgcctagccccgacctaactcagctgccgccatcacaatcgccgtcacctccagccgtcattgttagtcctgggccaacattcagtcctccggatcaggtccagccatcattgaataagtcttcttgaaaatttcatcatgccgactcttttatgggttaattagcaaattttttttttctgaccataaagatttcttgattcttggttcagtttgtatagaatttgtggagtatgaccataaagatttcttgattctttgttcagtttgtatagaacttggattggccagagcaaatggaagaagaagaagaagaagaatcaagaagaaagagaaagagaaagaaaaagagaaaaaaaaaataaaa

SEQ ID NO: 47699 - DNA, 1113 bp, Cannabis sativa
tgatccatgagcgcttagatagagttatggtcaacaacaaatggtggaatacctatgcaattgcaaatgtaaaacacctaagtagatggtgttccaatcattgccctctcttagtaacctttaaagccatcacaaatgatgataaaaagcaaccgccatggggatatagatttcactatgaaaatgcatgggctgacaaagaagaatgccatcacattgtcaaagagatttgggaggggggaaacactatacattcggcagaagagttggggagacgcattaatcattgtgggcagattttgggtcaatggaatgcaaaggaaaaaaggacagccaagccaaaattagagaactgaaaaaagaagtggaaatattgtctcgggatcaatctatacatggatttaacagattaaaagaaaaagaaagagaccttaatggacaacttgcaaaggaggaactattttggaaacaaagaagcagggcaatttggcttaaacatggggatcgaaacacacggtacttccatcaaaaggcttcttcaagaaggaaaacgaacagaatttgtggcttatttgacaataatctgacctggcagaacacaaaagaggggatagaaaagactatatgtgaccattttgtggttctattttcccacaatgaacccgaaaatgacctcataccttatcttcagcgttttgttcctttgagactaagtagcagacaaaatgagaacctccttcaggattttacagccacggaaatagtacaagcattacaacaaattaatactctaaaggccccaggtgaggatgggatgcctcggctcttttatgatcaccattgagatgttgtgggatcggatgtaactcgtgtttgccttgagattctaaacacaaacaaggattgcaagcctataaacaagacacttctttgtctaatccccaaaataaaaaacccgatccaagttggtgatttctgccccataagcctatgcaatgtgtgctacaaaattgtggcaaaatgccttgctaatagaatgaaagatagtttaaaggaggtcatttcagaaaaccaaagtgctttcattcaaggtcgtctcattcaagataacgc

SEQ ID NO: 47700 - DNA, 1313 bp, Cannabis sativa
ctccaataacaattcacacttaattgcatagaaattcacttcaacaatgaaacaactatgtcatcaatactatcctttttttctacaaaacaaagctaaaggtgtgcattggggtgggcattggatgggtttttccaagttttaggtaccgaacttgcctatgtgagggactgggttttcgggtgggtcaagtgcgggtgggttgagactgaatttagagttggggcgaaccctttttttctaaaaaaaaaaatatgacttttttttttttaaaaaaaaaaaatcataaaagcacataattttattttatttttttacatttttttttaaatatcactttgttttacattttttttttttgtttttaaagggggtctagttgtatatatataaaaaaaatagatttttcgggtgggtcagggtctgatccgagttttcgggtgtcacaatttcagagcccaatcccgacttagtggataactaggtgtaattcctaaaccctgtataattttttaaactaattttctttcatttttcgagtttcaaatcgagtgggtttcttggatgggtgaattttcaagtaagaatgtaccgccctacaaactacaaagcttgaattagtccatccagataaaatcttaactcaattcaattttattcaagcaactcgttctattttattgtatgaaaataaattccattaagagcaaatgcatcaccactcaccagtaatcattcatgccaacttagtttactatattcttcttctgaatttgagtgaaattacgaaattaccatttcacattaagaatagcctctctattgtccttctcaacatttattccacaaactaataattaattgaaacacaatttttattctcatcacaaccttgtatatccacctaatgaacacaccaaaaacacctcatctttgaaattactataaggtaattatgagttatgacaccaattttcatcattgcctattcgatataagtgttaagatatcatatatgaagtaataacatcatcatcaacaccatctattttttcttctttctttctcatattttcacttgtttatattatataagttaaaactaatcaacccaacaaatcattttaaatagccatgggcttagtataaacccacggaattgtaaatgcctcagtccaatttgttttaagttctaaaattgcattaatataagagaaaacaatttattttaatttgtatattttccctatgcaatctcgtggggtaaccaaatcaagtcacccaaatattataattattattaacatttttat

SEQ ID NO: 47701 - DNA, 3564 bp, Cannabis sativa
attcagcagtattaaggatcgaatttggaaactcgtgaattcctggcatgtgaagcttttctctataggaggacgggagattctgttaaaggcggttgttcaatccatacctacatatgccatgagctgctttagtctccctaaaaaattctgccaacaaattgagtctatgatggaaaatttctggtggggttcaaacacaaacaaatctaagattcattggaagaaatggagtcttctttgccaatctaaggcaaaaggagatttgggtttttgttcttttctccattttaatcaaacgctacttgcgaaacaagcatggaggatttttgatgatccaaattctcttttagctagagtcttaaaagctcgactcaagcatggagattttcttactgcttccaagggtactttgccttctcttacttggaaaagtatttgtgatgggagagaccttctagtcaagagacttcgttggaaaatcgatcttgggaataaagttcaatgtgcatccaatccttggctgccaagtactacttcattcatcccgtattcttattgaggagattgtgagttcactgatgaacattatatcacgcctgatcgtcaatgggatcttactcttcttgagaggcattttagaaaaattgatgtagatcgtatccttgctattcctcttagttctactccaagagaggataaattattttggcatcattatgataatggtatttactctataaagactggttatcacttagccgaaagcattggaaaaatgaatgattcttcttcatcttattcgaatagatcttggtggaatagattatggtcccttacttcaccaaagaaggtcaaaatctttgcttggagggttataaacaatgctattcctactgctgctaatctccaccattgcaaaatcacaactatacagcttgttcgctttgtaattgtcattgggagtcaataggtcatgccctcttctcatgcacgagaccaagtcaggtgtggtcacaagccaaattctacaatctcaatcccaatgtcaccaacctccatggctctgatattttctctacgttagtggctgctttcaataatgttgaactggagaaaattctatgccttatgtggtgtatttggacagaaagaaacaaggaattccatcaatctaagccaaaaccagcaaatgttatttgcactttgctgaaacttatctctaataattttacaaagctcaagtacacccgattagtgactctaggtccttggctaaaattcaaagacctgctcatgcaagttccattaataatagccttcgaaccccgattacatggaaaccaccaccacctggatccttcaaactgaatgttgtgcgccgtttgatagtgatggatcggttattggtattgaagttaggggtgaaaatcggtcagttatggttggttttttacaattttataactgaccggtcggttacggtttttattttacgaaaattgtaactgtaactgaatcgtttaaaattataatataaccgtaaccgtatcgtataaaaccgaccgtacggtttttggcagttttttggtttgccagttttggatggtttttgggggttttggcggtttcttggtttaactatttttttatttcaaaaaccgaagctgaccgccatgtcaaaaaaaccgaaactgaaaccgaccgccaaattcggtgatgaattggaactaaaaattcggttacggtctggtcggtttgatggtcggtttgatggtcggtttttggtttgtcggtttttatgaacacccctaattggagttgtcataagggattattttggagatgttattagagctttttctaaacctttgtgtggttgctattcagtcaaagaaatggaagtgaatggattgattcacagtctaaaatgggcccttgaaaatggattgaatattgatttcgtggagatcgatcattttcatgatttgattgatgatatttctcttttattatcctactttcctagagttgttgtttctcatgttaagcgtgaggctaatagagccgctcatgacttagctagattcactcttcgattggataataattatttttggttgggggaaattccttctccaatccactctattattgtaatggattctattcattaataattatagtttttttttaaaaaaaaaacaattaatttcttttatttttaatttttttatgtaatataagtactaacttttatagttttattttgtttataacttaattgtctaatattatactttcaatcataataaatgcagattcttcaaataaatcaattaaaaacaataattataccatttttgtaatttaatatattattttttttacatggagtcatttttgttgggttttgtgtcctaaataaaacttatttcaatatataattaaatttactaattaataaaagatcagaaattattttatattgcattgtttacatgatttatttcatgattatatgtttaatgtataaattctattaaatcatgaaaacaagacttaggattttctaattttctctcttgatgggggaagatgagaatagaaattggctcttgtttcttggggaccacaaccaatttataacctaaaagctaggttattaattttaagtatttctaatttagtccctcaataaattaacaatatcgcttagggtatctacacatttagcccatgacactttaatactcaatgacccacaattactaaaataatcactttattttgggtcatactttaaatagcaatacactaatatacatatgagcccatattgaggattttaatccaacaatctcccacttgagctacatatattttcagatagtgtgtaaccttataagcgcttaaacttttgctatcataattataggtattttaaaataatctcgtccattgattatactaacataggatcaaagcggctttcgcaacatttaacgtagctaaacccatcaatggtcacgtatatcaatataattaaatgacatagatcaatcatggatgcgtagcatggaaattacatgcaaatgtgatcttagcatgcctatttccaactgatcctccttaattgatatcaattctttattaattctttcaataatagaaagaaaatattcaaagtactcaaaatttaagttcatactttatctgcagaattaaaccataaatatgtgtcagcttgatagaacatctcaaatacagactcccactaaatcagcacaatcttaaacaataccatatctatacatgagcaataagctcctaaaaagccttaagtggtatattcttaatgatccagatcacacaaaatatggagtttgttcttagtatgttctattgacaccttatgtctctgaatttcattttaacaacaattagctcaaagtcaatgtgtcttttaaccttgtagagttcatgttgttactaaaatacaacctgattaatttgttgtcacaacatatacctttaatagcttttaataccattcctaatttt

SEQ ID NO: 47702 - DNA, 3401 bp, Cannabis sativa
tttttttttttttgtaattaaaattaagtagaaaattttcttgtcacactttgaggccttctgtgttttcctttccaagcatttttcaagaatagaagcaatatgaggtttctattgtaatattacatgaagaaaccatcatcgataaatagtgggtgttattttttttttatcaaacagtttatattatatatgcttatttcatgatcatttaatggagaatgattcatataaataataatatatataggtataacttgaagattgtgtttttgtgtttgaacaaacctcatcaatacaatttgcctaatatgtgtattcattctatgattagttgttggcaaacgcataacgcattttgattatattttacatatataggatgattatctattttatttgatgttttgcagcagagcttataatattatcgcggattatttttgatattttggtgtttatgtagagagatttgatctctatctaattagtgttagatatgaagtattatttagatatttttactatgtgtttttttggttttgcatatgtactgtttgattaaattctacaatgaactatatttgctttaaaagattggttattatgtgttttgatataatttcttagtggttctataacaagtttaagttaaacgcatgtgagaaattatttgaatttggtgtaatacttccctttttacgcacaatcaggatgatatgttgataacaccatagagtttgttgtgaattttttgtcagtctttacataaaatttgttctctatatatgtgtgtgtaagtgccattattgggggttaaaatggaacctttattacagaaagtaatctgtcaaatttgaagaggataatagctctggtgttgatgctctaatctaattaatttttatgaggtcttgggtttatcatatggagaagtttattcgttgaattttagttttaagttgaaaattataaaaatcatatcatcatttgttggaattgtctttacaagccaaaagtattattaaaatttttctttcttacttgttttaattgagattataattgtactgatgtagcaacaagaaacctttaagattggaaatgcttgcaggaaggaattcattataaaattgagcaaaagttgaaagagtctagcaagaagtaggattatatgatgttacaagaactcaattcttttttctctcaactaaaagatgaaggtgttaatatatatctgtaaattgtgatatttgaatgcatgcaatgttatttgaataacctcacatctagttctgaacttgcatttatttaacttttaacagtatatgttagtgtatattatatgcactcacgttacacataactgaagtcatattggatagttgcttggtatatttattttaaagtgatccatctagattatatttcctatatccatatatttaattaattaactagttttactacatatatgaataaattaatattatataaaaatattcaagtaaaatagttttcaatttcatttccaccaattacatatttcgttgctgttatattttcagattttctaccaatcacaggtttagttttttaaaactcaaaagcaatttagatattgaaccaatcaaaacatatcaatcaggccctaatcttctgcaacggacacgagggtctccctcctctctcctggttccccaaggaagaaatcccaaaatttattaacattaaatttgatggaaaccattgttgctttctcaaatgccaatcgaccccatgctcagccactagctgggcttttcaaaccgctcccttcttcttacttctcgttttttgcttcaacatcctctcagtgtcaaactttcttcaacaaacggagtatatcattatcattgtcatcactgacgatggccacgcctcttcaagcctctgcatcttccccaccattggtatatttttttttttaatttcaaatccatgttttgtttttgtttgttttagtgcaaagtttggagatttcctttacgtgggtaattttgtgctttattatttgttggtgaaggtgcaacaaatgacgaattgaaggtttcttctgctcgtttggttggagagaacgacttgttgattgttgggccaggtgttcttggtcgcttagtagctcagaaatggcgggaggtacatgtccttaactcctaaaccctgaattacgctaaatactatagtttgagttggtatagttcaaggctgtcaaattggattagaatatgggattttgtttgttttgagaatttggataacgtgaagtgtttaatggttatgtggttttgcggtgatattgaatgaacatatgtatgtattgtaatcaggaccatccaggttgccaaatatatgggcaaactgtgaccactgatcatcatgaggagttgattgagatgggcattaatccttctttgaagggtatgaattcgtccaacaaatttccttatgttatattttgtgctcctccctctcgttctgcggattatgctggtgatgttaggtaagcctgaaaatgttcctgtctatctgatgtggaaccttcatcattgttttaactccataaatgtagaacttgatatatcatatatggaccttagttgatgctgtatagttcatcatgtagttgaacttgaaacttttagcataagtttctcgtactcagatgtcctttatgaacttatgttgttggttatgtgatggataacagggaagctggattgagctggaacggtgaaggttcttttttgtttacgtcaagctctgcaccatatgattgcaatgacaatggaccgtgcgatgaggtagatgtttcttatactaagttatatggctttgttttcttcatctttgttcaccttttagtttaatagttttacagcttttctcggaaatatgatgttttgttttctcataatgttcattctcctctgtgcaggacacacctgtggtagttgaacagtttactactcttcttggaaatatggtgttttatcttctcataatgtttattatccttctctgtgcaggacactccagtggtaccagtagggagaagccctaggacagatgtcctcttaaaggcagaaaaagttgtactggagtttggtggctgtgttgttagattggcagggctttacatatcctttatgcaatttaatggtgaagattaaattgtgtaaagctgtagaactttcatgaatgtagaaaaatattgatatatttcctgtgaaattgtctaagtggagtgaccttaatcatacacacaaagcagatagaggtgcacattcttattggttaagcaagggaactgttgatgttcgtccagatcacattttgaatctaatacattatgaggtcag

SEQ ID NO: 47703 - DNA, 1369 bp, Cannabis sativa
  modified_base (1090)..(1102): a, c, t, g, unknown or other
tttatgatggtgttaatagcctttttataattattttaaaaaatttagataatttacctcactcgaatcagagtaaaattgttattttccacgtgtttgcaaaaaaataaaaaagaccaaaatgtaacaaattgtttgaaatttgattcttaaaatttcaaccataatccaaagttgatacaagttatttattcatttaaatattttcttaaaaattgaatgtaattttttttattaattgtgataaggagacaaatataatttaaagggtagtttatagctaaactctttgaacgtttaagtttgacacgatcaaccattaaactgaaatagttaaggttgaactccccaatctacaaaatcgttttgttctgtactccttccgtccactatcgtttgttaactcccctataagctccagccttgacagttctcttgcgtggcggcactagccatggactaccatgagctctggtcccgtaaacccagaaaatctctttctcgagctccctcttcctcaatctttctctccctcatcatccccataaaacccaattccctctccctctttctcatgtctctgtctctcttgctcttcccttccgttctttgtgcaaccatgacgacaaggccatgacagccgtgatggtccaaaaggatcacaaatccatgctccttaggtctcgaattccaaaaccctgagtttctccccccatatttttaattttcctctctcgccagagccgaagcttttcggctccaatttgacctctcggttgtcaacaagctaaaagaacctcgtttctagcttccttgtttgagagctttcagatcttgtgggtcatttttccatacaccacatttgatcgaagacgaccaccacgcacaacgatgctctgggttgtggtttcggaagaagaaaaagaaaaaaaattaaaaaaaaaatagttatgtgaaatttagcacaaatatagtatgagctaaattttatatcataataaatattatatttttttaggataaataacggcataagtactcaaagtttcaagtttgtaagtggcataatcccaatgtttatttttagcgnnnnnnnnnnnnnatgtttgtaaaactgtaattttccgcttacaaacttaaaactttaaataattatgtcgttattaccctattttttatttactctattgccacatattaatgcaattgataactttttatatttttatttttatatttaatatgatttttatatattttcaataaaaatttaattttttgttaattttttacacatttctattataataaagtttttttttactcatagtgtataagaacacaattataaaatttatgctaaaaatta

SEQ ID NO: 47704 - DNA, 2004 bp, Cannabis sativa
attaaatgaaattagacaaaagtctttaaatttaacaatctcaatacttcagggggaatttttaacggccaaaaaattcaaagggcataatttagctcatgtgaaagttcaagacaaaaaaatcctaattagccaattaaaatatacatcttcatcttaaatagttaattagagaaacaatttaaaatttgaataatatatatgacgatgcatgtactatactacatgataatgtttgggttttctaagaaaagtaaactgacttatatcggatataccttactcttccaaactattactattaatcatgtcataacaaaacaaaaccagagttaattaattattactaacattattatgaaatagtaatcagttgctcttcatgatctacatctagtcttgaaataagttattattacgtgaacattaggcacaggaaagtaatatatactagcatttaagcatgtgatgagaattattttcattctgtaataatatttatggaatattttggtttttgagaagtcattaataaagagggtatttttgtttgttagttagtaatgttatattatataaatataagtatatatatatacagggagagagacattttttttttggtgagaaggattaatagaggtatatatatatatagagagagattggatgtatatagtttaggtaataagattagttatgtgtgtatatgtgtggggttaagggggagtataggaaggaatggattagggtgagcacattttcccattgagtaaacctcactgacattccatatgagagataaacaagagtgtcctactaaactaacccacaaaacactcagaagacatgatgagtttctcaaaaccatatagagtcagatacatcccaacatcgattcccttttctcttgtattattatcatcacgccaatcagtagatcttcttatactttcaatataattattctccttcgaatacgtccatatacttgtgttagctatctcactttttattctatctctttctctctctctctctaaatgcttccaaaaaaaaactcaccaactctatggaatcaatctaattaacaatttcccaaatattgctcatttgtacatatatacattataaattatttataaattcactaggagaatattattgcatcacgatttttaggtgttatcaacccatcttgtgtttcttgttcaagtgtgtataattaagttctggcttttcgtcagtactgttgtccctatattaatatatatattattctatttatgtagttgaagtaaattaataatctatggtagatttagatatgtatatttatgtacagaggcataaaagtatgacttgtttatatatatccccctagaaaccttaacaattgctagggcataggtagtactacacaggagacaaggagattattctaggttgtttctctctttccatttttagatattttatagaactagttgttgactttattagggtttgcaggggaaactgtgggagagaaggaagggagaaaaataaacaataatggactaattttcagaaggaatttaagtcatacccaacaagtgtattccatttatgggtgataatagtattaatgatttgagagactttaaaatgtgaaagtgaaagatcgaagaattgagaaaagaatgaatataaacggttaaattaaaaatatacatgtatttactcatatatatatttataacaaattatttagagaaagtgagattgttttggtttgggttctcccaagtgccacatccgtgtaagaagtcttataagtaaatggttggggtttgtcttcttcgaggtcatgagttggatagatgtgagagtttacagaaaggtctaaattgtgaaacttaattagggagatagaaagaggcatattatagtggcagtgatgcacatgggcataagatgtcatttctctgttctttcaaaggaaagtcaatatagaattgagtg

SEQ ID NO: 47705 - DNA, 2363 bp, Cannabis sativa
  modified_base (1063)..(1063): a, c, t, g, unknown or other
actataaaatattttattttacatttgatttatatgagataatattgtctaatattcaataatatataataaataaatttataattccaaaaaattataagttatttaatttatcaatacttttaaataattatattaattatattttaataaattaaagaactaaatttagatattgtaagcaaaataattataaattttttcaaaaacaataattaattagttatttaacagtattagtcttaacatgtaacttttaaaaaaaaataacactaaactattaaatcaacaattaaagttatataatcacactttatagataaaaatattacaacacatcataatagcgctcggctcagttggggtgtactatatatacggaccttggtagccaccacctctttttttcgactgtcgcactacttattacgtactattatacgtataatacccatattacccttctctctctcaaactaattaagatcaaacctagggtttgctaggtgagtactatatatatatgtatattacaactttatatatatactaaacaactttatagccacagttgttggcatagctaacgagtttagacaactcagaattagagagatcaacaaagccatcgttatcttgatcagcatatttaagagctcttgcacctctaaatctgctgcaatgagatccaagatatttgaaagcttctttcagctctctcttcgaaagcttcctatcattatctgtgtcgaacgttttgaaagccattgttaactggtcatctctccattcaatttcccctacttttggctgaactacagacgattcaaagcaaaaccccatattgtatataaaatattttctttcaatatatatatgtaacacctttaagagagtaaacaaaactattcagagctagcccatgggggttggtttatataggacttaattgttggggtgtctctctttattttcaagatttttttagtttttattatataataagttagtcatgttttttaggggcttcttcattttcactttaaaataatttttttttttntttttttttgcatttttacggaaactcgtatagaaactcctattgcaactagcgctgcaaccagtttagaaacccaaactgtaaatttgaaaaaaaaaaaataaataaataaaacaacagtatggagtaattaccctttttcttattatttattaaattaaagtgttcttaccttcttcggtatcatatctctattggtgtaattaaatatcgggttttatataatttaggttaattaatttttaaaaattatcgataactaatcgtaaaacgctatccataaaaattgttgggcacttccaatagccatgctcatataatattggtagtgggtacgtggcccctagctagagagagtgttgaaatgattcgatcctcttgcaaatacaaccatgcacgtgaataagttccaaatatattcatttattatagtgtttccttttccaaaatcaggataagagtagacattatattactatatattccttcattttttttgagagtgagatttcagaatcctatgatcgtaatctatctatctatatatatagtgaatattaatatactcctcgtagttaattaaaagatatatatgatcattattttattgctagtataataaattcattactataattattccatgtttatcataattaattaaacttgtcctgtttgtgatatgttggacataattaattttaatccttgattaattaagttctattttttatgtgtcccatcgatcaatccaaataaatggttcttatagcttttttcttccatttatattcttctgtctctctctatgtagagagaggtttaattctattccctttataattatgttctctactaaagtaacaagaataatgaagattctttgtagtctctagctattagacttaacttcagttaagttagttttatttttggttaagttagttggaatatataccatagttaggttaggttgttagaaccacagttaagtattagtttatctaattaatattggtctctttttacctatattgaggcactgtatgactgcttcagtataaaaacataataaagaaaaggggaaattatcatatatactatttttttatttatttttaaaaaaattatagtttattaggtttttaaaatggttgtagcgctagtcgcagtaggaatttctatacgattttttgttgcaatttagatcgcagcgctagttacaataggaatttctatgtagaattccgtaaaaacacaaaaaaaaaaaaaattgttttgaagtgtgaaaatgaaaaaa

SEQ ID NO: 47706 - DNA, 904 bp, Cannabis sativa
attgcacataaaaacgatatactattgtgcaacatgaatgtaaagactcaagtacaaacaatttctatactatacctagctaccttccgagtttttttctctctgtatgagagtgttggaaagtccaacttgacaaccatgtctttaaccagaatccattccagtgttctatgttttttaagagttgactctatttgctcttatctatatcaaacccttctttagtcttttgatatcttttcaagttaaaagtcttttccttgattccagcctttcctattccttattcccctattcctttatttgttccttttgctgtctcttttgtatactattatgggggacaacattgatgtctcacgtggtccaacttcggtcggcatagaaccttctcttgaaaatcctgaagtcattatgaacattgacgactcccaacaaccttccaacgatatcaatgagggagttaatgctgatgaggctgaggaagggtttgttgagccgcctcccaaagataataatgtcaaaaccaatgaggatcttgaggccttgcgtaacaacttcttgtagtcaatgaccattgatttggagccagctttcgagctcacgactgagattgtccgcacgggagtgctagtcaattttttcgacgtcaagggagtttcaagatctaaacttaaagaaatcctcagtcagatatggaagttaaaaggatattggaagttcaagactttgaaacccggtgtttggggcattttctttgataaagaggaagattgtgcggaggtgcttcagaatagaccgtggatcataaatcggaagctactcatcatcaaagaatggccagaggatggagattggtacaatgcggatatgcgtaaagccattttctgggttatggtatccg

SEQ ID NO: 47707 - DNA, 1161 bp, Cannabis sativa
aaaacagcctagttatgaatcttaatttttatacgctaatacatatacatattatattaaaaattatagtgtactatgaagtatgaacattcttgccagctgggcatttatttaataattttagagaccaaaaacatgaattacagatagttcacaccaaatatgggtctttatgtttcttttaatgaactttttttcccctgaaaatttgttttaatgagtttattagaatcataattcgtaaaactataccaactttcatttttattatttaagattaaattaaattattttcttcttttcatgaattgtttttattttctgcgtttatgcgtcacttagttctcaataaaatccaaaatgattttatattttatagaaaatagttttcccaaaaaagaatattcaacccacatatattatttaatattttgaaaagggtacatacccaatattagtatataattagtagtaacacaatctcacatatgattctaatttaaataaactcttcaattaagattaaaaaggaaaaaagaatatatgattgaaaattggaaaggaaaaaaaaaagaacagagctaataaaaaccaaaattccctttaaccattaatatttaaaaaggtgacgtaaaggagaattatttaacaggaaacaaacagaatgaaatagggaaatttgtttaaaacaaaacaaaggaggtgaccttcatttccaattccaaccttgacacagaataatgatttgatattttgattttaatttaattttggtaaaaataattaaaaaagaagctgaagcgaaacgaaagtctttcatcaactaactcaactctatgacccaaacgaatcccttatttcacagagcacgtgcatctccactctctctctctctctggtatgctcaaaatcaagaaaatacaattacaaaaaaaaaaaaaaaaaaacccaaataagctttccctctctcgttctccattttctctctctataacactctttccagaatccccaagccaagctagagagagagagagaggagggagaaagcacaacgaaagctccatgtgacgtagagtgagcgtgcgatcgatcccaaatgcacccatataatcggctgccgagcagtggccacaccacaccctcgccgccacagtcgcc

SEQ ID NO: 47708 - DNA, 2888 bp, Cannabis sativa
caaaccaaattcaagagtttttcaattaaaaattcaagtgtttattcacgagaaattcaaaggtaaccctaattacttcatctctttaaatttcaaagctttggttgggtttgggttaagaatttgtattttttcttctgttaggatctggggtgtttgggaatcgttttgagagcttgtttggagtgggttgttgatgattttgttagtttttgctagttgggtttgagttgaatttgagtttataaactcaaacttagctcaataatgatattttttttatttcagaggatggatgatggtttaatgcttgaattatattattgtggcttaattgggtatattttggaagtttgaatgtgaattgggataaaattgaacttggaataaaagtttatgtgttttctgcatgtaaacagttaactgtttttgtaaaaacaattagtcatttgttcatgcagaacctcaagaaatggtccactatttggggatccggttcaccagttggggtagttttttgggtgcctcagttttttgcattttatcgatatatatttagagcattttcacactatttatcaatagaaaaatgttaagttttgagtttaagtccctgaaagtgatttagcaagttacttaccagttttacgtaattgtggcttaggacttttaatcgtcgagcaacagtttccactcaagttgaccgacacatctaaatttaaaatcgaggtaagattagtataataggtatatatgcgtacatatttagcttacatgtttttataattgcatatcagataacatatcaagaagagcggtactaatgtacatatagttacaatggataccgacggatatatgttgggcaatttaataagtatggattgatgctatcacatcaatacgactagagtattgagtataggctgatattatagtcaaacatactatcgttaagaatgttcgagacttttttgcgttggacgcgagttaaagagtcgtgattaagtctatgagcaactagttatggtttaattttatgtttatgtcttatgcttttcttattgagtttatcaactcacatatatgtttacatgtttaggtaagggcaaaacaaaggctgagcaatagtgaatccatagttcaatgattattgttcatatttggacagttaggcctcgagtgttcgaatctttgtgacagtttgagctcagattatgttagtcgtcgagtaacacttttgtatatgtaatattttgattattacaatttagtataagagccgccaggttgtctttcaaagtttttcaagatatgtacaatcatcatcagagataagcttaactcaatatgacctttacatgttttagtagctttaattaattatgtttgaatagaaaagcatgttagtagtttggtagctgaatcgaactttaagttcccatttgtacggtagttagtttacaattttaatcgcaacctgactgcaacgccctaactcgtaaagacgccacatgtgtacttttataaattaatttataataataaactaataatttgagtaaaattgtagattaattaaaaatcttacaaaagtattacaataatatttttattacaaaataattatatctatatatattcaaaatactgtaaactagagtctcgtcaacaaggcattacatgtcggttgagctgatatgtatatctatcaagagaagacttctgactcatagttgtcataacttttctttctccttatctccaccacaaagcatccgtgagttacaaagactcaacaagaaaagcagttttacaaaattatttatgatatacagttacaaccaataatattcatataatcaactacgtatccatatatttaatccaagcaggaaatcccaatataatataaatttaacattcacaacatcaagtatttgtttaataaaataacctattctcgttacttcataaagtaataattaactctcaataccaaatgaaacaactaatatcactatcattgcctaataagacaatcaataagtaataagcctaacagtggtttcaagttagagtaataaatttttcttacaagggtaattatcatattataaattaacatgctatgtggtacaattgactttgaaccacgaatctaaattcaaatgtgttggccaacatgagtggaaaacactcgacgatcatggtcttatgtcacaacaacagtaaatcaaataaataactcatttactcacgttctaaaacttaaatagaaaattagaaattttagcatggaaataccttaaatatcgataaaatacgaaatctaggcaccttacgatgaatttaattgggaagtatagtggtaaaaagaaggcaattcgttagctcgggataaggtcaaaaaaatttttacgatcccaaattagaccaattgaattctatatgctttgctttaataattatttagaacggaaaaatctattatataatgaattattggttctaaactatctctgacgataaattaacaatttgaagtagtcttttaaacaggatgtactaaaaatactctaaacggttcactgcttgcctagtttcagactagaaaaatgttttattgtttctacacaaatggttatgaactgtttcctttgcataaatggcaaaactcaagttccacttcttagatattctcccaaattcaaccaaaatctacttaacttaacaaaacaaccctaacatcaattttaaacataaaccataggtcaatttacaattccacaaatcatcatcagagatcaagcttgagttccatgaactcaaacttaaactttcaactataacaacaactatctagcatcaaaacaatcacaaacaat

SEQ ID NO: 47709 - DNA, 1382 bp, Cannabis sativa
gataatcaaggcatacacaatggcctaccctcaataaaattctcactatttaggaagatgggtaccaagataaaatggatagtgctaatatagataagtaaaacaacgaacaatcaaatcaagacaaaacggtgaaactaaaacaatacccgtaaacagtaacccattcttcttcattgaggttagcagttggcagagtatttctctgcatctctggccttgcaacttccctagggggtggaagggtgatcaaagcaccaggctggacaacaccctcaacaggtgaactctttcccttcccatcttgctcactgccactctttgaaggtgaccaccaactaaaacctcctgaaccctgttggttttgctgtgcactcatcaaagcaccagaagtgcttgcctctgatttgttttttactggagttagatagtcgtggctagaactttggccaggagatctgggatctgatctgacttcaggagaaactggataatctggaattcctgattcaggagaaaaatctgagcggtcttccaaggtgaaattcggaggaggtggaagatctgagcccccaaaattctcacgccacaaagcagatactgcagctgcctgacctgaacttgaaaattttcctctccgggatgaaataggtgaagccaaatcttggaaaaacaatgactgcctccctgatttgggagttctgtgtactgtggtactcattctattactttgaggaaactttgtctgcaaagcaaatacaaaagattaagcccaccttcaagtttccacaaaaaagaaatgatttctttttggcaaataagtgacaaaaaaaaaagaaagaagaagaagaaagcataattatgactatgagtatgacatccaatttttggatgtatgctttaagagagtacttaatgaacaatccagaaatctagatatttcattttgtttcggtattcgttgcagcatgttcatagacaataagtaaagaaccaaaaatgttagtttagtgagtaaacactcctaaactaagattatattcagtaaacgggagagaagataaggattagggaaagagctacaaagcctaagggaggacaaaaggagagtgaaggggaggactaaaggagagtgaaggggagaactctttctttgttatgtttcggtataagaagatttagataatcaattcaaatatgaagacagaaaagattaaactgatcaatcccgactccccctcataaaaaccaataaaatgaaacaactactctattccaaatccatacactaattccatcatctcacttgctccttccatttctccatcctaccaaccagactctaaaattatagcaaaaatccagattataattcccttcca

SEQ ID NO: 47710 - DNA, 4267 bp, Cannabis sativa
ccaaatatttaagataacaacccattaaagaatccatatcacaaacacttctcagtacaaactacaaaacttcaactaggcccactactacaattcgaaaatttcttctcaatcatttatgtgattatgatcattgaaaataaaatacgaagcttcctacactaatatgcgaaccttcctccctcgtttgaaaaaacaaaaattaattgattattaataataataattaagagtgtaatatgcactacttgtgtcaattggataagactgaaatttagagttcttataatttgtgtggattgaatgcattttttgatattgaaaaatatgagtgcacatcgtttgagttgtctttattacacataaccaatatttcggagtgcttatgtaaattgagaaaattacacaaaatgtagtaaaatttcaaaggtgatataaatatagcatttttaaatttgttcattttatatagcattagttttctagctttttacatttttaaaagaccttttttatttcgaactttttgcaatattgttattgcttttcaataacatcttaacagcagcaaattaattttgtattaatatattggtaactagctaccacttgggaggatccttgaatcgctcatagaaaagatttttctcctcgttctaatgattcctccactattgggatgaacaaagttgtcgagcttctgtttaataatggcagttggaatatccccaaaataaacagtcttttcgaccaggagactgtttctgcaatcttgaaagggggtaatacgtctggccagggcaataatagatgtgtttggactttggaatgtaatgatcggttcacgagcaaatcagcttatcttgcccaagctttagatagggcgcctcactgtgaggtcgctccttcactctggaaaaagttgtggaataataaaatctcagagaggcagaagattctgtggtggtgtatcttgtccaagacaatcctagttctaactaagatctgtaaaagatttcctattgtggatgttaaatgccccctttgtgggacagaggatgaatctcttgaacatgtgtttctatcctgtaatgtgacttttcacttgtggcggtcctctccttggcctatttgtggtacgggcatccagatgtgggattgggtcaaatttatttgggacattagaaacaatggcatcgatacagatgaggtcttcgtttatgcttcgtttattgttgataccatctggcggatccgcaatgataaggtacacaataattgtccaattaatgtaattaagtgtattgacaatatttgttcttcttttgcaaatcatcatgcttctttgttcccttgctcgtctccgagtttggcagatatctggtgccctctccctcaggattggctaaagttgcattgtgatgttaaagtggggttggcagcatgtgtgctgctattgttgcaagggaccatctcggcaacgtgatctaagttcatacttctagattagagttttctgatctgttatgtggagaagcggtggcttgctgcaatgctctggatattgcgatggatcgaggctttaagtttattatagtagagagtgattcgagagtagttattaacgctcttaatagggaggagtctcgttgggagcttgagaattatgtctcattttgtattagatcctctacttattttgttacttgtgttttctctaatattagtaaaaactgtaattttgttgcccacaatatggctaagggggcgtttacccaccaaaggtttggttgtattccagtttcttctatccctgaatatcttttttgtaacgaccgcaaggtctaactgttttttgtctaatctattaacgctattcaaaaaaaagctacaactttttctttatctgttttctagtgatgtaatggcattcagtcaccacaatgaaatgaacttttttatttaatgcatttagtaaggaattatttcacaaatacataaaaataacaaaatattttataaaaatacggttgtatagagttttaatattttgtggtttttaagattttatttacaaaaaatatagttttttgatattttcatgttattctgatattatattcttgttattttgttattggttttttattatttgtatattattttgagtaaattacgacaaaactcctaatactttcacttcactagcaattaatctccaaaacttaaattttggtagaaaaactcccaaacacccatattctattagtagattaccatttccatctattttttgtgttaagtgccatgttggagtgtcaatgtagacaaaatatacacgtgatacaattttatttgtccagatagataattattatttaaaaggaaaaaattaaaaaaaaattaaaaattaaatcttttgtctttctctgaactttctttttcttttcgacttttttcttttttccatttttttttcttcatcattattcttcaaaactatcatcaccaccgccaccatagatgcccaccaccaccttaaactcttttatagaaccaaaacaaccacatctattctcacctccaccccaactcaaacacaacccgagaaaatagatccaaacacaattccacaactcatatcttattaggtcattttttgacaatttaagttgtcaaaatatttctaaattattatgaatattttatgtgaatgaaatattatgtttcttgtgttaatcttgttttcatgactgtaattttcttttaggaaattttgtataaaagaggaagaattcagttttttggaaagtttgactatattgttattgttatccatgctttcacacatgagatatgtgacatgattaaaagacaaagtatattagcagaaaggattaattaaaataactcacaagacatcccggaggggatatctaggcaatcgtggaagtgtgcactagacacccaacagaatgagctatttgcggataggtagcatctcccggacctgaagattagttgaagtaggctacgcccagatggaaatcctttaagtgatggaccttgagtgtgatagcagtctcacaggtaatgaccacgtcagcgccatataaaaatcactctatagatggttacacatttttctgatacaagatcaaatcttgtcccccatgtcgggccatggtagtgcgtgtatgcacctctagacatgctttttgcccaacaacttggttagagagtatttagcggaggagagacctttgcaagacacgtgtcctagttcgtacaaaattcctcactgtacgccacacaataaagaaggttcttatcaaccaatggttagatcgtcctattgtaataccggccttggcagtgggtagagtacgaaactctaggtgaataaagggtatgccctttaccccatgtgtgcctataaatactcctattttctacgagcaagggggaacaaattttatttgcagacactcttctgaaattcttagagagctttcttctaaaatgagaaataagaggaatacaaagttcattattgtaaacacttgcccaaggaggctaataatatggactcgtggactaaaatcattaacgcttgaataacgtaaaaaattcaattgcttatgttaatatcttttaatttcttaagctctctttaatcaatttctagaaatctcggtaaatattttggtgctttcattgagagatgaggaaagtttagtaatcctcatcatgattcaaccatggtgtatacccaaaaaggctctagtaaaaaagttatcctagatacagttatggaggaagctgactcccatgccgctgacccccgagcaggaaacgatggatagggcgcaacccctgctgagaattgagaaggggataccaataatgttggcgataatcttggtgatagccaaaaccctggtggtgaagaagaaggagatggtgacaatgaggaatacgtaaaagatgggtattataaggatggttatcactacgaccatgaccctattctgttacaagtagtgaaagaattagaagatactcaggaggagttagtagaacaaagagaacttactacaaaaatgaagaacatgatggaacaacttcacagcaagtttgacgacttggctgagttagatgaggaagtcttggtggaagttgtagtcgaggggctgttgggttttatgccctaaataaaactctttacaatatgattagttatcaatataaaaaatttgaagtgatt

SEQ ID NO: 47711 - DNA, 2309 bp, Cannabis sativa
ttactcattctcacaggtactctagtactaattcaaatatatatatatgatcatctaaatctaatcagtatatacgttacttttttaacgttttgaataagccatgttatgatggatttgtatatatgtttcttattttaatcacaacataacttaacttttgttattagatcatttttagttacaatataaaaactaatttatactagaaaaatattaataagatacaagttatcctaaatttcgtttttaatggtaatagtacttattgttaggactaaaacatatttagtgtcaaatttttttagtaaaaacacaataaatatataataatgagttcgtttgttacgcagcggtattgtatagtatagtattatattaaatcgtattttatgtcatatttttatgtaaaactatatgtgatattaatttttataaacatttaaataaataatattatatttaatatttagtataaattaaagtttaacataaaattatataaaaatatgatatataatccaatttaatataatacaatacaatgtaatacgatctaatacgacgctccaaacgaacccatatgttttaatcacactttttttttataactatgtatgcttgttcagaacatgaaaaggaccctctaaggatcccaacaagaagaaatatgctactggctttgaggtggctggtggaaggcagccgcgccggagactcgttggtgttcttctactccggccacggctcaaggcagcaagacaaggaccacgacgaggctgacggagtcgacgaaaccttgtgccccaccgattacgaaactgccggaaaaattgtggatgatgagattaatgccaccattgttagaccactcccttatggtgcaactcttcatgctattattgatgcttgttatagtggaacagtccttgatcttcccttcgtttgtaggatgaacaggtataattactatataaatatattttaatgaatttaaaatggaatttacttaaattattaaaaaatatgtgtgatgatctatcactaaatataatttttgttttgtatgaatttcttagttaaaaatgtaattgaacatatttttcatattttgacctctttattttatatcccggccttagatatactttttatccttgcttggcccttaggcttgtttatattttaatttaattaataaagtaataccaatattttaactaattcaccgcttctaaattttgattttgataattattatatatacatttgttcggtccggatgtgtattccaattgttaaataatggcctaagttataccaatttttttttatgagttaaccaaaaataattttattttaaattcaattgaaatgtgtccatttttatgactccattaccgattatatacactcacatgctacataagttagaattgagtggagggtattgttagaagatagggacataattggtagagttgttgaagaaaaaaagtagaaatgaaaaatatagaaagagggggtaaaattaaacacaacaacttaaaagaagtatgccatctaatttcctcttaaataattgtaaagtgaattaaacaccattgaggtccaataataatgtataaagactaaagttggcatatatgcaatttgactcctagctaagtctgtttggcatgttgttattattcttttaattttcattaatattctttactcgaccctagtatgtatacataaaggatcgttaaatatatatatgatttgttatttgctaaactaggtgattatagttatgtaattataataatgaattgattaataataagcagagatggattctacaagtgggaagatcagagaaaccaatcaatatacaaaggaacaaagggaggagttgctgtgtctattagtgcttgtgatgatcatcaaacctcggccgacacagatgtgagtagtagtactatatatattattattagtatatttatatgtatgaatgagtagtaattaattaattaaatgaaggtgcatgcaggctttaacaggaggaaatgcattggcaggagcaatgacatacagcttcatactagcagtgcagagcgaaccaggactgacttatggccgcctcatgaccgcaatgcgtaacaccattcgtgaagcccaaactggcatacgcctcaacggtcccattgctgctctcgttaacaaaattctacgtacacaattatcacaggtaaaatataatttggattttttttctcgaaaattttgacatgtaatcatgcaccctgaatttttttggc

SEQ ID NO: 47712 - DNA, 1715 bp, Cannabis sativa
tgtggactgtataaatgtttaatggaccggcccaaagtatttttgtaattctttttccttttttgtaattttctgtttttttcccaaaaataaataccaaaatagtcaatttagaaaaaattaatttattggaggttaaaaattttatatttagagttcaaataatattgccgtcaatattttttgttatattatttatacccatatatggtatatatagtgcacacataaacccaaagtagtacaatacaaacttgagtagtacttagactttagtatcacctcttcacaaaataattccctactacgtacgtcatgttagcattatatgtatacagtttctttctttctttctagtgtagtggttagaagtggttagaatttatttgggccattaaattcatataaattcatatctttatatatctttatatatatatataaatatataatataatgtatggagagaaagaccaaattttccaaagtaggttcatcttagtatattttccgtggtaccaaacatgaaacaccactttagtgatgagttacacacttttggtcatcacttttctaagtcaatggattgagacaaattgggttacactccaaatcaaatttataataacaacaaaattaagcattaattaattattaattactaattaggcacatatatatatagagagacaatgttttatatgttggtgagtccattagtaagagcactagcaagagacaaggccgacaactcaacactagtaagaaatttcttatcatcatcactagctagtagtactaattttaaatctttacacctaaagaaatttatattaaaaaggagaaaaaaaccaaaaagttagactaataatcttctacaagagtaattaatgtgtttgtgatggtcaccatgattaaatgcttcttattaattcattcaaatttcctaattaaactatttagtctaatatacaaacttcttttttggaaatggttctaggatttatctacactcatggaaatgttatggtatcactatagtgtcattgagtatacttcttgaaaatattatgtactatatatatatatataactatagtagtcaatatcttgttggattaaaattttattatgggcacataatgtatatgctattataaagtatgatacaaagttaaatgactaattatgttataaatattaaaaaaatattaaattgacatgaagataatgtgtagataccataagttgatttataatttattgatgggtcaaattataaatacttataactcattctatgatgaagctataaatagatagtagtccccaaaaaacactaaggttcctgtattctctcatttcccataaaaaaagaatacttcaaagaaatatgatattcttgaaagatcataacctctgtgcaatcttcaacaataattttaggttagggtttcttatagcacttttgaaatataattagatctttgattatttgtgtttcttgagtattttataaatcctaacatatgtaaaacaagaggaggaaatttttatatagttatgttatgggctttcaatacagtgtgtgtgaaaaattgtttttttttttttttagaaaaaacatgtattttatgaaaaaaaaaattgaaaagaaaaacgagaaaaactattaaagataatcagtttcctctatattttttaacatttttttt

SEQ ID NO: 47713 - DNA, 1952 bp, Cannabis sativa
cgtaaaaatataaaaaaaaatattctttaaacgtaaaaatataattattttacaaaaagaatagtgccttatgtaattaacatttttttttatatgcttgagaatttttcatcaagcccaaaaataggttttgtagaaaagttgttttctgtcatcagcctaaatcaatgattcctaaatggtatattctcaatatttaattagtaaagttataatggggcttataaatacattgtaattatctacttaaacacctgattatattattcttccaaagctagtagacaaagagatgtgttacatgcatgagtgaaacatacaaggagcatctatagatggtcaaaccaagaataaaaatttatatcccttccactacaagaaaatagtatccctacaaatacattaaacatgaaagttgaacctcgttagttaatatctatttctctctcctccaatgaaaatttctcactcaaaagtattttgtagctagtttatggtctgttcaattctttcccagcatccattttcctttctccctctgagatttgccaccatcttcagattatcctatttgtgctcaataattaaggtaaacattgtctcacccttttcagaaactaaacagtttttccacacgtatttaggatgtaattctcttttgtatttaggtagcatttggttgcaaaaaatgaaaatataagaataagaatttgaataggaacaagaatagaaatgaaagagaataaaatttaaaatatataaaaaaatattaaattttttcatttcgtattcaaataatcgtcattatttcttttcattttaaaatagaagtcattctccgctaaaataataaaaaatttatttcattgaaattatattctaatactttgaaacgcaactaaagacatagaataaaaattatttcatttctattctaatttattacctccaatcaatcagcatgttagtgctttatataaaatgtgagtgtgaggttaagatatcaagataagtcaatggcaagaatatatcaaactaaattggtaatataattaatgatatatatagggagcattgttattggatatagtggtacttaatattttttataacgtggaattctatgatttgttagcgatattttttaaatgttattttcttatgttatatgtgattcgatacttaattacaccaataatagtatgacagaaaagagtgttagacactactaataatactttttagctactcctatttatactagatagatgttacgtgacaagtcacgtatacttaattttattttaagttttagttatgatcttttttttccaactgtcacatgtaattttaaaataaataatgcttaatatagagtgataattgttgaatgaatgataatagtttaaccaaagagaatgtataattgtgtaatattttgaagaaaaaaaatattgtgtaaaattttaagaaataaaaattaaactcaaaatattaataaaaatatattaaaagtaataataaagaatttataaaattgaaagctaaataatgaataaattgttgatataaatatatatttaaaaaaaaaatcaatcgttaaagtaaattttaagaaaaaataactaaaaaaaataaaaaagttttaattttctatcgacttaacatccaaccaaattgaaaattaatatttacttttgggatataaggagtagaaaaaaaaacttctcaaaacagctatgataatggaaagtcaaatgcaaaattgatgggaatacaattacaaaacaaaaaattaagcatattattgactgaaaactaaaaggaaaaaattattaaaaaaacatataatggttttcaaaagtaccttttggtaacatttttgtttttcaattttttaatcacaaaataaaagtaaaaaatctgttttttaaaaatttatttttgaaaaa

SEQ ID NO: 47714 - DNA, 1113 bp, Cannabis sativa
aataatatataaagatatatagatttttgtatattttatttaaaatgtataattttaattatacttatatttttttcccttctcatattttcaaaacatacatctataaaatagacaataaaatatatttaaaattttcagacaaaaaaatagtatgaaattttatgagaatttaaatattataatatatagttgtgagtaaatattaaaataatatggggtacaaataaaacctcttctctaatataaattcttcatatatgtctttttctataaatactaattttgccataatattaactattgttatttcacattgtcaacaattatgaattattgtcgttgttactatttacatttgatagccttttaactatcaaaaaagtatcgacgccgggagtaatgacgacaatgaataattgtcggtgttgttggctacatattatagcttacaactcttaaagcttatcacttatatccaacttaaatactcacatttaaagtccttagaagctatgttaccaatatttcatctagacttgagcattgatgatccaactatatgacacaattattagcatttatttttatttattatattaaaatagattaataaattgtacaaacaacagtcttggttattattgcaagaatattttacgcatacatatatccacataatacttatattatgctcaacaataccatttttatttttttgaaacggaaaaattcattaaattgaaaatcaactattacagaaaatcaacaatacctcttctcttcttgctgtagttggccatgactttgactcggtcaaagtaaaagccaaccttcttatttgggttacgaagggtgatatttaaggagagcttgtagattaagagcttgttgtggccggagttggcggcggtggcggtggagagattgaattgtgtgagtgaagcgttagtgattgtgaatttgggttcttgaggaagaaatatgagggagaaaatgaagaatgcgattaggaagagaatggtgagacaaaaaatgaccacaaagccgcacacacagcatgagtggcataagtctctgcagtactttcttgcgttcgcagctgccattaat

SEQ ID NO: 47715 - DNA, 2462 bp, Cannabis sativa
actaattagtttgattgaatgttgcatgtattggatttttagacacctcatctaccatctgatctgatccaattgaatatttaaaaataacatccaatctaattcgatcacaaaattagatattcaataattgatggtcggttctctcattgaattgaatcaatttatacacacccctatttttgtttgagtaatagtaattaaaaaatccttattgttaatgatatagactataattgttaaagtcaatacttttttgtgttaggactttttttattattaataactctatttagctataacatttttgttaaaatacaattaatttggtcacaagactattaatattacatagaagttttactgtaaattattattttaatggatagctagtgtcttaatttgatgattttatagaaaaatattgcaaatgggtcgtctatactatatataggtgaaggtgaaagattatcgaccaccactacaagttatatttagacgtctaaacataatatgcataaattaattatatatatatatattgcattgaaaatatttaaagagctttgctagatttaatattaagttctctacccggccatcacaatatattttgacgagtggaggagatcactagggctggggggccctctagtctagctcttcttgttttcagaaaataaaataaataaataaattttccctttacaacgaagaaaccttcctttgtcctaccatgaattcatgtctttgtccccatacattacttttgtaacagctaaaaaatgattacagtagtggcaaggtactattatgatggtacgtacgttacttgccatatattatagacatatataacaatataacgataagaggatcattaatgatcagaaatatataatctggccggagaaggattcaacagacatttttgtccgacgattaataggacatcaccaccctcagcagtgtttgactcagactcctctcctagctccatacccttctatctcttaagtcttaactacgtgtataatgtcgcattcaacgtattaagggattgactattagtccatatactattaagcattgaaaattggatatgggtgggtttgttggttggttattacttggtcccacgtttaaatatatattcaaatataggcacggaattatatattatcctatattttattccttcaattgtattgcatatattactagcatcccttctctatccctagtttgatttttttgacattcttttaggttatccataattgaatatttggtatgattttttttttctttttaaagctctaaacattatttgatgtgaaaatgaaattactccctaaaagtattaatgaataatgatagattctaaaaattcccttcaattgtaaaaaaatagtattaaaatgaagggtaagtctatattcaattgtaaaaaaaatgccactaaaataaaggataaatgagcagtacattttggtagatgttttatttaaaaaaaattaatttaatttatttttcatgattatttatgttgtatttatgtaggattattagtaaatttttttaaaaaaaattaattaaataatttacaataataaaaaaaaaaatttaaatattttattataattatttttttatacatgtaataagtaattgttactttagacaatataaacttttataaaacttaccaagaagttgaaaaaatttctaaactaaatatttatttcagttatagtataataaattgaacatggtaattaatgatttaaattaacttcacaataataataggagaaataccaaaagttatcagtagagcttaacactctcttatgtgttattattgttattcatctaataaaaatattgctataatcaattacaaaaagacatatttaaaaatattaaacactacaaatactactaaccaataaatcttttgagtctagttgattattttcatttattagattttttaggagatccttcttctttgttttaaagtaggatctttcctagatttttttgctagtttgcttttcaattttcctgaggtatctctaattcacgttgattgtacacatgaattagcagtttgtgcactcagggtggatgataaactaatttgaatagatgattttttatcttttctataaacttttcaatattttgaatagtttattgtaaaaaaaaaaaaataataacaatcctctaataataaataagatttttatagcgcgtgcagtaaccgttaatttagacaataagaacattaaaaaaaatccgaaaatgggtacaaaattcaatccaaattggtccgagctgtccggaattgaaatgaccaagatcaccacacgcagccaacgctgcatccacgtgtcgcgttatcattacaataccagtccaaataaacccaatcacgtcaatcatatttaatatct

SEQ ID NO: 47716 - DNA, 2371 bp, Cannabis sativa
tttatataataatttactgaagtattattatgtaagctggcaggtaatgcggttttgccaaagtttcatgaatgagatctatcgctatttgggtcctgacaaggtaatttgagaagatcctggtattctgtaaatgtgaatatttttcatgtcagcctgacaatttttttgggtttaccaactaggacctcccttccgaagaaatgggtgttggtactcgggaaatgggttatctattcggacaatatagacgcttagcaggtcattatcaggtatctctattcttgttcaactaatcattactttcccaattatatatatttttttggctaggcaatgtcttggaatatcattttgtaatgatatgtctctgcatgcgctcatgaagaccacatatatagatactcattcatatgcttttatgtgttcattataacgtataaaaatctgttttcatttaaaggggatactcatttgttcagtattggcccattcatagcagtggtattcattttataaagctatgtagtagtttcttttggatctcaccttattttagcagatctgaatatcagtgttttttgttatggatttccatttaaagtattgctagagaatgagaaatgagttttgttttgttttcatatttatgcgctacttatgcagggaagttttacagggccaaggatattttggtctggctctagccttcgaactgaagctactggatatgggctggtaagcactttcattactctctcatatactcagcatgtagtgggtggaaatgggattgaaattgaagtatcttttatgacaactatccacgattgcttactttctttattagggtctctattaattgtggatttaaatttccattttgtcagggttagcttagaagctgacaaagttcccatgcttttgtaggtattctttgcccagctcatcctttctgacatgaacaaggagcttaaaggattaaggtttgttatctcaacctttagaagatatttacaactcacacgtatctagaagccagttatgttgtctaggagcatccctaccaaactaggaattatcctgttctcacccaagaggggtagctcatattggtcaggcatgtggtttgttctcacaagatctgaggtttgagtccctcctgggtacctatatggcaattgctgtaggttagggaaggagtctaatttaactttgaatcaacttatgatggcttgaataacatatctttccagattgtgcaaaacatagcctgtttgtatcaacatattccacctcacatagtgtagtatggaaattgctaggaacataagtaactaaatgcagccttaatattttctgtattgttgttttaagctttgaaacacacatttgaagcactctatgacttcaatcttcagatgtgctgtaagtggttctggaaaaattgcattgcatgttctggagaagcttattgcttatggtgctcttccaatctcagtgtcaggtatgcaatcattcattcatttttcatcagagtcgggtctaaagtgacatcagtctttactttgtaggtatttaaataggctaagatacaaatttgtatttgtggatctgattattttctttttttcttctatattatctttcaattattttcaataagtgcaagttatgcatgattttgaatattgttccaactcaatacttctttttggaaaaaaaaaaccactaattattcagaaaactcgaatttccatatcttgtgaagcttttattatcagtttaaagctagatacatttggtgatgaaaatcttttctgcagattcgaaaggatatttggtggatgaagatggatttgattacatgaaaatatctttcttgagagatattaaagcacaacagagaagcttgaggtgtgtgtgtaacccattttataccaaatcgctgcattaacttttcggccccattatattgtgtgtggcatttgcagagactattccaagacttatgctagatccaagtattatgatgaagcaaaaccttggaatgagagatgtgatgtagcattcccatgtgcttcacagaatgaaatcgatcaagctgatgccattaatttggtaaattcaggttgtcgtatagtagtagaaggtgggtgggagttctcagcacatgtgcgtagtgttgttttgattcttttatttctgttaatggatgttcactattgcaagattaactgcagatatgattttttttttgtttctgaatgtcgtaggttcaaacatgccgtgcactcctgaagctattgattgtttgagaaaagccaatgttctcattgctcctgcaatggctgctggtgctggaggggtg

SEQ ID NO: 47717 - DNA, 940 bp, Cannabis sativa
gtaatctttccctgtagatttgccgtccaacgattggatataataataggcaacaagagaaaatatcaataggaggagcgaagatgtgtgtataaattatatgaatttatcatatacgaaactcgattccttcaaaggttttatgttgagtctttggaattaacatatagaggcatctatcttccttgccctaaatgactgttatattatttattaaataataaaataattaatttgcggcgtaaatacttaagtttaagtctgagttgtaaataaatacttaacttatttttttagcggtaaaaatactttctataaatattttgttgcatataggttacctagcgttaagttctctattaaatggcaactaaatacacccgtgacgtcatttaatttgtccaagtcatttgttttttttttttatataacaattcatttaaaaattataaaataattttaaaatatataaaaaaaatcattcaaatatataaaaattaaaataaaacaaaataaatatgagaaacggtacctaatgaagcatatatcagatttgtttttttgaaaagattttttttttttttttaaaaaaaaagcatatatcagattagaaaaagaatgcacaaatatatctgcaacaaattaaaattaaacctaacaaataaaatattctacaaacacaattacaaccatcctcatataaacacaaactcaaactcagaatctgtggaggaaaaaaccctaaataatcaaataacattaaaaagaaatcacaacctactatggacgttgacaacacagagatctaatagatcgatggtcgggaaagacgacctcccatggtggtgagtccacgatgtcgacagagctgattacaggaggaggatatgtcgccgccatggtgcctttgtgctaaaaagtctgctgataaaatggtgat

SEQ ID NO: 47718 - DNA, 1344 bp, Cannabis sativa
aaattggggaggtgctgtcaaaatttcccgaaaatcttttgttgtgtgaaattgtgtttgttggtaattatgggaccaaagagagcaagggcaagtgaagagggtggttcatcatccaatccttcttgggccaatccaaggcaatcttttgacaggacccaatttgtaagtgaagcggctcaagaacggttccttaagttgaaggatatgcgctacattgagacgccaaccaaggtttgaaacaatccggagtcaaattgaaagcatgaattggggtagttttgtggatgtcaaagactgagccaatgtcaccatggcatgtgaatgcatggccaactggccagaaaggaaacatggactggttaaaatttgcaataaggaagtcctagccacatctgatgcgatcaacgcactctatgaattgctcgatctcactagagatgaacatcgattgagggtgattgaagaggatgaacatcttgacttagtcgatgtagctaaaacggttgggttcccggggttaaggttcaatgatgatgatgggcaggatgggtcaccaaatttgttgcatctgtgtgaaataaaacttggggcaaaaatatggctatattttgtgatttcccggttggtgcatagcaagcacttttctgatgtgcaaatggatcatttgaaatatgtgtacgccatcatgaaagggtacaagatcaatgtgggtgaagttgttcggggtagttttgaattgatcgttcagggtgccacgggatgtggacttgggttggttggaattattaccgatcttttccaagcttatgaggtaaatgaattgccctttgacaacaaagtagtgtcgcagagaaagatggatgtgagcatggtcaataggctcaaggagcctcatccttatttgcagccaccaccagaagttcaaccacaaggcagaaggcgccctggtgaacaaagtgcagaggaggaggaaaatgtgccacaacaatcgcctggcctaattgatccggcgatgcagtacacacatgcccaacttaactacatcattcaacaaaacaatcatatgcagaaccacatggtttagagaagcatatatgatgcgagtcaagtcactcaacttaactctcttatcactcgcatgaacattgggatcgaggaccccaattatctagcgccacctcctcaatttcatccatatgatcagccgccccgaccgtaccccttctgatgggggtcttagttgggtctctttcccttaagttttatttgcacattagggacaatgtgaatttcacattggggggggggggcgccttaaaatttttaatttttttttttttt

SEQ ID NO: 47719 - DNA, 1102 bp, Cannabis sativa
tattaccaccaaaaataaagaatatggggttaagtaacaattaaaacataagggggtttgaccgcaaatttctctacaaataaatgtcattttaggctctaattcctttgtttaattgtgggaataaatagtcttaactttgtctttgtcagcttcatacacacatgcatatataataattagttgccatttacactataagccttatatatttaactacgagaatcttatgtacttggttaaatggtactattatgttataggtaggagtaggagtgtggtgtcggtgtgtggagtggaatgaagtggtttttattgggtcagttcgatggtgggttgatttgaaaattgaagcttggtgtttgaggttgtgtcatctgtgggttttcgcatgcatgcagccaccacgtatacagtggactaaaatcatttctcccaaattgcaaattaaaaatagtgtctcgtactatataaaatcaatctaagtttgacacgtcaattaatttttatttattaaaaaattaaatctttaattgagtcagcaaaaataattaacatatttaatataaattaaattagttgatgtgtcaaatttaaaatagtttaacacagtacgaaacactatcttcaacaggggatattgattcccaaattaatgtcccaactgatcacaataagacatatcattaatgaaatattaatagtagctaaaaaatgatattactgaatcaagcacacaaatatataatgatgataaaattttattttgaatctcaatgaagttagaatataatgtgatcttatagatatatatatatttaaaaatttattaatactttaatttaatactaataagttaatgttttatgtcgtattacagtacacaagcattcatggttgaattaaaactgccaaagagatgaagaagacagagaacacctatggagtattattttgaaatgtatgaagttatagagttaaaacttataatattataaaagttagatgtatgtatttaaattattaaaacatagatgttgtaatattaataaaatataaattattaaaattagattgtattatgacaatttttataataaac

SEQ ID NO: 47720 - DNA, 2007 bp, Cannabis sativa
ggaaaatggtattcataccttattgggttgtgaaatttagttaatacattaaccaaaatagcaaagttagttagctaacatatgtatatatatagagagagaaaattattagttaccctgtgcagtgaataatagtatgagcaaagataacagtgccatcctcaaaaactacactaccatcctcatggactctttctatctgcattattaattattagttaaaagtatatgtatatacgttttaagcttggtgatgagatgagagtagtattaccatagaatagtgtagccatgtgttgtcatatcctggtcggattgagggtgcagtacttctaggagtagtgtcgaccgatcttattgcaatgtggacttgttttgtaactgcagctatctctcgagatatatcagctgcgctcattgatgctcctatcaaaaccacaacctgaatattataataaaaactacatgctaagaattgagatcatcatcatatcatatatataacatggcaatatgaaaagtgatgaccaaatgacctgatcacgaaatggctctggaattcggtaattgtggctatgcatttgctttcctggccatacatcaatgcctgcaacaacttgaaatgcatcacaataatcctcaatatctgaatagcatagcctatgatgaaaatgattggttttgatggaaattaattaagaactacaccttgaatttgagcaacacggggttctttataatggccaacacagacaacgacagcatcataaatctcatcaatctcaacaaactcttcttcattcatctcatcatcactatgactataatctctcttccttggcgttgactttgactttgaccttactctccaattcttggtggaggagcctccatcgggttccattaccataccaacatgaaccacctgagtctcaaacctcaccaactcaacaatctcaaactcattggcaaactctgtcaagtactccaaaacctccctgtgacccggaaaccttctcccatctctcttctcggaatcgttaaccctaaaagggtaaacccgaaaacccatcgcctctcttgggaggttggtgcgaagagagtggtagaggctggagtggaccgtgttccgaacagggtcaaccccaagtgggtctgactcggtctgtggagtatagacccaggtgccacccacttgcttttgctgctcaaagacaacaactttgtgaccttctagccggagctcatgggcggctatcagaccggcaggtccggctccgatgacggccacgttgcgtgacatgaatatgatgggctgatcaatgttgatgagagactctgctatttatatctgttttataaaataagattatttcgttatatgccagaccacagaaacgtggtttgagtatttaattaaaaaattttgaaagcgtttcatttaaaaaactttaaagcccaattgaaatttaagtgatattaatattaattgactatgttacacattgattttaaataatattaattaaatgtcgtggaagcaccagtggtctagtggtagaatagtaccctgccacggtacagacccgggttcgattcccggctggtgcaagatttcttttccctttttcaactttaatcttaaaaacgacaccacaataatatatatggaaaacgacaacttttgaaagtcaaacgatgccacatagaaagaaaaaacaactcaattttcctatgcagcttaggcttacaacatgcatttactctttttagttaatcagtttttcagctttgatatcaatttgttttgagattatgctaccttcagctttgatatcaaatacgaaaagggagattagacttctttactaaactaaacaaagctcaactaccagaatacacatttatcttatatactagcaaaaattacgtgcgatgcacgtatactaaattttatgctagttttttctatgttatttgaaaatgatacaattaaaaattaaagaa

SEQ ID NO: 47721 - DNA, 1348 bp, Cannabis sativa
  modified_base (1313)..(1323): a, c, t, g, unknown or other
aagaaactttataaatattattttcgtaattagtaaaagtacaaatgtttatttttccttaggatggtataaatgtttattttgagtaattttaacctagaaaaaatccctatattattgtagtgtgaaaatagtattattaatatttattataatataaaataaattaatattggttataaaaaaaaattaataaatattaataacaaattttacttcatcaaattttatatttaattttttctagttatttttaatttcatttttattagattattacaaaattaattaatttattattattttttatatagaaattattaggggcaaaattttccgccttcaataataacttttaggggcgacttttattgtcgcccctaataaagagttttagggacgaagtattagaggcaatattttgatggggacttgtcgcctctaatactatttgggggtgaaatttggaagttttaggagtgataaaagtcgcccttaatgctctcttttcttgtagacgtgttatgtcactatttatgatatttaacacttttcgtaatattatcttatgaataatatttttgtcacaataatttctgtgggttttttcttattgatcttaattttttttcttatgaaaaattttgtttatttaattttttatttacaatatttttatctagtaaattttttttattaatagaatattattattttgcaccttaagatgtgaaaaataatacatataataattgattagcagtttctcatattattcactaaatcaatatttgtgagacccgatattgaaatgcaccaataacgatatgtcatcatttatagtgtttaacacctcccttagtatttttcttattatatccaatagaaagtatatatattttttttaaaaaaaaatgagtatattatatttggaccaaattttataatggtgctcttcagggttcccccccccccctttttttttataaaaatgtgtaataaaattaataatagtattaaattttttattgaaagcatataaaatttttgttaaatatataaaaaaaataatgtaaaaattattaattacattcataagcagcaaaagaataaattaaaagtaatatttagagcatatccaatggtgagctataaatgtggtgtattgtccttttttttagaatattttgctaaaacttaactccaatggcaatgtaaaatgtgtgttaaatttggcaaggacttgtaaggcacagttaattgattttaattaatcaattataattcaaaaattagattatgtctagtttatnnnnnnnnnnnaagcaagggcttaaatgtgaagaaa

SEQ ID NO: 47722 - DNA, 887 bp, Cannabis sativa
tatatatatttatatatatagttggctgagtctccatgcatatgggccaaaagtacatggggggcaaagagaatataaacagaggcatggtactaaactagtgcaaagctatcttttgaaagagaggttaggcttaaacagttgatacaaaccgttcactttgatcatctttacaactttctttttctgatatttttaataataatgtaatgatcaaccggtcacacccatctggggaatcttctcatatcactcacttgaggagtgaggaccctcaattgcatgtggcgtaagagtgtagagtagtagcctaatattaattattaattattagataccatatataataatactaggatttcacatatatatattgttttatattgtactacatatattctctcgcaagtagcaatattatacatataaatattaaatctatcgtccatataaatagataccttgtatatatataattaatacaatacttatgtttcagcatcacacttcaaaactactcaagccctttctctctctttttcttccactctatttatatatatatatctaactatgaaggtggcaattttcttgatcatcttcttggtgttatgtaatgaattgatcgtgaatattgaggcaaggaatatgaggcctaataagaagcacaagaaagggtcaaactcaaagcatggtcttcatcagaaaagtagtaatactttgagtaatgcatcaaagggtgattattattctaatgataatcaccacaaacaagtaaaagatcaacaaactagtaaagctgaacatgttatcgatgatttcaggccaacttcaccaggtcacagtccgggtgttggtcactccattcacaactaattataattatt

SEQ ID NO: 47723 - DNA, 1092 bp, Cannabis sativa
attttagacacgtataaaataaaagaaatatgtgtacaataaaatatttgaacttttaatttctcaaaaaatttacataatattttaaataactacaacgtatattgtcaaatataaaaattaatattaaaactatcaaaaaaaaaaaaaattgatgcaccacccccatcggaggatgtaacctaaaatatctcaaagttatatataacttaaccaaatgaatttgagataaaattatcaataactcatatttttttggaactaagattgaacatctctttctaattttaatatatatctactcaataaatttttatatatatatatatatatattgtttaatgaattggaatttcctttcaaaaccagttttttgaacaattacaacacaccaccacctgttatcattcactccacgtcatggtctacacttcctgttaattcccttttgccctcaccaggtgccttatcttcttcccctgctgatacatcacctgaggtctctcatgcaacatcttctagcagccttcgagttcattctccagttgctaactatgactcatccagttctgtttcaggtgctgatagggaaaataaccaacaacaacatgacctgcaacatgaacataacctacaattgcaactttcagcagattttgttgaacctactgctgctgctccacctgtcccaaatacacatgctgaacctcttgttcccttaccttctcatcctatgatcataagaggtaaagtaggtatattcaagcctcggacctttgcgagtcaagtgcaattcgaattagttattactgaactaattagtattgctgaagccatcaaacatcctggttggttcaaaactatgaatgtagaattcatgctctcaaagctaaaagaacatggattcttgtaccaccctcgaatgcatacaacttaattggcaataaatgggtttatagaattaagttgaatgctgatggtactgtcaatcgactcaaagcaaggtttgtggcaaagggattccatcaaaggcctagaattgtttatggtgagactttcaaccctgtcatcaaggcagcaaccgtgcgaatt

SEQ ID NO: 47724 - DNA, 5768 bp, Cannabis sativa
gggggggggggggggagtccattatagcaacagtttaaaaggtttttttagtattgttatgtattataactctttaataaatactatataccaaaatataaaatataatttaataactttaaacaataataattcatttttcgaaaataaacatatctaatttgtcgcatatgaatatacataccctatgaatcatatggtctgagggactacggttatgcactggttttgacctgcaactatggctcttttgtggctgtttttcagtgtgatgatgatgggagactcgatggcggatgttgatgatattgtggctatgactagcaagttgggagttgagcaagaggaggaatgggaagagaattctgaggcagtggcttccttcgggggatgttctttgatcgggaaggttgtttcgaaacgggatattggggaaaggttattgactaatatgtttggaagaatgtggaaagggattaaggattggaacgttaagatgtatgaggaggaaggggataaccatattgtgggtttttcttttcaatcacaacaggatgcatccatggtgttgtccaagcaaccatggtattttaatggaggtttattgttattggaagcttggccggatactggacaatggaaggattttaaattgaacaaaatctcttgttggattaagatgagaggagtgccactcaagatgttcacacaaagaaatgtcaggcggcttggagagatggcaggggtgatcgaggaactaaaatggcataatgatcggcggatgttcctcaatgggtatgtccgaatgcggattggtttccctctgaacaagagcttgttcgttggtcgttttattccgagtgatgggaaacgttattggatccaatttaagtttgaaagattatcaatgatatgttacaattgtggacggtggggacatgagaaaaaagactgtgagaagcctatgttgatggaaaagactgacgacgagcaattagttccgaagtacggcccttggttgaaggaggacgaccctacaccgaattgttttgttgcttttcgacaaagtcaggtggtgaatgatgaggaggcagctgagcaaggaatagatgggagggggataccggtgaggtctcaggtggaacgaggtggtcttttcgtggaagctgatgctgcaagcgtcgacggttcggcggtggccggtgaccgtttggtggaagaggcgatacaggggagtgctgaaagttcggacatcgtgggagttcagttaggaagggatagtgggggcttggatacgtgtagaaaggaaggagaaggagtcattggattgggccgggctttagaaatagagaatggaagcccaattaaaacacagggctttacttgtgctaatgtgggccgtagggttgagattcaagcaacacgtgacacacatgtgattactgatgggaatatcaacaacatttcgattggggtatcaccagaggccgattctgaaataaaaaagagaaaaacaattggagaaggcattgcagaggagcttgatagggaaagaagatattttaataaaggtaaacaagtggttgaggacttggtattggatcaagggagtggtgtttttgctcatggattgtccagtggtggggaggggggtagtgcgtctatgggaggacatcgacggaaggtttcacttaaaaatagagctaggcgacaagccaagttggctgtggtgggggcgactgaggggagcacgttggcggcaggatcgatggatttagctccaggagtagtgggggatgaatgcttggtgttcactactgctggtactcaatcaccctctcctttgaatgcaacatatggggttagtatttctacttctgtggatttggtttctccaattttttcggttgaagcggcgagccttgtggagcaaggccgccgagctcaatgaaactcttatgttggaatgtccaaggcattgggaacccttggacattgagagctcttcaatcccacttgcgggagtttaacccgagtattgtttttttggcggaaagtaagcttactagatcgcaggctctgcgtctatgtgaagttttgcagtttggggagaatttttgggcagtagataggattggtttgagtggtggtttgttgttaatgtggaaggatgatattaaattgagagtggattctagttcttctgggcatattgttgctgaagtggcaggaaaagggttccttccatggacacttacttgcttttatggtaatccggatgcttcgcagaggaagttttcttgggaacttctgaggaagatatgccgtgagactcatggatcatggttgtgtgtgggggattttaatgaaattgttagtttggcggaaaagagtggaggccgaatgaggggtgtttcggccatggaagaatttaaaaaggtgttggaccaatgttgtttgatggactttagtacggtaaagacggatttcacgtggtgcaatgaacatgagtctaatacagttatggaaaggttggataggggattgtgtaaccaggaatggcttgatcaatttgagggagcggatattcagttgttagattggtgggaatctgaccataggcctttagtggttgacatgccgattgtggcggaagacactcagaatggaaagactaaacgaaatacgcgatttcattttgaggaagcttggtgtgaggagaatgaatgtaaggatattgtggaaggtacttggcggaatggggagaggagtgaaaccgtggcttcgtttcgtggtaagactagtcgggttggggatctattgcatagatggaataaaaagaagaagaaggagttgaatggaaggatcactaaaactaaaaagactcttaaggagctctcttctttacagcaacccggagtatggaaagagttaaaacaagtggagaagcacctgaatgtgttgttggaaaaagatgagcaatattggagacaaaggagccgagcaatgtggttgaaatggggggataaaaataccaaatactttcatcataaagcttcggcaaggcgtaagaagaatgaaattagagggttgatggattcagtgggagtgtggcaaaacgatgcagttatagttcagcagcttattgagaattattttcaaaatatttttatggcttcggaggtgaatatgggtgtgattgatgaggttctacttgcggtgcaaccgaaagtctcgtatgaaatgaatgaagctctgctagaaccttttacggaggaacatgtgatccgggctgtcaaggatatgaatcctactaaagcccctggggaggatggattaccagctctattttatcaaaagttttggacttcggttaatgaggcagtggtgcgggtttgcttgaatattttaaacaatggggcagatttgagttgtttgaatgagactattatcgctttgattcctaaggtggagaagcctactatggtgagtgagtaccgtcctattagcttatgtaatgtcatttataaggtggtctcaaaatgtttggctaatcggttgagggagacattggatgaggttatatcggagtcgcagagtgcatttattaaaggccgacttattcatgataatgcgattattgggtatgagagccttcattgtatgaggaagaaccgattccagaacgggaagaaattggcactaaaattggacatggcaaaggcatacgatcgagtggagtggggttttattcggcgaatgatgcttcgtctagggtatcatgagaagtgggtggatatgataatgcgttgtgtgacttcggtgtccttttctttcctcatcaatggggaaataaaagggaaggtatatccacaacggggtataagacaaggtgatcctttgtctcctttcttgtttcttttttgtgcggaagctttctcatgtttgatacagcgggcggaggaaatgggaggcttacaaggggttcggtttgggagaaggggattgacggtgtcgcaccttttctttgcggatgatagtatggtgttctttgatgccaatatggcggattgtcaacggtttagtggtttgttggagagatattcggtggcatcgggtcaagtggttaatttcaataaatctgaggtatgttttgggaagcttgtgcctttggagatgaaatcggagatggctgaatttcttggtgtgaaaattgtagataaccatggaaaataccttggccttccttcttttgttgggaggaacaaaaggcaactatttgatgttatcaagaatagagtatggagtaagttgcgtggatggaaaaccaatatgttttcaatggggggaaaggaggtgttgattaaggccattgttcaagccattcctacctataccatgagttgttatcgtcttccgaaaagtactatcaatagtatccataaaatggctgctagattttggtggggttcaacagaaaaacaacgaaagactcattggtgcaaatggaaacaattgtgtaagccgaaagaggaaggtggtttgggctttagagatttggagttgtttaatcaagcactcttggctaagcaaatttggcgatgtcttcgacagccgtcttcgctatgtagtagggtgttgaaggcgagttattttcctaataaaggggttttggaagcaaaatgtgggtctcatgcgtcttttgtgtggcgaagtttggtttgggggaaggagattgtggagaaaggaacccgatggcggattgggaatgggcagcgagtgcgtatagtggaagacccttggctgcctaggccccgaagttttaaaatttatgataaaccggagcttccggcgcaattgtttgtagtggatttgactcttcctaatggtgagtgggatgtggactttatccgggctactttcaatgttgaggatgctaatctaattgttagtatgcctcatgttaaagatgatgttgaggataaaattatgtggcattatactaacaatggggagtactcggtgaagagtgggtatcgtatggctcttgaggtgtggaaggatgttgccacttcggatgagaagcttatgaatgattggtggactaagttatggcggatgaagcttccctcgaaaattaagcatttcgtatggaagctagcaaataagtggctgcctacgaattcggctttggcctataggaaggttgcaattgatccggtttgtcagcgttgttcgaaaggggtccgagagactgtgtttcatgctatttgggggtgtcgggctaataaaggggtttggaagattagtggctttaaagatgctgtccaacgggttgggaaggaggatataatctcgtttctgatgcgaatggcaaaaggattaaacccgaatctgtttgagttttttctggttttgtgttggcaactgtggcacattagaaatagcacaaaacatggtgggagggtgccacggcctgctgatattgttgactggtgtgcgggttatctgcaagaggtgagggagccgagacaaggagagaacagtcgggctgtgcgactgggtgcacgatggcagcctcctccgccggatgaactgaaaattaatgtggacgcaggtgtgaagaagggggagggatactcaagctttagttgtgccattcgagacgcagcggggctgtgtacctttgcttcggctgctgcattgccgagggagtatacgcctttacatgcggagttgctggcgataagaaatggtttgcaagttgg

SEQ ID NO: 47725 - DNA, 1599 bp, Cannabis sativa
tgggaaataccaccaggaggaaaacaaaggaggttacaactggtaaacaagttgtggacagacccttataacatgcaacatataaaagaaagtgctgagattgttgccaaactggttggcttctgtgagtctggtgaacatgctagtaaagagatgtttgagctcacatttgtatgcccttctgataagaagacatggatgggttggaatctaatatccaatcttttgaatctgtaaacttgttgtctacaattacactctttttcctcatatgttgctgtgtaaagcaattcttttgttgcaagcaacattctctgcccttatatgaggttgtaattaatttgcattttaatgaaaatgaataactttgtgtcatcttggtttgaatttagttctgtttcagaagaatttttttaatttaagttactgccgattgactgagttgggttcacgagtgtccatggagaattattcagttgcgattgttttgtgagaatgttcaccctatttttactcttaaatataaagcagcaaaattttattataggttgtgtgaaacactgctttgtattagtttcttaataaggataggataattattttttttccttcaatcattattcacatttgtttgaacagcctcaacactacattgaaccaatacgaagtaagaaaatcacttctaaaaaagtgggagcgaggatttgatagcatttgctatcggatacaactagaattacttggccaccaaatcacactactacttgctcataaagcaagtttggccaaagaataaacaacaccattacaagatacaatggacaaaattaacaactttgaacctattacaataatcgacaatgtcatccaacacaagccccaaagaaataataatacacattatttataattttaagagcaacactcaaaacaatcaaattcattgtcatacccaaaaaaaggcattgagtcaacacattgcgaatagtcaaagcttccgtcatcgcaagttcaaagcaaccctccaacctccagcttgtagaggcccgagcaatacccaactcatcttggatcaccatgtccaatccaggccaatcaattatgatgcctctcttgcacaattgtcaacttctccaattttaaaattcaaattcagggtataaaccattttttgtaggtttgtccataacgtgagcttttaaatagctatcagtgaaaatggtttgtgatcacagctgaaagttgtttgtgtttgtgtgtgtatatacaaagagagagtgagttgagagatagggagggatgtgaaggttttctgttaggacaaaacaaaagaatattactctgaagaaacataacatctataaatctataaagaaatatgtctaagaatcatatgccacatttccatatttattttatattgtgtttatgtatgaatgaagttcaacatattatagcaacgaaaaggtcacagataatcaataaaacaaggggttttttcattagtgtacaacaaaaataattatattacaaaaaatgtgcaaaaaaacacaattttaaaaatgtacacatttgaaaatatatttacaaaaattcata

SEQ ID NO: 47726 - DNA, 1592 bp, Cannabis sativa
agattatatcacttaataagtacattatatacatatatatatatatataaaaatattataaaatttaggtaacaccgcgcaaagtgcgtcttagttctctagtttgattgataagacaagaaccaagggcttttagtagacttctttgaagaccgaattagcttatgacaagtttgagaattaatatgagtttattgaccgcgtaagaacaatcaatatttataacgaattccacaataacaaaaaattgaaattaattgtctaatgtctaatgtctattctgtctctcctcttcaattcccagtgaacaacatgaaccataaaatcacattttgctctataattcttaaaaaaatagattttcgtaagataaaatattaaaaattatgtttagctgatgcttcctaattttaaaagaaaaattatcattgatcaaatacccaaaacaagaagtgatattatatgatgaaaattcacacaattttagataatacaaacttagactattggagatctaaaatcaaatttaagtgtggtaaatggagcttataatttgttaaaagaaatagagataatagttgaaagtaaccaattggccaatgaaaagcaactttcagtcacttcccaaattatatggcagtagtgcgttgatgcaatagttgtggagagagatactgttacaatggtacaatgcaccattgttggatttggattcaatatcccttgcactgatcaaggttttgtcaaaacgagctctcaacatcgagaagtacagtttattttaaaggctttgagcatatttagtgtttggaagtacgggccgaattttttgatacaatacgaaaccggcacgagtacgattaggcacgaaaaaatatggacttaaatataacacatcacaatgctacaaattggcacgatacgacacaaaaatatgtccttaaacacgacatgatacgaaaagcacaaagagtacgacacataagctcaaatagactaagcccaaaaagtaccacgcacgaccagttcgaaaaatatgacacgacatattaaaaaactttataatttactattaaaaataataaggtatgaatttataagttataaataaattaaaataataagagatattgtcgataaaactactcaaattttatgttttttaacagttaactacaaaaattgatttttttggagcaaaattacctaaacctcacttctattgtggtcattatactttcgttatattttcacagttaagtgccataatgaacaactgaagtgtatactaatatacacgtgacaaaatttaagtggtccaagtaatattaaaattattttaaattacacaaaataatttaattttttttttccttttctttttttattccttttatttttctttttcttcttcttctatgttcattcataccgattcccttcttcttcctccttccccaattacccaaaccccacccagacccaatcacccatgtcttcctcttcttcttcctctgaacatggtctctcattttcgtcaatggtggaaccatggctgatccactctttcctaaatcgtcgtcttctcttct

SEQ ID NO: 47727 - DNA, 2050 bp, Cannabis sativa
ttaaaccaaaaataataataataatttacaatttacaataaagagtacaaaatacatactactcatgaagtgactacaaaacaagaaaagtataacaaaaataaaaaaaattatctaaattaaaaaattcatggtcgtccacagtgatgagccaactaatcatcgtatacagccatgcactctaaacatccacaatcgccagccttgaacaaccaccatcgccaacctaatttgagaattaagtaaaaataaagcattaaaaagaaaaattgcagaaatcaactcatatatgaaatcttgattattgccaaatttttaccatcacaaccacattttctaaagataatttctcagtgcccacaatcataatcaacaatcaaataatccaaataaccaattacaactaaatttacatgcctatgagtaaacatttattgatccaaagtctaaactcaatataattctgaaaatgaaggtttccaaaatacagaaagaatttgatcctaaattgagacttaacaaagaaaataaataaaacccagttcaactaatttcccaaaaacataaaacagatagttaagtaggatcaatggcattaagaaaagaaccttaatcagctaagctaccttcagttcttttgaatttaaatattatttatttaggaaaattatcttattttcacttatttataacaggatatcaattttaacacaacttctaacttcataaactcaattcaattatgtaaatagtagaaaataaacaacaaacccttaaaatcaaaacccacttcaaattgaccattgttagagaattaactaagcaatcatcacagttttttttccttcttcttatcctgtttctttttaaatttttaagtaagctgtgtaaataaacaaattaaaataattataattagagaaaaaaaaagagtaagcattagccgagtacggaaatcaaacccaaaccccaacaaaccaagtagaacccaacaaaaagaaaaaaaaaaaaaagaggatcaactcaaatttgtgaatacagttacatccattcataggattagtacaagtgcagagtagaaatctaaaaaccaagtgaagtatacaaatggattacaaaccatatcaatgtatcaacaatagtaactcttttttgaaataataataattaattaaaaggcttaccttcggaaaggtcggtggtggcgttttgagctagagatctaagttgcaacaaaatgaataagaagaagaaggtccataaagcagtgaagagcgaagaaatggagccatgtgagacgaaggggacagaaactgagggcatttggggcgaagaagccggcggtggagcatcgaaggggacagagatcgagggcgtttggggcgaagacaagggtccttcgttcgttgtcctagggcgaagacgagtgtccttccatcgttcatttgtcttcgtcattccagtgggagacattgggatggcacgatctctttttttttttctgaaatcaaaagccgtagagagagaaacggctgagggtttgggagatgaagggggatgctagggttattataaaggaatctttgactatttatattattttaattgaaaaaaaactcttcacattcaatttatttttcatcaacaaaaaaaaaaattaattattttatttcaaataaagtaaaagaaaaagtattacttattttatcagattaaaaaaaattatttataatatttttgttgagcactgtgtaccttttttattattttaagtataaatttaaagttatgatatagtgacacgctgggcaagtagggaaacatttaccgagtcacacttggtgggtcactatagaccaatatttttttaagaaaaaaattaatataaattatgacaattcctctttagtgacacgcaaaacgcgttggccaacagatttgcgcacacgcatggcacgtctctattggccatggttttttttttatttatttttataatattataaattttgggttttagtatttagtgacactccatacttttagtgac

SEQ ID NO: 47728 - DNA, 2403 bp, Cannabis sativa
  modified_base (1119)..(1132): a, c, t, g, unknown or other
taaaataatttccaacagagctttgttccaatttttagccacaaaatccatgactgtggcaacatccacaagcatgggagccaccactttcccatataagcaaagggcagaaagtgccttgagagaagcaacatatggagataaagatactaaggcatcaatgcaagaataacacttgcctttaaaaggggagttggtggcaacaacagactccataacaacagacagcaacaagacaaaagctcacccatccaaccccaccaacacacacaaagacgacaaacataatcaaacgcaaaagccaacaaagacaaaaccaccaaaacactcaccaacacaagacacaaaaccagatataaaactaaaaagagcggaccaagaaacaaaagcaaaaaagaaaggtaaagactaggggagagcatgagtgacagtgaataggacataacaaaggaaaatcaaagagtaggagacacacacaaaaggaataagaaacgaaaatatgggattagtcaaagggaagacacgtcaaagaaagatggaagaacagtataagaccatcctcccgagagagaaaactatcactattttaacgtgccacatatttttttttttaatttttttattatagcttttattacttaaataatacttattttgtggagaaaataaaaactaattagactacacaatttttattcaaaattaatttattttttatcaggtagtcgttggagatacattttttagataaataaataaatacaatgtatatatatacattttttcattctcctttagccattgtcatcatctaagagctctcattcaattcaatcattattataaacttatagtgatatttaattttgcattgaagcaaacaaaagaaacacgaaggtatatattctaactcttgttttcatatttttttatacatatactattaatactattatatattttccatcttactttaatttataataattgttcttcttgaataggatttatttcaagaaaaagaaaatttcaaaaaaaaaaaatattcatattgaagtacatggcttgtaattttttagattatatctttcttttatcctattattattattattattnnnnnnnnnnnnnntattattattattattatttcgaataattattattattattattacctttataagcaataattctgtttaatattcttaaattaaaaaagaggcatgtctagtaaaaaatatctatcacgttatgaaaagcttaagaaaaaaagaaaaatagaaaatttgattaaatctcaacaatgacctttaaataatttgttaccactagcaaaagagaaaaaataacacaaataaagaaactaatgaacaattaaatttaaataatttaggtgattgtgaaattatggtcgaaaaagatttagaaaattaccatggtaaaatatgtgataatatgatagttgatgaagaatgttaagaaaataaggaggataatatggaaactaaaaatggtaaccacgatttagattatctttatgatccaggaaaatagaaaaatcttgacaataaactaatagacttattagtagaaaggggtccaattagagtgagtgatatagagtttccaaaagatgatggtagacatttttctacttatcactatacaaaaaatttatcaaatagagaacaacatgattcaaagtggttagtgtattcaaagtgtttaataaagtatattgtttttgttgtaaattatttagtactagtcttagtacgataaaccaattgagtaacgaaggaactaaagattggatacatcttggtgataggttaaagagtcatgaaacaagtaacaaatatataatcaacattagtaatgaataaaataattgataaacatgctcaagaaagaattaataaagagaaagaacattggatgaatgttttaaaaagaataattgctcttataaaatatttagctaaaaataatttggcatttcgtaggagtcatgaaaagatttatcaagaaaagaatggaaactttttaagttttattgagatgatcactgaatttgatccaataatgaaagagcatattcgtcgtattcaaaacggtaaaatttctaaatattatttatgacataatatttaaaatgaattaatacaagtgttggcccacaagataaaaaattcaattttaacaaatattaaagaaacaaaatactatgcaattatattagattgtactccatatttgagccactaagagcaaatgtccatgatcttaaggtgtgtaaatgtttcttcttttcctattgaaattgaagaatactttttaggatttttgaatgtggtagatacttcaagaaaaggcctctttgatgaactcataagagaa

SEQ ID NO: 47729 - DNA, 1168 bp, Cannabis sativa
cctgattctctgttgggtctcactcttaaggctaggtacttcccaaactcatctattttagatgtgaaggctggtcataatccttctttttcttggcgtattattctttggggaagggatctattagttctggtttaatttggaaagtggggagatggagagagcattagaaccctcgatgatcattggcttccttccactaagttcaagcaatctatttgcaatcgggagccaaatcagaccaaattatcatattttactgatcattctggttcatagaatctggataaacttcacacttattttgataccgctactgtcaatgatattttggatgttctttttttgggaatcaatggtagagaagagaaaatttggggcagggaaaattcttgtcttttcactgttaaatctgcatatcacttagcccttgcaagtagagatatcccctccacttcttcctttcaaacttcaaaaaccttttggactaaagtttggcatgctaatgttcctccaaggttaagcattttgtgtggagaattctcacaaactctatcgttgtggctgcttcaccttttcaaagacatattcacctttgtgtcccctgtgtaacataaaccctgaaactattaagcatgccttgctagagtgccctagagccaggaaagcttggaagaactcagactttgctcatttttatcttttaaataaacagtttgatattctgcattttatttctaatatttttgctagtttggacaagggttctgcagatgttttgttatgtttcctgtggactatatggaattaaaggaataatgctttttacaatcgtttttgctcttgctcctaatgaaatgtttgtatggtgtaatagttttttactttagtacttagatgcacaacaaaagggaattccttctaatgacccacttgcccaggattcatcagtttcgttggctttccctacaggatggtatcaagtcttcacggatgcagctttagattctgaaagaagggtttatagtttaagtggtgttgtgcttaatgattctaaccagattgttgggggagttaaaccttctattggtgttgttactcctgcaattgcaaaagcaaaggttgtcctcttggcggttaattggattcaattggttagactgccggt

SEQ ID NO: 47730 - DNA, 896 bp, Cannabis sativa
tttaccaccaaaagcaaatattcttagggattctccccattccttttttgacacacacatttcccaaccacagacagacagctcacacccataacagtcccatcagccgcagacaggtatggtcttgtctcactaaacccatacattgggcctagataacaagcctacaaaggagaaaaatttccttcttaaggaaacaacccttagtgattatagctggaagagggaacgagcctaatttccatccaaaactccattcattcctctataaatagggttcaaacaccattgtaaaaggggatcgagacttgaaaacaaagaaaagactgccaaaacatccctgtaaaaataccattactgtaacatttcaacgtgaatacaagtgactcctggacaaagactttttaacactccaactataacactccaactatattaaaattgatcacacaaacacatttattactaattataaattgtttaataagttgtcaaaaaacttggtcaaaagctttaatcttcactttatgacataatgtctcatgcaaaaaaaaaaaaaattaggcttcttttgaacagaatgttcttttaggaatgaacaatccgttggttcccaagcccacatcagttccaatacaacacactcattgatataggcgagccccattgaaaagccccacctccaataaattttttgagttgttatctatggactgcactgatctcccttttcctaacccattaagtcttcaaatctctcaaccttctcattgttgggcctacgtcgtttttttttttttttttttatgaaatgaccaaacaattttatttaataaaaggggtattttcataaaatttggaaaaattaaagttagtttagataaatatagtaagaa

SEQ ID NO: 47731 - DNA, 2188 bp, Cannabis sativa
  modified_base (2129)..(2134): a, c, t, g, unknown or other
tacagcttggttgttgagggcctcaacttcatgatgaacttctttgatcttttttttcatattaccgtacttgtgagtgtgccaaagttgcaaagagttggcacatgatgtaatgttgctgcagaaattctcaaccaaagtgcctggcagattttttttccattctttttgaattattgcagcagcagcaggatcagaaagccaaagcttttcgaacctgaaccgagatcgtcttggattgttgggcaattggtcttctattgggagtacagtaacagacaatgctctatgatcagacttgaagtaatcaagatgatgtgttgttatttgtttgaaactttgttgccattgatcattaacaaaacaccagtcaagtctctccttagtagcattagcattaagccttccttttatccatgtatacgggtccccctcaaatggttgttcataaagataacaagaatctaaaacactccgaaacttgtccatttgcgcttcgcttcgtaaggcaccaccaagtttattttgattggataggatttcattaaaatcacctataaccaaccaaggcatcaaaggtgccacatctttgcaacgctcaagaagtgtccaagtatgaattcggttttgagtttcaggtgctccatagaaagcagagaaatgccaagttggcccagtgtcacacttcaagtaacaatcaaagagatttgcattaaaattaagaagagttacatcaacattgtctttccataaaagcataagacccccacttaagcctactctagggacttctagtccattattaaactttaaagattgacgaaaacgagaaactacattacaagctaactttgtttccataagaaataaaacatgaggagtttgctgttgaacaagcaaacgaagttgtctgaatgcgctaggattccccaggccacgcgcattccagctaataattttcatggctgtatgcggggctgaagaacagcctccgcatcgttgtccaaattatcagttgaatctgttgcaaatgcagaaacattctgatacatctcagcatcggtagacatctccgaagttgaggggagaggtttgggacccctacaccgcttgagtgttttgcgtaaagacaatttctcaggtagtctcttgttcgcacgattaggagaactgttctctttgtcacaatcagcaccagtagaaagcatacagattgtggaatctgtcataatggggtattgaatgtgctgagaagtagcagcagatcgcacattaagtggctgagtgtgcatagtttcaggcggatatgtagcaataatccctgcttgctgtccgacattaggcatgtaaagatcagagagatcgctttcattaggagatgcaggggacattgtgttgaaaagtgagttggtcatgcctttttttaaaaactcttcaagtttgaaattaaataaatatgaaagagattacaagtatttattaccaaaaaataaaatagatcaaatatttaaattcaaatttatattactatataaattattcagatatttttaattagtatttattatgaatttaaattatatatgtttttttaattaatatttattatggatttaaattatatatgtttttttaattagaaatcatgatttgtggtaaagttattgttattgtcggatctcacttgtaaattgccactatattcaaagtcattgtcatcgacgtcatatcttacttgtaatcattgctacactcaaagttattatcattgccgtagctaactttcaattgtatttgtcaccacattcaaagttgttgtcatcactacatttcacttgtaatcaccataaaattcaaaacttgtattaccctattgaaacttgaccaaacattacgaaaatcaataaaaatattaatataattattcaaatcaaatttttttttaattacataacaatgttaaaataaattagatttttgatttcgaactatggttattgtaccttcatcctgccccaaataaaatgattatatattagtcattataattgtttgtttagtcatacacatattcataatacacaaatatattatcaacaatggaatggaatagaaaggaaataattttnnnnnnactcctttgtttggttgcattttaaagtattggaatggcattccaatggaatgc

SEQ ID NO: 47732 - DNA, 934 bp, Cannabis sativa
aggtaataaaaagttcgaatggatagaggaatgtgagaacgccttccaagaattaaaaaggcaactcacaaaacctctagtactcttaaaatccctggacagagaagaattgggactatacttggccatcaacgaatacgttgtaagtgtcgtggtgataagggaagaaaacaacatccaacatccagtctactatattagcaaatgactcgttgaagttgaaggacgatatcctttgatagagaaactcacctactaccttatctcaaccgaaaggaagttaaggcctgatttccaagctcatcttgtttgggtatacgccgaccaacctttgtgccaagtattgcaaaagccaaatgcctctggacgattactcaagtgggcgatagagttgggacagtatgagataattttccaacctcatacagcggttaaagggcaggctttggcagactttgtagttgagtgtccaggcaaagaaaaaaataacataagcgatgatttggagccatatacaagaatccctacctgaaaaaagaatgaagatagacctacctagaaattacatgtggacggatcagttacagacaagctttttggtgcagaaattgccctcatcacacttaggggcaacacctacaacgagtaatcaaatttgggttcaaatcctccaataatgaaatagaataggatgcactcatagctaggctaaaattggctcgcgaggtacgcgcaaaatacgttgaggtctctagtgattcccaattggtagtaaatcatgttttaggggaatatgtggcccgtggagaaaaaatgatggcctatctaagtaagatataagacctgcttgcacaatttaagggttacaccctcaaacagattccaagagaagacaatacaactactgacgccctggcacgactcgtgagtagca

SEQ ID NO: 47733 - DNA, 1963 bp, Cannabis sativa
  modified_base (1934)..(1936): a, c, t, g, unknown or other
agatgactgggttgtatttaaattgagtaaagttttgatttttgttttaatacgagtattaggagaaagaatattgaatctgttttgtattttgctttagttggaattgaggcagaggatgagaagattagcttcctcttgtctgaggttaagggcaaagatctcactgagctaattgcatctggaagggagaagctagcttcagtcccatctggtggtggtggtggtgctgttgcttactctgcacccacaggtggagccgctgccccagctgctgcagccgagtcaaagaaggaagagaaggtggaagagaaggaggaatcagatgatgtaagttttattggttaagctatttggttttgattgtttagtaatcttttggaattttttattaatggtgtgttattatgtattcattgtttcaggatatgggtttcagtctcttcgactaaaaggtttgatatgaagattttgaggttttgttattggaattttgttttatttttagatgtttagaggaggaagcaatgttgtaacacttaagggataatttatcttgaatttgtttcctctgcatatttttcctcagcttaagcttaatatttgtaacattgcaattgtgccatttagtgttttattttattcctgattttagtcttgtgcattggctttccttgttctattctcattaccatctttttcaaaaagaacattttaaaatagacaagctcttttggtttagtggttatgttttttgtgaggaggagctcaatcttttatgggtagtgtttgtggtgaaggtaggagtgaggtttgaggctttgtgcgaattgatgactaattatttatttagtaaagttatgggcagttttaagaaattaatgactatgtatgtatgtattaaataagaagttgtatatatatatttatatttagggatacgattttgtgtcatgatgtactttcacggaatgtattctgtgatgtacgatagcatgggggagagttatttgatctgagcgttgaagttgatttaggggtaattagggttaaaaaatgataacgtaccttgaaatccatcttatgtactactgaatacattctgatgaaagtacattacgagacaaaattatttctctatatatttttattcagcatttgattgattttgaatgtggagtttgactaagaggttgaagttctcatattgtattgacaaagccaaatttatccattattttcaatatatatatgggtgcctaatataagtatattgagaatatatttattaaagaaaaatgctaattacaacttcttgttactatttcttagtcaatttttatgtttgaaaccacatgttgaaatatttttttttaatttttttttagtagtggtattcgttatagttatagtattatttttgtaaatttttgaaatattctgaatagtttacagtaccgaaaatagaatttttaatatttcaatttaccatgcttgtttaaaaaatttcaaaaatatttttgacattgtaaactatttgaaatatttcaaaaatttgtaggaatgatgttgtaacgctctcgttaaaaaaaatattccatgtgttttcggacgtgaaagttgactaagaggttataataagaggttaacagtagcacttctcatataatattttttttttgatataattcaaaatttcatattgtattatacaatacaacatattttgtaatttgtcatagttttggtattttttttgcataatggtcatagtttacaaatgaaaaatgcacaattcgactcaagaaaacagcatattcatttgtataaaaaaccataaaagcaggggcggacccacattgtagcgaggggcagtcgacccccctccccaaaaaaaaaatcggaaaaaaaatgtatatgtattttaattagtnnnaacatatatttgtattaaaagatgata

SEQ ID NO: 47734 - DNA, 784 bp, Cannabis sativa
gaatcattggtggtcaatatcaatacatcatgtcacgtggtggtccctcttctaatcacggtggtccctcccccaacaacatgcatagttgtggtccctcctacaatcgcagtcagaacaataacacaagacaaaaggtgcagtctcaactctgtcacaagtttggaagcactaccaaatagtgttttcatcgttttgacaagtcatttacaggccctgaatcattcaccaacttccgaccaattgccaacacagcagaaatgtaatccatgcttgctggactagatactgtcaatgatgacaattggaaccccgatacttgtgcccctcatcactttaacacaaaaaattttccaattggggccttggttaaatgttctttaagtttctagaaggcttcttcacactcagttgtccattcaatttttttttttatattgagaacattgaagaacctaatgcattggtttatttatttgaaaacaaatctgctgactgctgcaattcttctaattaaactctgaacgtctttatgattctatatggaaggcgtatctagaagagctttaatcttttattccactagaactgccaatgaaacccaaaaatttccctaaggaaactccaaaagtgcatttcgttgggtttagtttcatcaatacttatggatgatggagaaaggttcttgtaaatcttcatggtggtgcataaaggtcttagactttactagcatatcatatgcatagacttccatattcaaccctagaacatctttaaacatctt

SEQ ID NO: 47735 - DNA, 2888 bp, Cannabis sativa
  modified_base (1073)..(1075): a, c, t, g, unknown or other
cttcagagtcctgcgtctcctcgtgcgtcgcaaaatttttacttccgaagaagacaaagtgtcaggtgaaaccctttatgggcccacaaaattgtcgagctggctccttcacgagccagctccaacatctgactcagatgcctcgatcatgacactggctcccatgttaatcatggagaaccacccgtggcacgtggacccgtggcacaaactgagcgagttcatcagagaaggtggactcgctccgttcgagaaagaacacgggtacatgtttgatttcgctgcgaagaatcctctgtacaataaattgcttaacaacgcgatggcgtgcacggcacgaattacgataagaacattactgagtcattgtggtgatgatcttttcaatggggttggatctgtggttgatgttggtggtggaactgggagatttatttcagaaatagtgaaatcatatcctcatattaaagggattaattttgatagatctcatgtgatttctactgctccagcttatcctggtgtcactcatgttgggggtgacatgtttcaagaggttccttctgctgatgctgttgtcaccaaggtaacctcatacctcttcttactatcttatactatcatattcatacctaattggtaattaaataaaagttagtaactattaactgtctttttgtgtgtgttaaaggatctgtggttaaaataaaaagtaaaaaagttttcaaacctcttcttttatatattactatatagtttttgagtaataatgatatactacacaactcaaatcacatatattttttatacataatgattgacgtttaattttgtcataattttttacatgtattttttatttttattttgggagagatatttgaatttaggaccttttctttgctagaaaaagtgtaaaaattactggactatacctatgaccataattttttcattgtatttttgtttttgaaaaagtcacgttattttcactttgtttaatttcatatagcagcaacctaaaaacaatgttaaaaaacatccgtatgtacttttataaaaaaaaaaaaaannnaaaaaaaaaaatcaaaattcttacaaattttagaaaactataaatccctatatttataaattttgtcattttttgatatttatgaaaacatttttatctatatatataatttaatcgtacttagtactacttaggtagtaaatagagtttatgccatttttgttttcatttatttaagagtaatttgcggtatacatatttaaatttaactttcaattgtaaataaatatttaaatttaatttttgtcgataataataactaagttatatttttggaactctataagtacctggtcattaaatatcaaatcattatatattcacgtgttattttcttattagtatatttaatttaatttttttttttataggatataaaaattaatgacttgcaccaattaggaatttccacgtaaaaatttacatatttaacaatcaagtacttacagagttccagaaatataacttaggtattattgccgtcaaaagttaaacttacatatttatttgcaaccagaagttaaatttaagtatttatgccgcaaattactatttatttaattttaaaatatattttgcattttagttagaataaaaaataaggtacatagaaacaaaaataaccccacaataattatgaacaaatttcatcactttcttattctattttcacaaaaactattaaaaatatcttcttgtcattattatgtgcagtgggtattgcatgactggggagatgaactatgtgtgaagctattgaagaattgcagaaaagcaatcccagaaaaaggtgggaaagtgataatagttgacatagttgttgaagctgatgggaaaggattgtttgatgacactggtgttgtctttgatgttcttatgcttgctcacaacactggtggaaaagaaagaactgagaaagaatggaaatctctgttggaccaatctggttttcctcgttacaaaatcaccaaaatccctgctttgcaatctgtcattgaagcctatccaaattaattaattagttaatttaatattatatattcttgatgattaatcatattctcaagagtaatgtatttatgatgtttagttaattgttgttgtaagttttaattatatgcatatggtttgtattgttgtcttaatattgcagtgtgtggtggcttagcttctttatttttcatgtgtgtatgtttgtgatttaataatgggaaattaattaattgatattgttgtgactacaaattatatgatcatcaaatttgttgttttattaaagagtattaaagagcggaatgcatttgtctattgatttcgaaacaaatttgtcgagtgttgcaatcttttttttatcaaaaaagaacaatctttattaatcaacaagcaaattacaaccaaacaaagccttaacggccaactacaaaaagaaagctacaacgagtcaatcttcatcaacaaattcctttcctctcctttcaaattcttaaaataaaaattgttaagtctatatactttgtatcccttctaatcgtatctacaattttttccatactataagtaaatttattaaacacacaagtatttctattatgccaaatataagaaacaattctgttgtcatgcctccttttattaataaacgcatgaaagtaggcattgttgtcttctccttttgaaagccaagtgactttgcttctctggattaaaaaactctgatacatggctgcatgagtttggaactttgctgcaactattttctccatcttctataagctaaaacatctgtaggtgagccttagttaaagaaagctga

SEQ ID NO: 47736 - DNA, 3432 bp, Cannabis sativa
gaaagtctcagtaaggcagaaggtccattaaaaaggagaagggtgactcctaaaagaaataagaacaaagggaaagcgagagtggcagagaccaatcaatcgaagttgtcaaaggaagtacggggtaattcatcaaggggattttctaatgaattggatttgacccttgacgctacaatgaaagcggcaaacctagttgaactaggtcgccgagagccacgattgccatgttttggaatgtccaaggtcttgggaacccttggacattgaataccctgaaatcccatgtcaaagattatcatcccgagatgatatttctgtctgaaactcggttaaatagcagtggtatggagttggttcgggtgcaattaggattcgctggttgctttacggtggatgctagaggtaaaagtgggggtttggcgcttcattggtctgatgattttatgattcagatcaaatcatttacaagagacatattgacgctttggtggagaatgaattgggatttgtctggcggtttactggcttctatgggagccctgatcctggagggagattggaaagttggaagttgttacataggctcaagacaatgttcaacaatgcttggatttgtggcggcgatttcaatgagattttaagtacaaaggaaaagaaggtaggcggccaaaaaccagattatcttatgaaaaaatttcgaaaagttatttcggattgtcatttctgggaaattacttcagctgggaattctttcacttggtgcaatgggagaacctcaaatttgatttatgagaagcttgatcgagtgttttgcaactcggtatggatggataaatttaaatcaaataaggtcactctcctcaaatggtggaattcggatcataggccggttttattggaagctcatcaaggtgataggggaggtcgtttagaagaaaatggggctctatattccattatgagcatgcttgggtgaataatgaagattgcctcaagattattaacgaagtatggggggagaaagatagaggcaggcctattgatactcttactcatctaatttccaattgtggaaggagattacatgagtggaatatcacacaaaagaatgttatctttgctagatccaaggagttaaaaggaaagattgattggctttccaagtcgtcgaatgtgacggattggcttgctcgtcaaaaattggaaaaggatctaaattgtggggaagaaaaaagggagatgtattggagacaaagaagtcgtgcactttggttaaaacatggcggtcgaaataccaaatttttccacttcaaagcttctgctagacggaaaaagaataccattttggggctgtttgatgatcgtgggcagtggcgaacttccgaaaatgatattgctgcagttgctattatttattttcagaatttgttctcgaaatataatggtggaattgatgttaaagatgctcttagaggatgtattccttgccgaattagtgctgatgagaaccgtgccttacttgagccttttacaagtgaagaaattaagtctaccttgttccatgttcaccctttaaagaccccgggtaaggatgggttaccgggtctttttttccacaaacattgggacttaatagagactgaattcactgctacgtgcctcgatattctgaaccacaattcggattgcaaaaaaataaatgagactcttatttgcctcattccaaaggttaagcaaccaactaagatgtcggagttccgacctattagcctttgtaacgtggtatataaggttgtgtcaaaatgtctcgccaaccgaatgaaattaagtatgaattcaacaatttcagaaaatcagagtgcctttattggcggtagaattatccaagataatgccattattggattcgaaagtcttcattgcatgaggaaaggacgttttggaaatgggagcaaaatggctttaaaactttatatgtccaaggcgtacgatcgagtagaatgggattttttagaagctatgatggatttcttggcatatgaggatgaatggattaagaagattatgaactgtgtaaggtcggtctccttctcaatcatcttaaacgggtcgatcaaaggtctctttctcccgggaaggggcttaaggcaaggagaccccctttctcctttcctatttctcctttgttctgaagggctttcatgtcttattcaagaagcggaaagggcagggaaaattcatggtttacgctttggaagtttggaacaaaggcttttccatctattttttgcagatgacagccttgtctttctcgatgctaatatggatgagtgtaaggcgatcaaagaagttttggagaagtatgagaacctctcaggtcaatgtatcaattttgagaaaactgaaatgtatgtgggctgtaagattgatataagtatggcagagaatatagcggctcatttgggtgtctctttggttaaaaatcacactaaatatctgggtatgccttcttttgtgggaaggaataagaagcaagtgtttggcaacattagagataaggtggaagctaaacttcaaggttggaagatgggccttttctctcaagctgggaaggaaatattgatcaaagctgtgatacaagctataccttgctatattatgagttgctttaggattacaaaaggcattctcaagggaatataaagtatgattgctcgtttctggtggggttctacttctaataaacacaagctccattggggtagttggaagaaactatgtagacttaaggagcaaggaggcatcagttttcgtgatcttgaagactttaaccaagttatgttggctaagcaaggttggaaattgatgacaaagccggattgcttaatgaataaggtcattaaagccctctaatttccccacggtaactttatggaagcaagtataggcgactatgggtctatagtttagcaaagtatcctttggggtagggagatcttacttaaaggctctcggtggtgtgttggaaatggttgtactattcgaattaatgaagatgcttggctcccaagaggactccctttcaccctccgatcaaaagctttgctcccggaaggtactactttaaacaagctgattactgacgatggaacttggaaagttaatgaagtttatagctggtttcataaggatgacatcccttgggtgcttggtatcatccccataacattgagacctgactggctctcttggagtttgaacactcatggtcagtattcggtggctagtggatacaaagtaagatttctccatccggatcttgctgaatgttcgaataaatctactttaaaagcttggtggaagtttatttggggctctaaactcacccctaaaatgaaaaatttcatttggcgtgtgtttaatcaatgg

SEQ ID NO: 47737 - DNA, 1180 bp, Cannabis sativa
  modified_base (468)..(485): a, c, t, g, unknown or other
tgcatttgtgaaattatcccttaaaagttatcaatgtcaaaataaaagtatttaaacatgtcaaaatattattaaagttaaaattagatagttaagtcatttttgaaaattagatgtaagtgtcaaatgtaaaatattattttattagtacttctgattgcataattctcattatataaataattttaacatttatttatagaatttaattttcattttaatgatagtgtaaattataaaatatatattttatcaattgaagatataagagtaaggataaatttttaaaatagacattttaaataaacataagcaatcatataatagggattatttcaataaaatataaaaataataaaaatacagttttacaaaattttaaatatttttacggttttaagattttatttacataaaatacagtcttttaatgtatttttatgttatactcttgttattttgttgttnnnnnnnnnnnnnnnnnntattattttttatgttgttttgattttgtttggatgttgttttcctgttatttttatgtagtttttttgttatttttgttttgtttttatggacactgtaaaaatgtgaaaaaaaaaaagttttttcatttttacactttaaaatcatttttttttttgtatttttacggaattctgcacaaaaacttatgtaactaacgaagcaacctaaatcacaattaaaatctgtatagaaacccacatagaaactaccggagcaactcaaaccgtaaattttaaaaaaaaaattagttaaaaattaattgtatgaggtaaatctcctaaaatctttaagtataaaattgtaaaaaatttatcaaaaatagtaatttatgtaaattttcttatataatatgtctattttttagatgcatttcacaaaatatttaatttaataatcaatttagtaaaattttaatggatctgctagtttttttttttttttttgacatcatgatacatttaatggttcatctagtgagagaagcaaggttgtgtgggccagtttgggcgagatggatgtatccatttgaaagaaatatgaaggtacttaaaagttatgtgcgtaactactattggccaaacatgttccttccttggcctaaatatttaattggaacacccgaggtaacttttgttataaattaattatcaat

SEQ ID NO: 47738 - DNA, 2677 bp, Cannabis sativa
atgaaatgaaaacctctgcacagtttacgtgatgattgcgtgttgtagctgtatcagctcaccctgacgtcacgcgcccacgcgtacaaagagtgtgtgttttaaaaaattgggccgaaaaaaccgggattctaagcccaatatacaaatcgttaaaaatagaaaattaccaaaaaaaacggtaactatatataaagaaacttaacataacaaaaacaaccttatttttaaaaataattgccaaaataaggtggcccatgaaaatctccttaaaatctatggcctatcctagatttttccaacacatcctgccttcatggcatttacaaggtattacaaggtataagcacttttaaaatatacctctcttgttttgttgagatgatttattggattgctcaatgtacctgaataaataaaataatttgaatataaatatataattttaacactttcatatagtttgatacattaaaaatgaaaaacttctaatagagaaaacatttaaataactaacattgttatgccatgaaaacattatgcatacaagtcaaaaaataattgtaactaagaaatgaataataacaatttctttgtagttgggtcattttgtactcatatagttgaactataatttttccaattttacttttcaaaaaaaaaaattgaaaaaagaaagtgtatgtaactgatgttatatatttaaaacaatcaaaaccatagcaagtaagaaatacacagccagaaattttctcaaaaaacgaaatgtgtatatataattgtatagtgaaaatacctgtacaaatcaaagcaaattactttttgatttgcttgaagagatctgaggtagatgatggtagtgatcctcatgatgtgtttgagctattaatctccagagagtgagagactgtaaattcgagagagagaggggcagtgtttagggttagaagaaaatatatttatatgtagggatatttgagggtgtgaaagttcatttgtatccttggtagagttgagcaatgtacaaaaaagggcgagtaattttaactagataatagagtaatgatccacttcataacttttactttattaaaacataaaacttcttttttaatcaattggggtgtttggcaaaataatgtttagaaaactgaattaaaaaaacaaattagaatatattgaaatgttgctttctatttttaaacacaactttttttctttgttttaacatatttttctttatatttcctcacacatactcagaatttaggtctaagtctgtggtcgggattcaggttgtcagtgtcgagactgagttcggggtttgggtttgaatccacgtcggtgattcgggtcggggccaagtacgggttcgaagtccaagctggttacaaggtctaaaccagagtcgagcaaggtatgggtcagggccctgtacggatccaagggcattataggatgtacacaaaagggcataagagtaatttcaagtaggatacatactttttttttagtgataagacaaatggattgaattgggcatccaattcccaattggcaaaacaaaaattccacatttcattataaagtttgagaggagaactcttattggttagattattttataactccaatatcttcattttacatattgaagatagaaaagaagccagcatatattaaaaagaattgtaaggtaaagaaaggaacatcagctgcttggttagcatttgaagaagagaccttctcttctaagttgcttagtgtcaagtttgtatcttgactcactacatttgttatcgaatctgagggttacaacagccttgaaatggctgagaaacttaattgatgaatcgagatcagtacaagacaatcacaccaagaagacttgcttctgaaattacaaagaaagctcaccaatgaactctttacaaccctccaaaactctataaattttcttctcttttttctaaccttactcataatgaccaagcaacacctaattatagttataaacagtcataactaattaacagaagaaacttatacaagattattaatagaacaacttaaaatcaaaacatatctgtcgtggaaaaacatatgaagaatgattgaaattataaggtaagtaagaaacatgaaatgtctgatttcttgtttcagtaacaattgatgaaagaaacaagtgtactagtattcaattgtatcattctcaaggacattttcatgttcatgatcctcaacgaaaaatttgcaacaatcaagacattttccttgaagggaattgtgagacctcccattcgatgatcaaatctatcttctaagattgttggttcggatggcattgagatgatttattgaattgtgtaatgtacctgtcaaagtacaatagaattagttcaaagaaacttacaaatctaccttttctaaatagttttattcaatgaaaataacaagtgagcatctaatagagaaaacaatcaaatacctaattagtacttctcaaatttatgaaaaattgttctctcattcatccacattgtctctcttaattaaataacaacagaatacaattgagaaattgttgtttgtatcatttaattgatgacatatatttgggaaccttcttcaacttttcatccaaaaactacaaatgacagcaagttaattaaac

SEQ ID NO: 47739 - DNA, 3016 bp, Cannabis sativa
catagggagatgtttactaatttgaaatgaatagaacttatgaaggaatgacaaaagaataaaagctcaagttatcactttctattctgacttattaaggaagaaattcattaaaacccatctttcttcacttatttttattacccatcacagtttattatggattagtaaacatgaccacaattcatcaagacatgaaacaaagtttgtgtttgaaccaacctcatatagcaagtcaataacacgcttgatttgagctccagctggggctttccgaatgctgttaatgtgttgaagtctatctgtatcgctagaaaatttgacagcaggagcaggaggtttgacactggctggaagatcagcgtgcatgaatctttgagtctgagtctgagtctgagctggtttaggtttagaagatgctgcaatactggtgagggttgattggcacttctcttgctgcctcttgaacctgtccaacttgtcttgcaacgccatttgatctgtatacacatattgaccaaacaacaatgctgaagagatgcatatgaataaacaattattgttcataacttctctaaacattatttggtagctattcaattaagcattgtccattttggttcaaaacttctacaggttattaaatggtaactcttcaatgaagcattgcctatttttcttctcctattaaaatacaggataaaatttggaataactacaaaatatctctccaatcaacaacacaacattgttcaggcaacttatttgtcactgtgagttgctaaaataattacaattcgcctagaaacaccataaattagattttatttggagagaagtttctcaatgtcaccaaacacttcatgatcaacatcaagatatagaattatcccaaacttaaacacactactgaaataaaatatatgcaggaacaaataccatacacaagggattcacatgaaagaaacagaaaataaaaattattgaaacaaaatcagaaaattatgaaagtttcactggccctggcccttaagtttcaaatccaaagaatgaggacaaaatctcggaaacatcaagattagaacaaaatatcttatgattataaacatatattcgtattgtaacgttttaaatggtaataatatactcaatttctaaatcttacaactaaacatcataaaacctaactactattaaaaagaagaaaaaaaaaagaaaagagaattggataaagctaaatcatatccctgtagaatgcccaagtagaactctatacaaatcagatataataacttgagaatactcaaacaaacaaacacattttccatcgactctttgtatttaatcctcattagaagcctcaacaaaaccgtaattacatacagtacctgttgtgagtgcagtaattgtttatccggcggccaatgattgaaaaggaattcctaatctacgatctccgatctccggtccccgatgagttgtgaacgaggttgataatttatctagggtagagctgatgagttagggcgagaaaggggcgatagaaaggcgagattgagtaacggagagagagccaaggagttgtgctacgactttggaaggatgtgcttatcaataatcaataaaataaaataaagaaaaaaagactctttggaaggatgaagagaattatgtctgaaacacacctttggttttgtaactgggcctcgtatgggctaactcaattaaatacgaggggaacctattttcatggttttagttataagtttgtaaaaatatgtatttctttttcaaaagagttatgttattttatagcaaaatttaaaaagaaattataaaatatgagaaaaatattataaagtaattggttataaatatacaagtagagtctcttattcaatacctctaatgtttcagaaccagaaaactatatgtgaatcgccaagtaggtatgaagagctcaaatctaagaccttgagagcacatactgatagacttttcttagattagaaagaattcatacacaaatattgaaatcccaaccgaatgcttttattaatcaccaaagaattacacgaaatagctcttcgataggctttctctcctattctaacatttcaagaggtgtagatatctctcccaagagatttctctcaattctaaactctttcaacatgactgaaaccaagttctaattcgctatatatatatatatatatatataaatagagagagagagagagaataaagcttgctacatcagcaacaactactaaccaaaacaaagactaaaaactgaatcacttgctgtaataaaacttgagaattgctaaaaggcatcactggtgcctagcaccctccgaggtgtcataccgctattgatgtaattaaatatcaggtctcatctaacttaagaaaatagtttttagagaatatcgctaaccaatcgtggagtgccacctacaaaaggtgtcgggcaccactggttcccaataacaatgctctaaaacttaagcttgaccttatggctgtccttttggtagacgcatcagaccaggggctcatcacatacctaaccatttgaggcttacagctacctttttgagtcctcttaaataaaatttatacagcatcattctaatactaaagaaaaaagatcatattttctcaacttccaaaccattacaagaacagagaaatgagattaaaaaagaccccttttttacatatccttctttagcagaaaccattaaagcaataaaaaggtcagacatacataaacccaaatgggaccaaatactaaacaggatcacaacattgctactaattcaaatcaatcaaaaaaagagggacaattaggggtttgagataaagagaccaaaaccattgataatctaatgtaaacattcataatttttaagataacaagattcaaaattttccatttcttcatagatatctcaaacatacatagattcagaaagttgtagttaacgaaaattactgcatatgaaat

SEQ ID NO: 47740 - DNA, 3205 bp, Cannabis sativa
  modified_base (3126)..(3137): a, c, t, g, unknown or other
tggactcacatcccttgaggagtgctgagctatcaagaagggacttctcgagaataaaccttgcctaaaccaaactttgtgagatgatgtgactatgacatagtcttgtcgcattattaccccttgcttaaagcacgacctagaaggaattatacaagtcgcgcatatactaagatatatacgataactatgaagacttcttctgtgactcaataaagatcgattctttacatagcgagttggtccgaatgacctcgcatgctcaatgactccataaggaactcgcatgtcctcgatcatcgacgctgacaaggtatccacatacacgactcgattaggatgcaaatacctaagtaagaggtctactagtctcgttttaatttgagcgtgcgagcttgtgtgagtgaataaataggcaacttatactatggaagttgcatacatgtgaattggatttaaattattcttcatttattccatctacatttatttcaatttaatgttaatatttaatgtaaaatgattctacattcaatcaagttttgtgtaactaaagagacacttgctttgtatataaaggagtgatccgatatgaatagaacaagacagatttccttgcaatagtggactaagccgaccgtgatctgactgaactactatacttacttatgttcattattttcattacttttcaatttgtctgcgtagcttcatttatgtactcgccgttctatgttgagtactcgttattttctaattaaatattgaatctttattttatttggtattgttcaaatttctctaacaacatttggcgccatatgtgggaaattaactattgattttggaggaaaatcaagatggttgggaaccaaaaaaatggaaatattggatctttcaatgtcggaacaatccctgtttcactcctgggtgatggagctaatccgagtgacacaattaatggaggtgtgggttgaaccaatgtcactcctctcaatttgtttccagaaaatgttggccatgtaggagaaacatcgatatcagccgccactataggccatttcctgcctattacaccggctgtaacttctgaaggatttgtctagctcacaacagcccaatatacggtcatgtaagaacaaatgagggcattgcaggccgaaattgatgggagagttaggacccgacgtccaccccgagtcccaaacacgcattcgggaaacgctcagttaactaccacgaatagacgacaaaacgaatgtcttaacaataatcgtatttgcatggaacaagggaatgaacaagagggtctcgatttgaaccaacccttacataattctatgcaaaatatgaaaccgatcacacccaacaatggtcacactagagaagagagaccacaagaggaagaccctgaatgtcaaaaccctcaaagccaaactcagccacaaattgaggtaaacgaagttgaatctcacttttcctctactaatagtcactcccctagtgtttataccaggtcaggctctatcgaaacacgaggaggagagagataccatgttcataaaggtgatcttcatgatcatctcaaagaaatttttagggcgcgatcccaaacactaaggaatcgcgataatgatgaccccgtgatccctaagtgggcatcaaggcatatagaatatgaataacgcaactaatctagtcaacccgccaaacgcactagctacaactacgaaggtagtaatcccagctaacatagctgcggttgctgccataccaacggtaacgcaagccaatcttgttttaccatgagggatagaccaagaaagtctcctgggagcattgagaatgatcgagtaacatagaaagctcatttacaaactccatgggacgttgccttttaccgatgaagtgcgacaagcttgactctcgaagggcttcaggctgtctaaatcgctcaaatacgaaggtactactaacccaatcgattatttagataaatttaatataattatggaagtagatcaagtaccagaactagaaagatgccggattctctctgcaatctggaggagaatgctcatgattggttcagccaattacccgaggcctctatatccacatgggagacctttgtagacctattcttgacgcacttctaggccacgatgacgtacaaacttacatacacaatgttagaaaatattaaacaagtgatcgttgagtctttacaaggttatattaaatgttttaacgttgaaataatcaaggtcgagaaggcccccgagtctttgttactttgtatgttgattacaggtgttttgccaaggagcgatttttggaaggaactacaagcacgatgacccaagtcactggtagagttcttcgtaatggctgaactgtataaaagaattgagaattctttggccgagttggagagagggaaggagaaacgcaagtctcctgtgccctggtcgcattctcgaagttggaaaggaaaaaatttcagaggccaaagcccaagaagacacagtccacaaaggcgacagagtccaaagctcgctaaatctccctccaagaaggagtcatccctaaaaagaaaagggggtctgcattttgtcaattacactaaattatttgcttctcacgaccatatttatgcgatcaaggagcagaattgcgtgttcaaacaaccaccacaaatctgtggaaaccatgaaaaaagaaaccccaagaagttctacaagtatcatagagatatcagccatacaaccctagtgttctggtttcttcaagacgaaattgaagcattaatcggacgaggaaaatttagccaatacaaaaagaatggagagaatcatccctgagcagatgatagcgacaacacaaataatgtgagtggctctcgagcccctcgcaacattttaactatcataggaggaccaaatgttggtggggaatcaagaaaggtgcaagagcgctatgcaaaagaagaaaatgaaaaaccccttgccagtgaacgacttgagaagttgttcgaaaaagagtgtgatgatatcactttcatggagagtgatgccaaatgggtacaccatcctcacaccgatgctgtaacaccctaactaacannnnnnnnnnnngtgatttttaaacatgctgtgcagtccgttgctaatcaacgaggtttatggaaaacgtgattaattaa

SEQ ID NO: 47741 - DNA, 1371 bp, Cannabis sativa
ttatatgtgtccataatttattcgatcgtccttcgacaaatatatatgcattgtgatttgctagtagctagctagattagttgcacatgcatacgtataatcatcttcaatttgaattgtggcccatataaatgcgcaccattcattcatttgtagaaaacaataactctctctgaaaagcatttatgaacctatgtcccagctcaattagttttgttgattcattactcatataaatgagcttgggtaattgggtacggcaggtttttgtaatttgttagaattttaactgcattccatctcaaaatatattagtaacaagagcagtaatcgccatcaatctaactagtaatgtgagattctttaacatacccttcaagacggtgattattttttgctcaccggccaatcttcaacgacacaattacaagtgtatatttggctcactagcagttcttttggcacgttttcttggactggagacacttggctcacaataacactttttcgcatcactattcccgaatcacaagcagttcttttggctcatctttttaaaccaattcttgaatttagatcgaatactcattaaaattttatttgactttgatgtgtattagcatgtattaatctttaattagttaatgtttgtttgttagttgttagaactgttaggttagtttaagttagtagatgtttgttaccattttactaattgtataaataccctgtttttcctccgattgaattaatgaaatagttcttcattttctatcttttcatctcgaccgctccctgagcttaaatagtatcagattataacaaacctttctcaactaatctaactaactcaatgatgtttaatactatctattttagcatcatcgagtgggtatctaatttattatttatttttggccatttaagatttttgacatctcatatatattattgtgcccctaaacttttaagtttttacaatggttcctaaactattcacattgtaaattgataattctgaagttttgtcacacgtagtaaacaaaatgataatatgactcatatcagcgctacgtgtatgatttaacattaaaaaaaataaaaattaaatattttaaaaaaataattaaacaaaaaattaattaataattaagaaaattacgtaaatcttaattaaaaaaaataaattattttttcaaattaattatattttttggcattgacatgacaatatgacaactggctaagcagtcatgtcatcattttacttgtcacgtgtgataaaacttaacagaaagaccaatttacaatgccatgaataatttggggccatttataacgggctaaaaagtttaggggcaaaaatcttaa

SEQ ID NO: 47742 - DNA, 1096 bp, Cannabis sativa
tagtgtgaatctccatgaatccctctaagtatcaaagcatgagtatgagagcttatggagagcatctcttaacttaaaccttaccacttatatcactctataacttaatacacccaaatctctcattttatgcctaaatatcttaagggatatgcggacatatatattgggctcataaaataagagatggtggattatggtttaatgagcaaacctatacttgttagagtgatactgtgtggctcaaatataattgtcaaaactgatcattcattatgattctaatataagttttggtattttcaaaatgtcactaaattattttttaaacattaaacaaatatatattaaatattatagtgacatttcaaattgccacaatttatattaggtgacattttaagatgccactaaaaaattaattagtgacacttgtatttttagtcacattggtatagcttatattttatacaaatgccactaaaatataaaatgtcactaaatattagtaatagtggcattttaaaatattactgattggggtttttggtgtagtgaatatcgatattttgtaaacaatacgtaaattcattaaaatattttgacagcaatagtactaagtgaatatcccaattgggtcgaatattttgtgaactttatatatgtttactaatattttaattaagttgcaaatatcccaattgagtcgaatataaacaagaatcttcgaaagttgaagtcccaatttcattaatattcaaagttgataaaattcacaattttttttccattgggtttggcgtgataacttgtttgaactctctttataaatcttttcatttataataaatcattaatttatagagaatatcacttttactaggatgttttttgttttttgttttttttgaattaaagatggaatttattcaaaaaaaatactcagaagatacaatattctttagagcgctaggagcattatgcttgctaaactcacaatctgtcagataacaagaccctctagcaacacaatgagcggccttattagcagatcgtttaacaaaaatcaaataaacattagaaagagaagaaagca

SEQ ID NO: 47743 - DNA, 2015 bp, Cannabis sativa
gaggcatgtctactctcaacttggattagctgaatattagctcaattcaactaaaaactactttttccaagcaaactaagacaaattgcatcttgcaagaagaaaaaagttcacctcaaacgactcacatgaaaatcgtatttttggttttcaaagggcttgccaatggagtttaaggatttctaacaagatccaaaatccttaaattaagcttcaaagaggagaagaagaaaaaaaaattgaaaaaaaaaatttggagaacaaattacctggaaaaatgaagaaaacttgaaggattgttgaagcaagattctcaagctctcagtttcttctttgggtgtgtgaactagtgagaaaagtgaatagagaagttctctatttataagctattgatctcctctattcgtaagccaacaatgactgaattttaattttaatttaaaagataagagagagaaattaattaccttattttttatcttttctctccttactttttatctttaatttttcccaaaggaagaggatttcaaaattcatagtcccacaagaagacattgaagaactgaaataattgtccaagattgctaaaattgatgtccacccggtagttttgaaagaaataggcttagttcacgtaataaagttaacctcacacaagtgtaaaattgacctggggaaaatatttacctaaaaactgacattggtgacgtggacatcaatatttgacatgtggcaagaaagaaaacatcctggagttgagtagttccaattggttttatggtactaaattaggtacgcagcgggataaatgtttccgattctcatcataccatatctctaagatcaccatatatatatatatatattaaatctgaaagtaaaatgaaaagattatttatttctcgaagcatgtcagagtatcctcaaatcttttcgtatgttgtacccttggaacggtgacatcaaactcacattgatgttaacgttccagatctaccaccacacacaataactagtgtgggttagtataagataaaaaaatgtatataaagttcttgtttttctcaacacatgagcaaatacaattctatagtatttatggaaaaaagagattaattggattaattcatttaggtttacaaaataatgtatctctgaatttgagttataccgtatattaaataaacccaataagccttcatgcattttaagatgtttgtttgggaaactttggtgatatcaacacgtcccgtttattgataattgagggcgtcaatttctcgtatccacggatgcaataaaaaggattcttaggtatctcagtggtgcaatgtactttggcttgcatatcaaaataccctctcatcattaaatgtgttaatttctcgtatcaacatgtagacgctctacatcacgatatcctattcactttggctctaatttaatagcttggtcatcaagagtactgatcccttgaagatgcatgcatcaatttaagtttgaggaggagtgttaaaagcaccgatatagtttcgtagttagttagttagttacaattctaactacgtacctttttatcagtcttttagtgagctgaacttagttagtctgttagcttgtgtgagtttagcttagtctatttcttatttgtataaaattgtattaccaaatttgatatataagagattcaatcagtctttcattctcttcctttctcttcgtctttctcaatctttcttctctttcaatattcaatcatgtctacaaaatctaatattctgcaatacatacacttccacataaaaaaaatagttattattttgtaacatcgagttgtgtccattttggtgcaaatattttgaacataataataataaacaaaaaaagaaaaagagaaaatagtaagaatttcattgttaatcattattatttggtaatttttttcactccaataataaacatctatattaaaaacatattcatgtttgtttataggatttcattggagttgt

SEQ ID NO: 47744 - DNA, 3022 bp, Cannabis sativa
  modified_base (2531)..(2537): a, c, t, g, unknown or other
  modified_base (2944)..(2958): a, c, t, g, unknown or other
cgcttatttaaacaaacaattatcttagataaaaactactaaattacccttaacttacttattaagtaactgaccaaaaaagtaccttttaatctgagctttttaaattggagacttctggctagaatcattaccgacttttctttttacaaacttttcaacttgttcgacataattgcacaaaagaaaatacttgataagtttctatgcaaataaaaaagaaaacaaggttaattattaaaaaagctaccctgaacttcaggaggagaaccctcccaaacaaggaaggacggggaatcctcgtcggaggagtcttcttggtttggctccacgaccattgctttccctttgttaacaaccgcttagccagtaagatggatcgctacttcagaatgatccttgatgcgaataggtcgtcctattggctcctgactttgcttcttaggatttttcttatccttgttcatctttggaacttctcgctgaggagtgggatccttggctactttttcattacccagggttagtggcaagcttcccgagagtaggtgaaaaggcttcaactcctccgagcaaaccttttgtttgaagattcaacaacctcttgtatgtatgtatgtatgcatggaggagaaacccactgaggagcgtttctctccttagctctaaggggacgggattcctcttactccactttcatgtagtcttcatccagaaccaagacatccccaaactcaaaaataggctctccgacctcattatatcccctaaacggaagaacccgagaagcttcttcctctctttcctctaatactttgtctccatcttcattagaaggagtcgttgaatggacctcgacctggtcatcaatctcttagacttcaatgtccctagtggtatcttaaatatcctccctaagagttctagcttgttccacactgtccatcgtaaaaagctgagcagtgtgggtgcttatccgaatcttttctataggtttacttggttttcgccagtactttacgcctgggcaaatggtttggtttagtagtgtgcttcgcaacagtgacaacaagttttgctaatacagagtgtttcttcaaaggctttggacgaccttctagcaatgtgtcagggacgtcaacccgaactttatgcattcaagtagtaaggtaaataatgcctccaacctctattcaactcccaaatgaattgaaatcctaaaaatcctaattagccaaaaaaaaaaaatgttttggttgaagtttgacccaccccacctttgcttatttttacttttttatttagacaatcaatttgtgagatataatattttagtactaagttagtttagaaatctacaattatcggagtatcttccccatttcacataatatcttacctaactttttctttttcaattatattaatctatgaacagtgatatttttcaaaataaacaaataaatataaaaagtaactttactttccttattattattattattttattttagataactaaaatttcacttacctaatttccgtttcaataaaaatacccctaacactttttagtagaataatatcatttaatgtttcatgttatattgaaggaaaatatgtgtttttgttcaaagtaatttgccgttgaagtttaatttccgattgtaaataaattttaagtttaatttttgacgataattatatataggttataattctaaaatttttgtagatatctaattattaggtgttaagtaaattagatgtgacaatccctaattagttcgtatcattatttttatttttatttttataacaattcaaatataccaataaaaaaataacacgtggataatgatttgacatttaatggtcaggtatctataaaagttccaaaaatatatcttagctattattatcgtcaaaaattaaacttaggtattatttgcaatcggaaattaaacttaaatatttactcttttgtttatttattgtttttatggttgtataccattataagttgatgaaattttttaaatattttacagtacttaaaatgaagttaaaataatttctaactaaatagctcaaaaaatcatttgaataccaagctaataataaatagggtttaggcgtgtttggcagttgagatggtgagtgagtttcaggtgaatgtaggaaaactgttagcattgcgattttgtcttctgatgttttctagacttggttttttaacatctaaaactgaatcttattcgtctatgttgttggttggatttgtcatcccactactaatattgtttttcactctaattattcttgatgttatttcattattaacagttgttggtgataatttttataatattattctacattttgtgaatagtgttaggagagtttatttggacatattatccttgatttattagtctttttgtaatagttaatttgattgaataaagggtgaaaactatttgggatcctatattttgcaaaagttactaattggaccttctgttttgttnnnnnnnaaaatagaccctgtatttttcaaaattgtacaaataggacccagaattgatttttgtcaaaataaaacttaataataatcagatctagagatgttatgacaaaactaattacatttttgtatctgttcgtgttagaaattgtcttaaaattaattatattaaaaaaataaaattgttgaaaattgagctcaagtcttatttttactatttaacaaaacaaatggtttattttaccatttaacaaaataaatggtctattttgccatttaacaaaacaagatgttcaattaataacttttgtaaaacacgaggtctaaaatggtattcacccttaaataaataaaatttcccaagaaattttatttacactcccaaaatttttaagtacaccccattttaataatttnnnnnnnnnnnnnnntttatatctttaattgtactaagtatttttaacttttttcttacaatatatatacttaaaaaat

SEQ ID NO: 47745 - DNA, 786 bp, Cannabis sativa
atataacttaatttataataacccacgaaacttagtgcttgtcttatatgggatgccatgcatgaataatgttgcaatttactataagataatagtaattataacaattacaatgggtataaaaaaatgtactcgatctaattattcccatgtccactgtaataattataatatagattttcttttaagtttttaagaaattcgatttaaatcttaatgtaaacaatttgctttcacacgtacggaaacaaaatcagtactgcaaaacaggaattttcgttagtcaaataagtttttctcgaaaatcaacaagaaaagtttagaattaattaccatgagttttttttttttttgtaactataaaagttaaaataataaagataacaaagaaaactaaacaatacaaatttaatattagaaaagataattaaatacagcttttaaagctgagaccacagaaagtgaataaaaaaaaaaaaccctctccatgggaagtcccacatcttgagcacaacacaaatctattagtaaaacaactgcttctgctaggaaaacttaaaaaaaacctgcaaatgaaatagtttaaaagcaataagtacttttaatttttaaaacagaaaaatattagaatgtaattataatagagtcaactaagaaacacctttggtttgactctttatctaacttcatattgatatcatttcaatagtaacagaatgtataaatttaaataacctaccacgctaaagcggattatatacatatctattaattttgacaataact

SEQ ID NO: 47746 - DNA, 2684 bp, Cannabis sativa
aaaggcttcccataagccttgtgcgaccactgccatcttttggcaccaactgatggcagtggtatcttgttagggtttcggacattgaaatgaggttttggggttccgagactcccaagatatgattcatcgtaaaaaaaaaacaagtcaaaagacaccctgagttgtctagaaacatgcacggccaagaaccgccacttggacgtggcacggttggatttggagctaaaaagtacataattcctttcagtaaaataggcataactctctcaattttgatcaaaatgacttggttcaactcgaattggaaatatattttcaagaaggatttaagtgtgtctcatagtcatagctcaattatgaagttattggactcaaaattggctcacaagatagactgacacactttactcggaaattagttggggttattaagtgagagctacaatggggtgtttggagagctatgccacaacccatgtggcatcacgaccaagaagtgccgtcccaaaatacttctctctaattttgtgaattcctagctaagaggtgacattccttgtcactcctctccaattttgtgtatttctagctgagaggtgacatcccttgtcactcctctccaatgtttgcattttcaaagcgcaacgccacacaagaaagatttaagacaagggaaataaccaacttcaacaacaatcccaatgtttgtgggatatttgcctaggaataaaggatatttttcatggatatttatttattcctatttttattcattatttagaataacttatgagatttgaaagttcgacaccctgacatgtgggggatcactaacaaaccctaggcctatataatgatagtgataggtaattgatgatcaatcctcatgggaacgatactttagttaacattatattacttgattcgattacgtatacttgcatatcaattttaccaaataagtttttggcatcgttgttggggattgaatttattaatattagtttaattaattttcattctaatttgattattgttttctcttgtttctaacatgtttggttgagatttttcatatctatggtgaatctattatatgcccagtagaagaggtgcaaagagccttgtttctttgaatcctgagattgagaaatcctgcaagcaaaatagaaagaataagagagaagcaagaaaccagagaagatggcacataatgaagggaatgatctgattcctggagttatgcaaggaggccaagctcaccctaattctaaaaggagcctacgtgagtatgtactccctactttgacgggggtacaaaacagtatcaaaccaccaatagtagaggccaacaattttaagatcaagtcagctatcttacaaatggtgcagtccactgtccaatttagtggattgacttctgaagatccttacactcaattggctaattttcttgagctttgtggcacttttaaatacaatgaagtgaatggtgatgctatcaaaatgaggccttttccattcatatgaaagggtgaaaagttggttgaattatctacaaccaaattcaattgtcactaggcaagatttggctcaaaagtttatctaaattcttccatccttctaaagctgctaaactgaggggagaaatcattaacttttgctagaatgatggtgaatctctgtatgaagcttgtgagcggtttaaaaatctattgagaagatgccctcaccatggtattgcatagtggatggtggttcaaaatctactaggaccatcatttacgctgcatgtggaggcacattcatgagcaaaagtgcaactggaccttatgaattacttgaagacatgtctatgaacaatcatcaatattttaatgaaagagcaattgggaagaagaaagctggtattcatgagttggatgctattattgctttgacaactcaggtagctacactcactaaactgttacaaaagacaattgaagctgccaaaattgttcaagtctcaattgggtgtgaggtttgtggaggaccacacacttttgacaagtgtgaatcaactaaagatgttgtgatgactcctactcaagtgcaagccatagccaattttcagaggcaattcaacaaacccttcttcaactcatttaataatggatggacaaataatcaaggataacaacctcaattttagaaccaagcttctacttctcaacaacaaaatactcaagctccacttactccagcaattgatctacaagctgctttgcttactctagctaatatacaaactcagttcatgactgagactatagcatccatcagaaatcttaaaatacaagtgggacaattggctaatatgctgcataacaaaccttaaagaaattttccaagtactaatgaggtaaatcctaaggaaaactgcagtgcaatcactctaaggattggtaaagagttagaagagccagttaagaagcctattcctacaccaaagatcgagattgagaaagatgatttaaaggaagacaaggttactgagaaccttaagaaaaagtagccatcgagttatgagcaccacatcaagatttcatatccttagcgacttcaaaagaagaaacttgacaagcagtttttgaagtttcttaatattttctggaagcttcacattaacataccttttg

SEQ ID NO: 47747 - DNA, 1493 bp, Cannabis sativa
gatagagtggtttactataaaagggtatataataaatcaaataaaaacatagagtcatagtggttgtgtacaaaaggtaccaaaaaaaaaaaaactatcatttaataaaaaaaaatgaaaaagttaaatcaatctcacttctgctttttttatttattttttttttttttatgtatttaacttcaaaccaaaggagcaacataaataaataaaagcttgaacaagattatgaaaaagaaccacggtcgacttggtgtcctccctccattttaaaaaataaaaataaaattaaaattaaaaaattaagacagaaaagaaaacgtaatcagcttccatttccgtgtgtgttaagatacgtttccaacttccctgatccagccaatataagacctacagtagaaattttcaaaatgttacatacaatgtaagtgttataataccattgttcttaactcagccattttcacaagaatcataagtgttgaatttatacagattgtaatggttgaaactgtttatgagatatacagtactagttgtatgcaaagtacctaagaatagtggggagggtcttgccggccgcgatttgaattctgggtgaaactgcactccaacatagaatggatgattgggaagttccaaaatctgcacatttgatattggaacacggcaataagaacaaaatcagcttcaacgttttcaagttcaagtgggtcatccttgaaacacggccataagaaactcacctccattcgctttccactttcatctttcccgacaaattttagcccaacttcttcaagaatgccaatgatttccggatttacctacatcatgtaatagccacacaatatatattctacaacaaaatatgcctgccaaatacacttcagccaaataaagtcttattaaataataacctcgtatctgtgtcgatgtcgttcatccacatactccgagttatggtacctaagaaattttcccaacagatgaaaaatagtcatgtgcatgaatggaatagcctgagtggtaatacaaacacacacacacacatatatatacagacataattggtgagcacatacagctttgaagtaatacaatcacgcgtctgcaacaatgttctcctagatcctagtctcattgtgtttcctttgtgtgttgttgaaccctaatgtagataaacaataatgaaataactaagaagcatttaaactttacatattttattttcagaagagcatgagaagcatcacagtaatgtgtacctcaggcataaaaattacaacgtgctgagatgactctgaatcatcaaactccatgctgtttgccctttccatacccaaaacctaagcaagtcattttaaaagtgctacctgtgattcttctactttatcttttttccttcaaatatatatagaggagagtgatgagagagtgtaccaacacataccgttctagcaaactcaatcacagatatctgcatgcccaag

SEQ ID NO: 47748 - DNA, 1684 bp, Cannabis sativa
gatcactcgaagtaaagctgggattcacaaaccgaaagccttcactgtctcctccaacatcagcattgaaccaaagtcactcaaagctgcccttcaagaccccttatggttcaaagctatgcaacatgaactacaggctctaatcaaaaataaaacttggaccatggttccttatcaaccaggcatgacagtaatcgataatcgatgggtgcaccgaatcaagtataagtttgatggctcgattgatagatttaagtccagacttgtggctaagggctttcagcaaacacttggcattgactattttgaaaccttcagtccggttgtcaagccatgtactatacgcatcattttctctcttgctgtcactcacaactagccaattcaacagattgatattaataatgcgtttctaaatggtgatcttcaagagtgtgtgtatatggctcaacctgcaggctttataagtccaactcagcctcatcatgtgtgcaaattaaacaaagccatttatggcttaaaacaggcccttcgtgcctggtttgacaagctcaaaagtgctttacttcagtggggattctgcaattctaaggctgatacatccttattcttcattcgaaaagaaggcaaactcaccctcctgttaatatacgttgatgatattctattaacaggtgaagactctgcctttattcatagtctcatctcccagcttcatcagcaattttctcttaaaaatctggggcccgttcgatactttctcggttttgaagttaccagaaactcctctggtctttttctcactcaggccaaatataccactgatcttctcacacgcaccaatatggatgcagctgcaccaacaccaactcccatgtgccccaatacaaagctctctgccacaatgggcactcccatggacaaccccactttgtatcgaagtgttgtgggtgcacttcagtatcttacattaacgagacctgacatctccttctctgtcaacaagttatctcagtttctcaaagctccaactaacgaacactgggctgcgtgtaaaaggcttctccggtatcttgttggcactgttgattacggtcttcacttcaagccagcatccacactcaatctcactgcctataccgatgcagactgggctagttcgattgatgatagacgctccacctctggctattgtgtttacttaggcaacaatctcattatgtggagctcgaggaagcaaacggtggttgcccgttccagcactgagtctgaataccgtgctattgctcttgccacaactgagctcatttggattcagtctttcttcaatgagcttggactcaagctttcttcctgtcctgttctctggtgtgacaaccttggtgccacttctcttgcctccaatcctgtgttccatcaaagaactaaacacattgaagtggatttacactttgttcgggatagagttcttgctcaacaacttgacatcagacatgtttctgctgcacatcagattgctgacatcttaactaaaccactgccccaacttcaatttgatctgttcaaagacaagttaacacttactgaagctagtgtaacttgagggggggtgttagagttagttattagggtctgttagttttgttaattctgttatttctctgtttctattttcccacgtgat

SEQ ID NO: 47749 - DNA, 1372 bp, Cannabis sativa
aaaaaaaaaaaaacaaataatacacataaaaaattcatattttaaatttaaataggatattaaaatctaataatgcttcaaaagcaaaaaaaaaaaatcgagaagttagattggaagatattattcaaactcaaatttacattttaatatctaatttatttgaacagaacgctactaaatatcaactaaaaaagataattagataattaaacataataattaaaaaaaattattattattattattattggaatatataaatataatgtggtgtcgtatatatttaaccattggcttctaatcctaatacaattacaaattcttttttattttattttcttttttcttttcaaatttagaaaatctttttgatcctaatttaactagaaatctaactaaaaccttcctttatatatatttagtagactcaaggcttcaattaattaattttcttgagttttttctagcaagaaattaattaaagaaagaaagtaacaatgatcaagtttaatgctctagtagacgtatgttatcaacttctaataactgaatatggatataatgataataataagagaaaaatatcatcatcaccatcatcttcatcaagtgatcaattaggtattgatcataataagagagaaatatcatcatcatcatcatcatcatcaagtgatcatcataagagtaacaagaaaccaaggaagattaaaataccaagtaatgcagttacaagatcgaatcctcgaggtgtggttgcagggccaaatccaccaccgccgctatctcttgagttaatcgccgcgattaatggtagtgttggtcgagaacaacaaacgcctcttctacttatttatcagaaaaaactttttgagagtgatcttaaaaaacaagctaatagactctcaatgccggtgaatcagattgtatctgatgattttttaaatgaagaagagaaagagaaagtacaacccaaaactaaaggtttaattgttcgtgttattgaaccaaatttacaacaaacaactcttgtctttaagcaatggacatacccaaagaagaataaatcaacttctcctgtatcgtatgtctttaacaaaaattggtttagtattgttgacaataatggactaaaaccaaatcatattcttcaagtttggttttttagagatattgatagaaacccatgttttgctttcgtcaacttagggttttgttagtttataatcattaatattttattgtttttagtatactatattaactactaattaggcgattaataaagttttattcaacttattattattattattgttattattgttattgatcaaaaaggaaaaaagtattaatcacaaactcctttaca

SEQ ID NO: 47750 - DNA, 1789 bp, Cannabis sativa
catccatgcttggtttttgtattcccaggaatttgcataacacttctcttggtggtgaaattcagaatttgggtagcttacaacatcttgagaaattgtattatcaaacccttcataaactccattttttgtttttctcaatcatcttagaccattattgaatcaattattattgacaggaatctgagtttcaataggctaacaacctttggttctgatttggagagcttagttaatcttcaagttttgtgagttttgtttctatattaaccaagagaaaattgaccttttcccatatattttcttgacaatattgttgcattttttagagctgtttttcctttttatatccagggatttgcaacacaatagattacaagggacagttccagacagcttgggagagttggaggaccttcatttattgtatgaaatatttcagaattcttacaatacaaaactcttctcttctaatctcaataaacatgttgataatttttcttgacatgatatcttctcaggaatcttgaaaataataggcttcaaggtgctcttccaccatctttgaacagagaaagtttggaagttaggtaaagaatttaggaataattgcaggttaagtatctaaaattttgagtttgttacgggcataaaactcaatgattttttttacggcttaagtaactcattgttagtgaatttgtaattttcatctagtttcgtcagtacagattttgagtttgtactgatgaaactggacaaaaattaaagttataccaacaatagatacttatacttacaccacttacaaactcaaaactttgaatacttatgctgctatttatttaaatatttacatcacatatctttcatgcatataaatgcatcaaattttagtattatgacataccatttttcatgcagaacatctgggaatctttgcctttctttctctgcaatggcttgcaacgacgtgtcgtctaccccttctcttgagacaccccaagttaccatcttagacaaaaagcagcacaattcttctgtatataaccatttagctattatacttagtgtcactgggggtgccttgcttgctctactctgtatctcagtagcaatatttttctatgtgaggaataagaaaagtgctcatgaagtctcatacacacaaagtatgtaaaaccatgcaaaccccttttctcatttgaacttaattactttctttcttgctttttaagtgatcatttttttctcttgtccttcaagatattgcagccgatattcgaaactggaattcagctaaagttttcagtcacaaagaaatcaaagctgcaaccaataacttcaaggaggtgattggccgtggtagctttggatcagtttactttggaaagctacgtgatggaaagcttgtggctgtgaaagttcgttttgataaatcccaacttggagctgattcttttgtcaatgaggttctctatctgaaatccatactgagtttaaggccatttactacaatttaaagttactttagttatgagtatgcaataatataaacaaacacattcaatttggggagcacaatttcggtatatactaatgtttggggagcatgatttgcaacatggacaatcgccatattagcatccattagtaaaactgaattcaacaatttcaatagttggggaaatttttaaaagttcaggggacatgatttaccgatttagtatatgttaaagtttaggggccaaaaattctaattaatcgaaattttattatcaacaaataa

SEQ ID NO: 47751 - DNA, 4854 bp, Cannabis sativa
tgtcccatatttgttatggagcttgtatgctcttgatctgaacatgcattttaatctggttataacaagaatatgcaaacatgaaagtcattaattcatgtcttactgtcacatctacaaattggtcaatcctcggtagtgaaaagtagtctttcgggcaagctttattcaagtcaaagaaatatatgcacgttctccatgtcccatttagcttctggacaagtactgggttagtaataaaatacttctcgtaggaagttattggtcaacagtttgtcaacctcttcttttagtgcattatgtctcttgggatctaaagatctttgtttctgaaattttgaaggataagctgggctaatattgaggtgatgacatatcacaattgggataattccaaccatatctgaatggctccaagcaaattgatattagtttgcctttagaaaagtgattggttgctattttagttcttcctccaaacccttctcaatgtttacacatttagtgggattatttatatctaaattcacctcttccaactcttcgataagcttgagttagttgttttcatcatggatctgaggatccaaatcttccatctctttcttgttttcttatgtcaaaatcaccatcaattaatgatttttccttctaattttcaattccacactatagcagtgtcgagcaaatagcttgtcacctttaatagcttgtcacctttaagcttatttctcccattcctattaaggttgggtgatccatcagtaagttgtaaatagaatggatatcgacaactagaatttcttgtatttgagttgtggataatggtggttctcccatggttagtgggagctcaattgagcctaagcttgcgacactgtcgcctgtgagcctgcacaagttaaccaaaaaaagtttcaaccttacttcttctaagcccatcttctttaaagtctctttgtaaagaatattgattgaactcccattatctacgagaatcctctttatcctcttattagccaactgcaccattattactataggggttgtgtgaggaaaccatacgtgtgatgtgtcttcatcagtaaagagaatgggaggttcattagattcggctctttttagaagttttggagcgaaggctaatttttttgtttttcacttcataaatatacctcttctgagcattattgttgtttcctacgaggtgtagccctccagaaataaccaaaataccctctcctcaatagggggaggttgtaatctttgattatttgagttattaggtagattttatttgtttacttgtggcctcacttattgcctcaaataatctctcgagatgagattttcaatttcatccttcagttgatggcaatcttctatggtatgctcgatgtctctatgaaaatgataatatttgttaggatctcacttatttcttgcatgtctcattagatcgggtctgcgaaatgcaacccaatttttgctggcaagatagatattttcacgagttcattcaattccatatatactaagtatattggtacatacttcccgtgcttcttttgtttctttttgtcttttgacgagtctctggacttatcctttctcttggcattcgagccagtaggatttcaatttccagctttggttgtcacagtgctaactgttgtagtacttgtgttgggtttatctcccaagttagactttagcaacttcatttcattttgcgcttctttattctgaacaaaaaattatgctcttttgttgaactcattaatgtttctaataggacaaccttgcaagtcatcccataattctccccctgtagttgacaagtcaattgttattccaacttgaagagttgttaattgaatactgtcattcagattcttaactttggttgtggctgtactaaaatgacttggatgcctttagggattctcctagttactgcttaacattggttagcaaagatgcttctggtctccgataccttgcagctgggaatttctttttgagatcctttgataattgttcccaagaagttatggaatggctgggaaatttatcaaactaactacttgtggctcctgttagtaaagtcgagaataatatgcatcacaagttttttgaaacattgcttgcttgcattatggtattgaagttgtttaggtgcgctacaggatcagtcgtacaatcatattgtgcgacatgtgggtttttgaatccttgaggaaattgcgaattcaaaatattaggatggaatggtcctatcacttcttctgagtcatatcccagtattttcccatattctctatcctagtatttcctaaacttatcttccaattgtattactcgcaattatattggatcaacaggctgttgctctattaattgttgaatgcccgcattgtgattcagttgattacgtaaatctagcgcattccagtttaaatgcttgcataagtcaagttgcctttagtttaattgctcgtgaagatcagggttgcaatgcctttaatcataattactcacagatcttgtccttgagtaacttttggattggtaacttcgagagttactaatactctcttggtcactttgattataatgtcctgatccaccttcgtctcgcatttgcctatcacgggcatgagctcggttgatctactatgcctgtgggtccttgatcttaatccacttggatctatagttgagccggactcatgtgactcttctcgcattggccttctcctttggaaaagatttgatacacgacccctactcaggtaagtacgtgcactctctatcattgcgagtaggcctttgcggatgccttgggggttgacatgtcctaggttaatttcaaacatttcttatgtcatgctgtggaatttcctggtttccaagtcccacctacctgacatttgcatttatgcaaaaggactctggtatattaggtatttcattcccgtggtttgaaatccatgggaagttcttggattgtcatgtcgagtctcttaatttcttgtatttccagtagtttgtgggttttctccatccattcaaatatctcttacattcctaggttattcttcctgagtgtctgtaggattcccttgattgttcccttgtctcttgatcttagaacctcgagacttccaacgtggtcatcttgtagatggatcaggttcagtttgaggcaccgttccttgtgcagcccttgatgttgctgcttcgtattctaactcgacattccaccggtttgattcgaccaggtgctgtcgaagttgcttattttcaagttccaccagtggaacatatctagttggatcataagcatcctcgctttgcctttctggaacctattcaccagttgggttaaaatctccatcgttccttctacaatggggaggttcactagttcgttggttctcttcattacgttgagtattgtccgccatgagtacacatttttgaattgtatttttgaggaggaaattttttgagttttactacaaaggctcttaatgaaagcaccaaactgttaaagcatattttcgttaactaaaaatattagccttcttgtaataaactaactacagaattgattatatagcaattcatttattaaattaataaataacaggaaggttttaacatggttttgaagttaaatcttcatagtctatgagtccatcttattaaggataatgatatttgaatacagaatacaatgatataattagcaataatatctcttttttctctagattggtcgtccgatttactctcgattatgtctctatttatagatgtaatggatgatagttattcccttgggatctactcattcataaccgcttatgaaacgtggacattcctcacgttttacctttatgcacatggggtaatattaaatgattgttccttgtctttatccttagacggttatgctgactgtgttggattgttctcaccagttgcatgttatctttcttaacctactttgtaggaaaaatgttaagtgttaagatataatgcatctcacggttctcctttgccgtttgaaaggtattagcgaggcgattacttccatacatcaaaagcgaggtgagtaaacataaaagttgtttccacttcttaagcatactcacgagtatgtgaatcaatgagttgaaatctcttactcacgagtatgtggatcaatgagctacaagctcttactcacgagtatgtggatcaatgagctagaagttctttgtttactcgttctgaaaaactttgtgtattatgtttatcctaagatggacttattgtctcgccagcctcacttgttaatagttaatattcacatctcactattgtttatatggcggcaagttcgaatatttctattaactataattcacgaggcgagtaatttaatgtgcatttaataatgcacggcctgggcttgttcatattccgaccctaatacacgtgccaacttcttattactgccaaaatttaggtataatagagtatgccataaaaattttgaccagcttcaccaggcaccaaaatactaatgttttgggtgttacgattttcatcccaatcctgaactggtaatttaactgcgttaacaatacatacaggataacaatagcacgtgattagaggaattttgcaatggcgtacaactcatttgatacttctccagccttatctgctcgatgttgattgatctgtcattgagtgaaaatgtaatcattactagtattaatcatattaaatgaaaaaattagtagaaagaaatacttactcaagactggaaccaactaaggatctagatttactaacaag

SEQ ID NO: 47752 - DNA, 4435 bp, Cannabis sativa
aattgtatatttcgtatgaggagaatgttgaccgaatttagccacctctaaattattaaatgtaaagccaaggaaatcgtaaagaagtctgtttgacccctagccctttctcataatcttatctcttatttcaaacatttcttctctcaactgctcatttaagtttttacatttcgtcatgatttaaatgtagaagaaagtcgaaacattaaatactacttagatagatactactacgtctgacatatccacgcccttaaaaaatatttatacatattacatatagcagtattaaaaaaaaatatttatacatattacatatagcagtattatataatatgtattatgtatgaaagtccataaacgatacgttattaaaaaaaaagtattctagaagtgaattttttgaaacatgaaaaagatggaatagtaggattctaacaatttcgttgaaagtgggtaaatatatataatagcattagaatgtggggttcactctcaaattaatttcggtatagattattatttatattattattggtaatatatgcttgtatttataaagtttaggcatcattttatgtatacttaaatatgaaaagtttggtagctattattgtttttaattatataatataataaatatatgactaagcataatggtattgtaaaggaattcttgacgtgtagactttttgttcacaattgaactacacacggtactatttatcacttgccgcatctacccatctctattattttagatattattatttgagaaatttaccacaaaattctgttactttaatttttatacatttaatttttttaattttgtggtaaaattctttaaagtttttttttttttttttaataaatttaagatgtcagttagatattactattaaatattaactgaattaatattgtatcgatttcgaaattttactgctacatacatacaagtgcatatagtgctcatctagtttatatttaacaataatatttgactcacatgttaaatttacaaagaaaaataaatttaagaagaattttaccacaaaaaaaaaaaaaattaagtgtctaaaaattaaaacataaggaaattttacagtaaattgcatttattattatcattaatcatttatgtgtatgtaatcttttatacatacattatcaccattaattcctctacctatcaaattattatgtgtatatattaattcttattataaatattactttcataatgtgaatcgtagttgaatagtttagttcatgcacataattgttgattacaaatggaagactattttacataatattaaaaaaatgaatgttggatgaaaatgataatgatagataatggaatttatatccattttgtttttgtttgttttctttttccaactgtgattttctattattagttagctaatctacatttttttcttttttacaattagataatagatctacaaatattttaggaatattttcatttttatattttaaaataatttttttttttatatttttacggaaattcgtatagcaactcacgaaattacttaaatcgtaattaaaatttacatataattcacatagaaactattgaagaaattaaaccgttaaataaaaaaaaataaaaaataatatatgaaataatatagtagatataattaataaatacaatcaccttagcatattttttaaatgaacgcattataccaaagttattgagcacttaaaatcaatttatatttgtatatcaacataatcatgttctttttgtattatctatacaatgcatatatctctcgaataataaataattctaaagaaacttgggagattaacaccgaacaaagattcaattaatgccacagaatatttaatatgtatgatagtaattagcaaatgattattattattatttaaaaaaacttaacgtttctttaatttagacaaattgtgttaaattttagtctactctttacaagactttcaaatatacaattaatattatcattttttttcaacccccaattttaatttatttcttggaattttcctttgaagaattaaaccatttttattttatttaattttttttttttggaaaaaagaaaagaaaagagagatagagtgaagtaagtgcatggaccacattactccattgctttcaattggatgttggccccggtcttaaaaatttcaagattgctttctttggtttcatttctcgctctctctctctctccaaattatgtactattaaacactaacaaaaacaaaataaacaaattaaacaactttgccccacaaaaatatatattaaggggaaaaaatattcccagaaaacaaaagagaaaaaaagaaaaacctggaaacccggatgatgatttcctttaaatgcaaggaagaaaaaagtatgatgatatcatcatacacacataaatatataataatgtactcattgtttaattatgagatcccaataagacggcaacatcattgcattgcatcaaaccataaatcttcatatataactgaatactgattattattaaattacttctaaaattcaatttttatataaagtttggtaactaaattaatgatatgaataatttctcagtttgaaactagaaccaaaagctttattattattaattaatgcctaaaccaaatttaatgaaatgagcactactacacattgcaatttgcatacaaaagaaacaccaaaagtgtcaccaatctctttctctctttctctatacataaaataacctaatatatgccaaaaccacaaaccaacaaatataaggtcaataagaattaatacaaaatcactatatacataaagaaaataaaaaaaaaataagaagagataatttggaggatagatccaacttgttcattcattcatttatattatttatcattttttttggagagtaactttcatttctcaaaactatacaaagcaaaactcatcagcataatctaattctggttaccagaatcaattttttccggtttttttttccttcctatatttacaactccaccaacccatattgatatttttcagaaaaaaaaaaaagaaaaaaacctacaaaccagtaatctgagaatagtcagagtaaaagtcaggaataccagaagctgcccaaagcctctcattaagagaggtttgaagatcgtctttaagaaaaggtgtcctacacaaaggacaagtcttttggtcatatcccatccaacggtccaaacatcctttgtgaaatatatggcaacagtttgtgagccgtcggatctcatcttgaccttcaaactcgtacaaacacacggcgcagctctccggtgggtctaccagctccgagaacttaaccaccggcaaacactctcggatcagaagggctgaaactgagtcgaattcgggtactcgggtcatcatcgtggttggagagtctgagaaagaagaggaagaccaggtgtttgaatagacgccgccattgatgatgtccggtgaatcgatgaaatcttgaagacccagatagctgaaaaggattgaaatgaactttctgatgaaacccagaaaggaaagtgtgtggatgaacagttttggtatgaacagctctgtgtagcccactggaaaccccatttcaacaacaaaagagtaaattaaattaatattactttctaaaggtttcagcctttggttatggtgggtactgggtttctttctttcttttcttttttttttggtgggggttcaaatgaagaatgaatgaatgaatgagagagataggggtgagaatagaagatgaggattggtttatatagcagagagagagagaagaaggagaagaagagagaggtttggaaatgtccttaatgggctttcagcttttaatggacaggacagccaaataggacataaataattgagatattattattatttttcaaaactagtgtagattttaactgctgtcatcttcatgtgttgggtttgtgtagtttattggtttattggtttttttttttttttagaaaaacaattattagtacacatatgtggtaattttgttttcgatgcaacttactattggttagaaaaacatgggtggcattaaatgctctgagtgatttgtgaaattaatgagataccaaacaaatgtactccacaaaaatcaatcaacgaaatgattgtaaattacttacacaatggtaattgatttagttgccaataacaatggcacttactttgagttttcttctttcgatttagaagttgttgcaaagttatagctgcaatagagcaatgttatgataatgtcaaacagcataacttaatattatcggaaatcataccattacacaatacacactacacagagcacaccacaccacaccagttgagtcatga

SEQ ID NO: 47753 - DNA, 2184 bp, Cannabis sativa
tattattattatttttcttactaagtctttgtgactcacatgtgctatgtggtgcaagcaaaggaaaagaaaagctagatcaaccatgaggtgacagtcttctccagaatgtactgtatctattgtgtattttggttttatatttttgagtcatcgtcgtatataattcttttataaaaaaatttataacagggatccctgaacacgctttttatgcctttataatatccgtttttagtgttatatttgggtcaagtttttaatattatcatgattttttataattaattaatctattagtactaaactagtttataaaatcacacatggcgtccctatagattagggctttacaatctttcacaacttgtgtacacatcggttcacagagccacgcattctcgaatctaaagctctgtttaacaacaattacatcattattcctatgaataagaagaattgggcaatgatctgaactagaaatgtcaagattaaggagtttagctgatgtgaagatgtctagccatttttaattaacaagagctttatccaatcgaacttcaatctaaagatcgatccatctccccttctctcatgtatacgggtatccttcaatttcaaaatcacataaattgcaatttgttaaggctttgttgaagccttcaattagccactcgagatatgggttgccaccttttttttatcatcttgacttaccacattattcaagtctcctataatgcaccctggtagatcatattgctcagcctgacttcttagcagatttcatgtcttgaactaaagattgtgattcatttcaccataacagccagttaaccgccactcaccattgtctccatctctaacagtaacatctatatggcgatcagagtaacctagcaagtggacatcatctttaattttccataataatgttatacctctacttcatccaacgacatcaacatccaaaagacctttaaaacccaaagaaacacaaagtctttaaagagtgtcattttttacaaagtgtttcacacaaaaatacaaacttgggccgcttatggatcacgagatctttaaggaattgtaaagcccgtgggttcccaagcccacgacaattccagctgaggatgctcataatccttagtgggcctggaccgcaggatccaccgcacacccattttttgaaagcccaatagagtcaaggatcatattctcctcttcatcactaaatgtctcgataccttccttatcagttcgtcttctattcgtatcagagataattaaggtatcatttctcaaattctcacatactcttgctggtaattatttttgctaaattattgtaaatatgccattattcccccgagcatttaatatttgtaaatctccaccattactcccctgagtcatgccaacattacccctattttcctagacgaaattatatgcatcattgaatgcattatcgtcagcgcgcgtctgggatcttaacttcatcggagaactgcttatcagcctcactttcagtacgtagccattgtgcacctatcctttgctttctcctccttggctttgctttcatccataacccataaggtttttcaatttcctcgagtgggttatcaaataatcgctggcagaatttttcagagtggccaattatgccatatatgaagcaaaatgttggtacaaattcatatttgaattgacaccatagccagtcgtcattagttcttttaagtttgattcttctcttcaatggtttctctatattaactgaaactctaatccataaataatctctccaaatgcccatgaaattcttcgaatctggtttgagatacaagtcgatgtaattaccaacattcctagcattatcctcagtcatgaagcctgttcggaggttgtgaagttgtacccacatatcaagatgatagagacgaacacttctagctaggatccttgccttccttcagacgtttaaagatcaattgaaatctattaaaagtccaagggttcccttcaacgactctttgaatatctacttcatgatagaattagaaaatgtataggttaggttctaattctttaacaaacatgcccttgcctggttgccacaaagatgtcaaagtatttagcattaaatcaaagtcgatgactctttttgtcaaaaacttc

SEQ ID NO: 47754 - DNA, 1475 bp, Cannabis sativa
tggtatattgtagtgtcaaaattggaccttaaaaaagtcttttaaaaatcttttggttcatacccaaaatttatttacttgttcaatcgtgatcttatcatagaaactagaaagtttttgggtccattatttttaattttaacaatgaataatcaatcaaccatttgtcaattttcttagcaaagttaaattgagtaggccaaaatgacaattaatgaagaatagggtcaaccaaacacaacagacaattgttgttcctttttacaaataaagtagtctttcttgctttgcttacatcagaaagaaaattaatatatttattattattaatgttcaaaaaatttaactattattattattaaaaataaattcaattcaattcaataccgtttgattactgctggtgatgggctgagagatagtgtgcgcctcatgcaaacagtgtcaagattaatgttgatgtatcaatttttgaaagtacacaaggctatgattttggtatagtggttagaaatgaatatagtttttggctagagagtgttactcctttttactaggggttcttcggttcgaattaacaaaggcaattgctgtaagagagaccctaagttggatcaaataaaaaagctggcaacaagtggccttgaaaactgactgtttggtagtggtacaagcaattcgaaaccctattaaaataatccctgtttttagtttagttattaaaaagtgtaaagcattacttgttgagtaggaaaatatttctatttttttgttaaacgttcagcaaatttagtagctcattcatttgtaagagcttctaatttatatcctggttgtgtttttcagtatgagaatgtcttaactgaaaagctttcttatttggtagcagaatttaaaggttaataaagctttggattcttttttttaaaaaaaaaataaaactaaatcaatatcctttgagtcatttttttttcctttctttcctttttgtgtaaagaggataattaatgctaattttatcaattttagaaataaaaagaaatttgatataaaattaaaaagtgatcagtagtatatatgtttataaaagtatacttactcccttttgttttggggtaataagagattaaggaataagaataggatagaatataatttgaaaaaaaaaacgaaattagagaaataatttatttatttgtgtattggaaaatattatttcttatatttttttaataaaataatcattctaccaaaataaatatttaaaaaatcattctattgaaacaaataaatgaaaataatttgtgttctatagtctaaaagttagtaaagaatacttctcccctcatttatacctttttaataaagaaaaaaaggctacttgaactagtctcaattgttacaacaaacatttgacaatcaatatttgtgtatatatttatgtaaatgtgtacatacaaatctttttgttttag

SEQ ID NO: 47755 - DNA, 1714 bp, Cannabis sativa
tccgcattacacatatcgtttatctatatgttgttttacatatactatattatagtctaacatcatactcattagataatcttctacttctcttcatcctagttattacaactcaacaatacaagttgcttacagctcaagaaaagactaattgggttgtgaaaaaattcaagcaattttgagaaatcatgtatgtataccaaattattatttatcattattgtgttctattttatatacaaattttgtatcttggtttattaatttttctaacatcccgtcaaagctcaacaaaccaagagacctactgttgttcaaagcctgaggttacttacaatctttaagaaggaaacctagcctgacagatagggcaagtatataataaccaaatatctcgtgcttctgtttgtgtttccctttcaacatcttttaaagtgaaacagtattcattggcgtctgcgtttaggatgcactaggctccggtgaacacttacaagctcactgaatgaaacctctgctcacatatagcacaaggatagaataacaaaatattttgtgcttttgtttatgcttttccttcaacatcttcaaaagtacattcctcttcatcttctatgataacattgatggtttaaatactacatctaattcattaatatgaattttcttattcctttaaaaaacattatttcaaatcatctttagtaaacaaagaccacaataaaacccaaattttttcaaatatcaccaatattttcaaaaattgacccaaaaattataataaaacacaaagaaaggaatgtttgaataattttgtaataaatgagtagagtaactatataatttataagagttgaatgtaaccacacacttttcatgtggtacattaatccacttattaatgtaacaatgtacatgtcatttgtccaaactgctgagtttatattaatccacttattacttagctcttaatctcttatactataaaatattacaaatcatctctctcaacttatggcttagagagagtttggatccaatgatttaagaaaacttacaaattacatacaaaaaatacacacaatcaatctccatccacccaactatttatcaacttctaccaatcaaatttttcaaaacatataatcactcttattctcaaattctaagtttcaaaacaattcaaaatatactattttccaattactaattaaaattaattacacatcattatgtatatattttctttgtatcctcgcaaagtttgaagttcgagtttttcgttcgtgcatacctagcaatgtattagagcttttccaacagtttctctactacattctgtaaaatacatcactttatatattttacttcaaacttttacattatatcatacattaatttttctattttttctctatatcatttaaacattatatttttaatatatttaattcattttatagaaataaaacatataatattaacacacatgtatagaaaattaaaaaaataataataaatatagaaaattaaaaaaataataataaaatatatttaacccaataaataattatctctacatttaactcaacctaactaaggtttagctttaagctcaattttctaactttttctttataatttaaagtttcctatctttaaaggtgatagttttcactaatctaaaaagttgagtgtaatcctctttgtcaaa

SEQ ID NO: 47756 - DNA, 897 bp, Cannabis sativa
actgcggtcggatgggtgaaaatttttaaattgttaattattgttttataatttttattattgtatgtgtttgctcatttttaagatatggaattggatcaagaaaatgaaactgttcctcccaaccgccacaacaacctaccgatgatgatggaggtagtaaaaaaaggaaagctgctaaaccccctcgagctcccaaatccaaatctaaaatatggaaccatatcgagaaattacccaaacctgaaaacgaagacgaccccaagtgtaggtgaaattattgtggtgctgaattaaaatgtcatcctacaaagcacaggactacttctttgtggaatcactttaagcaagtatgtgagaagagtccttataaggatgacgaaaataaataaaaagactttaagttttgggggaataagagcctaattgcgatagcatataaaaaagaagcgagcaaagttactttatgcaaatatttggtactggatgatttgtggtataaacatgccgagggggagagtttcaaagaatttgttaggaccttacaacctaggtttgagatctcttctaggatgactatctttagagatgttttaaaggcttttgaagagaagaaaaagttaaaagatattttgaaggatcgaaggatctcaataaccactgatacatagacaagtatttaggatatcaattatatggttatcacaacacattggattgattctaaatttaattattaaaaaagaatcagtaacttttgtcaagttgttgatcacatgggggagaccataggcacagaaatccagtgctgtttgcaatagtggggaattaccaagttgtttactattacagtagacaaggcctcttcaaaatatgtggtcattcgatatttgaggg

SEQ ID NO: 47757 - DNA, 1512 bp, Cannabis sativa
  modified_base (734)..(738): a, c, t, g, unknown or other
tgttgatgtatagattatttttagatctcgcttgagatgctattaagctgtaaatggatgtttggagtaatgataatctcgctgattcatcaaaaaaaatattttatcagctttttttaacaatttttatgaattttctcaaaattaatagaatattataatttttaattttatttttttaataaaagagggcaaaattttgtattggtcaaagttcataggataaaaatgctaacttttaacggtaaaaaaataaaagttaataaaaagggcataattaagtagttgtgtagttgttatattttatgaggaatttttaacaagccgtatattttaagggatagattaggtagtgtcgaaaattcaatgaacaaaactactaattattcagaattaaaaatgaaataaataggatttacaccttcaactattaccatatttaaatcttggtacctaaacttaaatttattcctaataatgagttatgcctcttcttttagttggaggtttatgtggctaacaaaaaattcagttggcaagaattgcaattaaaagaaatattcgaactcgccgccatataggcaataacgagatgtgaataataactattaacagtgaaattagcgagacaacaagtccattttgagataaacagaatataatgaaaattgttcaaaatgagtaaacaaagagcttgcaacttattgattcacatactcgtgagtaagagcttnnnnntcattgatccacatactcgtgagtatgtttaaggggtggaatcaacttcaacatttactcacctcgcatttgacatgtggaagtaaccatctcgcaaatgcctttcaaacgacaaaggagaatcgcgagacgcattatatcttaatactttacatttttcttacaaggacggttaagaaagataacttgcaatcagcgagaactatccaacatagtcaacataaccgtctctagataaaaataaagagtggttgaatgtttatttaatattattccatgtgcacaaagatgaaacatgaggaatgctcacgtttcatgagcgggtatgaatggatagatcacaagggaataactgtcactctatgcatctataaatagggacgaaacccagggtaaagaggacgtctaatttgagagaaaaataagagatattattgctaaattacatcattttatgttgtattttaaatatacttatctttaataaaatatacttgagggtatgaaaatttaacttcaaaattacgttaaaatcttcttattatttattaattatctagtaactaattgttatataataaattctatttattacaaaaaagttaatattttagttaacaaaaatttacgttaacagttattcttggttgcctgtttggttatactaattattgatgagagccatgagattatgatttgtgcatattgttgtttcacgacctaatctctgtgtcatcataggtagatcaagtgtgcactcacctgtaggtgaaa

SEQ ID NO: 47758 - DNA, 2118 bp, Cannabis sativa
agttcaaagctagctttaccaactccatttaatttcatttcttttttctttcagcaaaataataatgtcttaatatttttgataatctcctaactgagtttgtgtttattttcttcaacataatttagcttgtaatgtttcaaaatgcacttttggatattttttttaaaaaaaaaaaatctttgaatgttgcatgtatagatacgaacaaatatatgtgggtactgaattacaaataatctcctatcaaaaaaaaaaaaaaaaagaattacaaataatcatctacaatcaaatccattaaattaaatgtgcacttttattcataaccaattaattatgtgggtcccagttacatatttttcttttgaatgcaaaattataattttataaaccatcaaattaacaaattggttggaatattctccaatccaaagatacaaccagaatataaatgagagctcttgcgaaattatgagctatatcatttgctgatcgtttaacgaaaaaaatattgacattgcccaaatatatttataaacattgacaattaaaatataaatgagaagttcttgccaaatatatattaaatgttctactaataggatctttttaaattttccacattaaaagaatcctctaaatatatctatagtaatttaaaaaaaaaaaaaaaaaccttaaaagaaaaaatattatcaaaaagttgagtatattagattaaaaaaaacattgtttaaaatggaaaaaataaatacttatttgttgtgtataagaaaattgatatagatgattattgttatgtgcgctatgcacatatttttagttgtttgtttagtttttcttttaggtcatgtgtgttgattttttaatgttatgataaaaatctcatatataattcaattaaataaacaatattattttaataaaataaatatttaatttaaaactctatacaaagaacatataatagtattttataagaaaatatacaaagcaaaatgttaacaataataaaaataatatttgtaaattaaagaaaaaattgtgttgagaaactaaatataataataaaaatgttgtttattactgatgattgaaacaaatcatttttctaatcttctcttgtctttacagagagaatagtgaaatatttgtattttatattctttattctttctgaatttgtatataactaaattatctttttttatatatttctctatgatgttttgaataaattaacctaatattcaaaacttatgctgcaatatgtaacatatataaaaatcatgtttcatataaagtgttgaatgaaatgagtatataaaaataaatttaaaagctaatattatctaatattttaaacataaaatacctaattattatttcaatcagtaaaaaaaaatgtttctcatcacgtgtcacatgaaaataaaatataatatatttactagagtataattttgtaataaccacatagttaaatcatgggaattagcaaataattaaggatttaattattattgtataattatatgtctcttagtataaattaggcttattgccagaaataagtcttagaaaaatattttcttaattacgaaaatatatttgaattctagatgtattatatatgttgtatatgaaattttataattttcatgttttgtgcccgtaatagtagaatgcgataatttgaccaatagagttagatatggttgagcattttagaattagtggtactagataattagacatttggaatgttggaattcatcgaggttatgagtttggaccaaattacccctagtattataagtttacttcatgagtaagaaaaaggcaaaattgtcattttactataagttagtatgcttgtctttagtgagattcctagcttatccctaggattttagtgctgaatattgtttttaataaaagataatagggtattatctaaaagattagaatttagaagaaaaaaaaaacaaacaaacaaagtccatctccctttctctatctttgggttcggccacaaggaagaaccaaaccctaacccctcaaattcagatcaaaatcaagggatttcagcagaatttcaagtagttagatgtaata

SEQ ID NO: 47759 - DNA, 2133 bp, Cannabis sativa
tgttcaaaaaaaaaaaatataacaaattaaaaaaaaaaaagctatgtatcaaaatttttgtttaaaataaataaatgaagtaattttttttaagaaaaaacttttttctcttcacctctctctctctctctaacacgaaggttttgcccagcccagtctagtctcgctgctttcggccaccaatgacagaaacgaaccccacaatcaggttcactagcctccaaaactgatgaaaccccaagacctaaaacccttcttgcactctctctcccttgattttcttctctatcagttttagtggcgaaccaccacgaatcccacctcgatggttaaatacaaccaaaggtttatctcctccatgcgtgtactagtcctgatgacatcaaaaaaacccattaaggtccatgaacacctaatttattattaataacatttaaaggctttgtggttgtcactcctgttcaaagaagagtgaaactttataaatagtgactatttgtttagttgtgagacgttaagttgagaccactagctgcgtggtcagaacattgtgataatatgctcatctttagaaattagactgagcatatgtgacttgttgacctcgcttttagccaacgatagtgagtcaattaataagcgattaagaatataattaaaatagagcaaaaacaaataagtaataaagaacaccaaattttaaagagattcagccccatgagtatggtaatagcctgctccccttggattgtattaacttgagataaagaacaaaatgttttcctctctcaaaactcttacaatgaatctctgagtaattctcttagatctctctctgaagcaattcttttgatccctttcacagtgaggctaagtcactatttatagggccttaatcatgagggaaggttttccttttgcttacaacgtataaataaaaaattacatttattacataattataatatacgaaataggaatttagaacaagttgtcatatttctctgattcaatcccacgatcgtagggattgccttcgtgcctggacctcacaagatcattctgaagtagttaactcctgataagtagtttgggaagccagatctatgcttgcccggatgatctacctttcatcctgctcgggtaatcagaagttatacatgttgacatacaatctggagtctgttcggaacattcacctctgcccagatacaggaaatgcaggacacgtgtcatttaagtattctgccacgtcattgtgcgaaaaatgggataacatttgccccccaaagtctgcgcgggaccttcttggttgttgcacatggacttcactcggtcttaattcttgtccgaacgggtggcacgtggccgtggtgtcaattgatgacccgatgtgactctgaccaaggatctcttcaatttcggctcatcaatgctgactgatagatctacctcgatccacacctaaaaattagcgcgtgatgacggttattcttcaggtaattaagtgcataacatatacttttagggggaacttgaggcatttaaaatttgaaatgatcactctcctttaatttacttataaatagggttgaaaatcctaattaaccacttttagccatttttactcttgaagaatgagagcaaaaatcttttttcctatcaattctttcgaagaatcttcagagaacaccggccagcgtcgtccgagtagactaaaagctttgaatcagtgagtaagttcttcatctccttctttttacatgtttgaatgtttaattttctgagtttttgttgcaaaacttgattattcttgaatttgttctaggagaaccataaaaaatttaggtttagaaattcgaaatcttgactatgcttaatcacgtagcctgatcataactgcgttttaatctcgattccatgatacccactttcccttacccattaagggcttagtgaaaatcaacctaaactcaaaattctgaacttatgcatcataaacctcattattatgcaaaatttctatttttgattttccaaccggacctggtcggtataatcaatctgttttcattcgttatcccgaccgaattctcatcttgtgtcctgccttttgtagatgaaccctggtga

SEQ ID NO: 47760 - DNA, 4038 bp, Cannabis sativa
  modified_base (502)..(520): a, c, t, g, unknown or other
  modified_base (1921)..(1931): a, c, t, g, unknown or other
  modified_base (3351)..(3367): a, c, t, g, unknown or other
atataatatataaaaatatatatatgtggaaaaaaggtttttgtgttatacatataatgtgttcaatagacaaatataatgataataataaaaaaccatgaaagttgatcaaatcgtttatattttcttttattattgcagcaatttgattttgctttggctgataaacttataaatttatattttattttattatttttctatatacatattcgtcaattattaggtaggccgaataataatatataatatataaaaaagaattaataattaatgcatgcattaattttatctacttaaattaatgcaccacacctatatttatgatgaagaagtcattttcaaatctcccttaataacattcattcaactatatacaattaattcactaatattatatatatatatttatttattattttgttatatagagatggactgtttggacccggaatttacataatttaatttccatatatggaaaaataataataataataannnnnnnnnnnnnnnnnnnaataataataataataatagacatgtgtagaagtacaacacgttaggtagtgttgaattattgcttggattcatatatatgattttgctgccaataaagtatattatattgtagtatatagctcactatatattttcaattttgacgaaaataatatcatttaatttcctcactattattattatagttatactttgtcatattttgaccaaattagttatattttcttccattctaataacaatatgtatgtttctaaaacattcatatggcattattcttatttccttgatatgattataatgaggatcctttcaacatatatatagattatgtatatataatgagtatatgagaatataattatagtcaaattgaaactatatatttgaccttaaagtatcggagaccacatatatattggttatatattgggctttaacttatttagatggtgtctattaagttaaaacactagatattttatgtgaaatttattataaattaactcaattgtttaaaaacaattgctatattacactaattctcttaattttatatttttttaagaaagaattagcctcattaaaacccaaggccaaccctaaaattaatgggcattaagaaaataaaaattattggaccctctgtttaaaatatatatatagtatttttgaaaactaatatttttttttaaaggaaaaatatgttttgggtctttgaactgagtagatcctaagcgcagatctaattcatcttagctcaaatttgaccctgttaaaacctctaataaactcattaggggaatcctcaaaaagaaaactaataaaaaaaagtgccaagaaatattattcatcaataaccagaacactaaatataataattattcaaaaaagaaacaaataaacctctagccaatgagtgagtcacacaattctcttaaaattttgaatgtatttttatctacaaagtttattaaattaagggaaatcactgtatatgttttaaatatttttgtccactttttttgatggtttttacttttatttttatttttacagtttgtgttttttaatttaacactaccattagtttttttaattcatttataattgccatttctctgcactaaacttccattttttttacagtttgtaaactttgtccatttttttagggattattacataagatattattttttttttttgtaaaaaaattacattttttcgtttatagaattttttatatatatatttttacgattttttatacaaacaacaagaaaactacataaaaataacatcaaaacaacaacaaaaataacatacagataacaaaaaatcaataacaaattaacaagaatacaacataaaaatatcgtaaaaatgtttaaaattnnnnnnnnnnntatttttgtaatttttttttattgtttttgtgtatttgtaaaataattcttttttatatataaaaatagagattttcttttatatattaataataaataattatgtaaaaatattgaattgtatttttttttatttgaatattgaattgtatatactttatatatagagttgaactttagtttctagtttctacctccatcgagaagttttctgactcaatcagaataaagtcagctgagttgatccgattgtaggtactactactactaggttggttgttttttcttttgaaagggaagtaggctgctttgggctttgttttttctttcgaaagggaagtaggctgctttgggcttagttttttccatttatttcaacttttgttatttgaaaaggaaaattgtcggaattattcgatatactattttttaaatttatgatttggattgttctggtagtttctatgtgggttgctatattaattttagttgcaatttaagttggtccgttaattgatataggggtttctgtgtgaaattctgtaaaaatacaaaaaaaaaaaaaaaatcgaaatgtaaaaatgaaaaaaccccaaaaaataatgtctattttatttaaatgagaaaattaatctatatattttgttaacttaaattttcgttcacgattatgagctattttcgtaataagtttagtgcaaaaattataagaaatccaagtaagaataacataaacaaaaataacaccagatttttacgtatagttttacagttaactctgcttagtccacgagtcaatcttattcagatttttctaatacagaactatggttcttaacaattagtgtattccttttttttctataagttttttcgtccatttttcggtataatctgctccctatttatagtaatataagttggcagttaattacatttaagttcaaatcccataacaatattcctcaaaattgtaggctttaattatgctccacgtaaataaatacagttaatatttgaagatcacacaactgtgatttaaattatttttaaggggtcaacgctgacgtagattagaacacgctagagaacctaccttgctgaggcgtctcgccttgggcatggaggaatggcttagcttacatgcatttcaacaatggcaatgtactgggcaaacttaagagctgctctttgaccataagaccttgcagactggacaatcatgtccttcaagttattacacttagcgtttggttgggaggaatgaaaatataggaataagaatgggaatggaaataggaataggaatagaatagaataaaatttaaaatgcataaaaaaattgattaaaaaatcattaaactttttctcttattacattggaatgatatttcattcttttttaaaatggaatagtcannnnnnnnnnnnnnnnnaaagagcattccattggaatgtcattacaatactttaaaatgcaatcaaacaaaggaatggaatgaaaattgtttcctttccattctatttcatttcattacctccaaccaaacgctacctagttactataatgtaaatcatacgctaagtgttctaacaacctgttcgcctcgccaatacctcttatacataacgagatggatgtctcgctatgcgttgtctatgtcctctttgggactatgccttcagacgcgaaatggtttcttgtcaatacgtgaattaattttttgtacatccttgtctcgcttaagattgtgtattcagcgagttatagacatactctattaattctacatttaatgagttattctattttgtatttaataatataattgctattatatttactgattcatattctctgagactaacacgcgtcactttctgaagtaacagccgaatttcgagaacaacgtatttattcaaatgtgtatatctttttcaataaaattaatttaacacaataaaatatttttaaataaaaatatgtacatacataattttataaaaaatattagagcaaattagtctaaatataattatggaaaaacttgttatttagtttcatttattacaataactatttatataaataaattggtgacaaaaa

SEQ ID NO: 47761 - DNA, 1947 bp, Cannabis sativa
  modified_base (1299)..(1299): a, c, t, g, unknown or other
  modified_base (1698)..(1700): a, c, t, g, unknown or other
gattcatacctgagtcagaaacggagcgggggcggggaaatagatacccgctctgaacccgccccgatatgatatatgtatatatttaagttttaaaatcataactattatgattaaaataacttcatattttaagctttttattgattatactccattttatttactatacacactattccacttaagtttattgttttgttgagtttttatgattatttttttgtaattctctttgagacattatttttttttcaaaaatatatatgtaatgggtactcaatggaaatccttctcccatcaagtaatccccaccccgctcccactttaatttacacgagtattgaagcaagtatggggtaaatttaaaaagcgtgtgtaggggtgggggagcaatccccgcacctgccccgccctgtttacatccctaatgagagtagttgtatctttaggacttgcacaacaataataataatgaagttggcaggctatcggtggtacgctattttctagcttacataataatttcacttaaattgaatattttcaatttgaataaatatgaattttgtgtctaacactatattgatatggtgcattgccattagttagtagttatattatttattaaatcaaaatatatatgacccgatattaacttacactaataactatatgtcatttattgtggtgtttgataccacaagatatcccaaaatatttttatttcataattatacatttattctttatctagacttgaattgtgttagattagcatcacattagtgttacatcaataaattcaagtcattgaaacaatttttataatttaagaggaattttcacaatgactaataattcaaaaataaaactctacaatgatcatagtttaaagaggacaagtggcatttattctttcaatttatataataaatattatttatttatttattattttttaatgtattttttgaacaattcttttttaatatattttgacaaacaagtgaagtagtaggtaaattaggtaggagaccaaactcaggtgaaaacaatgttttgtctctctttttttaaaatataattcttatgcaaaaagaactcattctattgattatcaatgattagaattatctctaaaaacaagatgacataaacatgccatactccaacataatattgaccatcaataggagagtaatgtaatgttgactaaaaagaaatgatcaactttttgaacaattaaagagtaggttattttcggagtataatattgaaataataataataataatnataataataataataatggtttttgtttgataaaagttgtagggtaaattttcatacaatattttttttaaaaaaaataatcataatatggtagttctacacttctcctcataaagagaagattttaagtttgaattctcctttcccaatatatatatggaataatttttaatgagtattatctattaatagttattaaacaaatttaattataaatattaattttaaaaatatttaaccatcaaattttaatgtaataacgaataataaaatcacaaatttaaatttctatacttaattaaaaaaatatagaaaaaaaatcttttttcactacataaaaaatgtgttcatataaaaatatttaaataaaaatcaacttttttttttcttttttttttnnnttgctaaaaaactttttttaatttttttttaccgatggaacaatttcccatataatataaaaatgagagatttttctaattagataaaaaaattaagcataaaaactcaaaattttctaatttacccatgggtaatatccattaaggcattaaaagtgtacccataaatatatataattttatatattaaaagtgcctatctaacggcttggtttaacatttcttagtttaacagaatatacttaaa

SEQ ID NO: 47762 - DNA, 2258 bp, Cannabis sativa
ctacaaatcaactttttatttccctaaaggatgcatggcatagatacctaggtcatccgtccaatgttgttttacatcaagtcttaaaaactactaatgtaaagcattctatcattgaaacacactctttttgtgatgcttgtcgatttgggtaatcacatgctttgccttttaaaaattttgaaagtcatgctttacatgttttagatcttattcacactaacttgtggggacctgccccagttgcttcacataccaatttcagatattatattcattttctcgataattatagtaggtacacttggttgcttccactaaaacaaaaatcagatggtcttgcagcatttattcaattaaaaaatttagtggaaaatcagtctaatagaaagataaaataattaaaaactgattgggaaggagagtttaaagctttcttagatttagttgttgctaatggaatatttttccaccactcttgtccctatacttctgaacaaaataggagagttgaacacaaatatagacacatagttgaaatgggtttgacattacttgcacatgcaaacatgactcttaaatattggtatgatgtttttcagacttcaatttacttaatcaatcgtttgcctattccagtatcattctattaagtgtcttaatttgggatacattaaagttcataaaggttataaatgtctaagtcctcaagggggatttatatttctagaaatttcacctttaatgaattagaattcccctatcattttggttccttcaacaattaccaatctaaataacttatcactgtctcaactccccattcccggtttcaatttccagcagtctcatctctcacactttagatgcctctccgtctattcctgcaacatcatcttcttctacaccctcaccacataacaatgtaagtcctgcttcatctgaggatggttatcctattccttttgtttttgatgatttgctagatgatgtttcagctcatgcatcccctaaatcaagtcctatacttagtatttctccacttgctaaaactgttacctcacatcccatggttacaagagccaagtttaccttaatctaagttgattcaaccctgctgatcatgaaccaactttagtgactgatgcccttcagcatgaggggtagaattcagccatgttagatgagatattggctcttaaaaggaataagacctataccctagtttctagacctaacattggcaacctagttggatgtaaatggatttttaaggaaaaattcaatgcaaatggcacatttcaaaggttcaaagtaagacttgttgccaaaggggtttcatcagagtccaggtggattttggagagacttttagtctagtggtaaaagttgatactatcagggtggtcctcacaaaggatgttgctaaagattgggaggtgagacaaagagacataaacaatgtctttcttaatggtattcttgatgagaaagtttatatgtcttagcttccgagatttgaagatcaacacaaatcagactatgtttgtaaactagacaagtctatctataggttaaaatagtcacccaaggcctggtatgaccaactcagagccaccttgattcagtggaaatttgttaattcaagagcaaactctccattctttatgcttaaagaagctcaggttgtcatcatgatattggtctatgtagatgatataattgggacagtgaataatttaagtgaagtcaggactttcattttaaaattcaataagacttttactcacaaaaacctaggtgccttgcattattttcttggtgtaaaggtctttagagatactactggaatttatttgtctcaggacaaatatatttctaaattgttacagaaggctcgaatgcaacatgtgaagcctagtgctacaccaatgacatctaggaaagttttgtctatcaatgatggcaagccactggaacaaccaacattgtatagaagtatcattggagctctgcaatatctcagtcataccctgatagtttttttgttgtgaacaaacttagttaaatcttaaaaagacccacagatgtgcattggagtgcagtaaaaagagtgctcaaatatcttaaaggaacaatttatcatggtttgcatatagctcctagtgatcatctccatctggtaggattttctgatgtagattgggcctgttgcccagataatagtggctggctactatgtctacctgagagattct

SEQ ID NO: 47763 - DNA, 1877 bp, Cannabis sativa
gcggattaataataattaaaatattatttttttctgattttggattttgattgataaattacagtacactcaaaatgaagagaatgttatgaacattgtattatcggctgtatacacaactggaagggttggagtaggatttttaaaagatggaacgatggctggttcaagtgccattgttggttaggttacaaagaaagaccaagcaattttatttacaaggttcaagaaaatcataagtcatagcagacaaaggtgaattatcactaactggtataccttcttctattgttcttcatggaagaatttacttagcttttcaattaaaatttggaaaacaacctctcaccaaccccttattcttgctttcggtttttcatagctaaatcacttgcatttgtctcatcatgatgacaaaacgaccataaagtttgacttcaatataggtaactagtaataaaaaatatgttagtcatttttgcaaagtctggttcaactcctttttcagtttctaactttttttgcttaatattttttctcataggcttaccaagtgatgcacctagtgatattgtgattctcccttccatgcactctccaacaatttatcacttgttttattatttttatgataatttgattaattgcattgattacatttattacgtttatgttgttgaaagcttatgccaacacgagaggaaaattaggtgaaaatttattgaaaattatgtgtattattgacttttatctaatcaaattttgtgattagtttagtatgttttttgagtttcatattttgaagatttttcaacctatggtattcaatatcaatcaaatgtgttggtgattaaactttatgtatgtgtaattaactcttttttttttttttttgaaccaattctatttaatttatgttcctctataattggaattaattctctcttattttttttttttaattagaaccgattttctaaactactgtgtgttgtttatttttacctattttattatagaaacagttctattttaatttatgtctcagttggttttttatttaagtcatttaaaaaaaagttcttgaattattcattttaaaaaataattttttttatttaattaattcaaggaaccggtttttaatttagtcattttggaaacttattttcaatttagttaattcaaggaactagcttttaatttatttgtttttatttaattgatttttgtgtataaatttttatcttggttgttttacggaacccgttttttttttcaaatttttaactagttgataaatatagtcgaattttttatattatattttgaaattgtgtgttattatttattttaatttgttttgttatggaaccggttctgtttatatttatgcctcagtatttttagaattgatccccatgtttctttaaacaaaatatatataaccggttttatgagatattatgtgttattcgtttttactcattttgttataaaactagttttgtttttaatttatatttcagtgttttagaaactgatttctctttgttttttaattataaccgctttgagttattctgtgttattttttttatttattatgtcatggaactgattctatttttaattataactgatttgaattattgcgtgttacttatttttattaattatgttatagaactgattctatttaatttatatatgagacatctatttttggtgacaattctagcaatggagacttttttcggcactggcgacttttcgaagacttttttggttcctgtaactttttcggcaccgacaacttctccatcaaattttcagtgatatttattattaaaaattttatcaaatttatttatagt

SEQ ID NO: 47764 - DNA, 1251 bp, Cannabis sativa
  modified_base (42)..(42): a, c, t, g, unknown or other
ttaggatgttaatgaaacacacttggtagtaaatctagatcntggtaaaatatttccaacatgaattccccaggaccaacggaccttatgctacaaccctttctctgctcgatatcgcaagactttagtatggtgctgacataagccccgatagacctaaccttagattcgatgagttcggcctcgaagatgacattgggatcctgtggggtctttgatttacgaggattagaagacatgatatcaaattcaaggtcacctgggaaaaagaaataatgactttgggtaaaaatattggtttcgctagcagaattgaagatacaaatggaggttaaggccaaactgcgtctcgcaaaaaatgatttttaccctcaaatatctcttgtagatattgcctatggcgacaagcaacttcgtcttggttgcttttattgtatgttccttaatctttgcatcatttacttcaagtaaggatcgaggtttctgggttttaggtttgagtggaagggaaaatttcttgggacactttatttctaagaattctggagaacaaattttagagccaaattgggacatttctatagaaagagaaatcccaattcctggaggaaatttgttaaaactgaaaacttataaatatggtaaacctaagttttaactccacctaaaccctaaaagttaacctagttttttttttttttacttttgccaaaacccagtaaagaaaaacgatgatggaattagtaatgactaaaaataaaccaagaaggaaaagaataaacacttactggttaaagaagtatgcctatgtacgggagagctttgtatttgggttcgagatgagtgacgagatgaaatctggggacgttcgagattggagatcaaatctgaggaaattcgcaaaaaatatatcaatgacaacgagggcatgccaagcttcaaaaaatcgagattggaatttctcagaaaagcttgaactttttgaaaaagcaaaaattgtggaaaaatgggtcctttgctgttttatacttcaaacttaattaccgtaggattaaagggcagaagatccaacagatagaaatgggagagaagtggaaaagatgattcattaatgctaatgatgtgcctcgaaaccattaaaccaccaaattcaaagacatgcatattttaaaattggattatgatggaaatacccatggtaatcatttaaaaagcactttttattaaaaaaggactttttaaggggcaatt

SEQ ID NO: 47765 - DNA, 2070 bp, Cannabis sativa
aggatttttaatccaacaataaattccaacctattatccgtcttaaccgttctcctttgagcgaggtctccaagttagcctaagtaagagtgcatttgtgagctagtatgagggcttccgaagtcatgacggttcaaggcactcactaaaggattttctcgaataggaaagagccagctgaaatcgacccgagactataccttcaaggagaaacaactagccatccagaattcttttccaaagaagggctagctttcctgaagatccttcccgaaaggacaaggaagtcttccaagaccaacttccgcaagtccacaactttccaataataataagtaactcttgaatacttttcatttggagaaactataccacaatatataaaattatttgcttagaaggaaatattatataaataaatacaattatatatatgttgacaatatgtttctgcaataataataataataatattgtctacatgtaattgtaacggatcatcaaatgaaatcattcaaattctatgtctcaactgactagaatattacttcttcaaaaaaaaaaaaaaacttgaattttacgaataaaagctcgtgattttccttattttagaatagtaaaaataacattgtttatcaaacattattttcccatttattatagaaatgatattaataattttgtgtaatatttgtaaattatgtagaccttacaataattttagaaattagtgacaaaaagtttgtgattaattatgctcctcaaatattgtaaaccatataaatataaatatatctttaatttaaaagaaaaaatcaggtgagaaataaagcaataaataaagagagagggcctactaaggaatataccgactcagtctaataattttgggtgaagtatattccagatttctccaaattaataaactttctgctaaagctattattatatattattattataattaatttcaatttccaattcaaaatatgatattttatttatcactgatgtgacaaatctttatttgtataaaatatattattgttgctttcttttgcaaataaatatatataaggcttcgttcattttcatttttatttcaagtagaaaaagtgtgtgtgaagagctgaagactaaggagaagagtgttctcagtagtggaaaagagataataaagattaattgtaagtttgagtagtagctagagtactactgcatggataataataataataatagtcttgaagagagagtttctgtgtttctcaacgaagaatttgatcatcatcgttgtaataatttggaatatgatcatcatcatcatcaatccaacgatacaaatgattggtcagaagagagaaccatctactgggaatctcagtacttacttcttcaggtatattttttatatatataaatatatttattcaaatttctgagagatattagatatatataaatatgaatccatttttattgccctcgattcttttcctataaagggttacaaaagctaaagctgaaaatcattatatatgaattattgatatctaattagttattataaattggtttgaatagtaatataaacgactgttttttactagtattaaatattaagaaaaatatattattcagtcctcttgatttatttaatttttttttttttttttgaatgggtcctcttgatttatttaattaattaagcacttcttaatttttttttaatggtgatttcctctctctatctgtgatccaggtattaagatatttgtacaattaatggtcaatagtcattcagacacattaatcatcaaacaaatataataaattgaagagatatgttattttttttagcatacgtgtcaaaatatacactacgtgtttggttgtgtaatggtccatgtatatattattggtccatatatcattaagctagtggacatacttttcctgtctttttttcaaaataaaataaattattaattaataatatatatatatttttaaatcttgattgtatgtaataataactataattataagttgatgatccaacactacaca

SEQ ID NO: 47766 - DNA, 1221 bp, Cannabis sativa
  modified_base (42)..(56): a, c, t, g, unknown or other
  modified_base (596)..(603): a, c, t, g, unknown or other
  modified_base (860)..(865): a, c, t, g, unknown or other
attaatacaagtcaatactaaacattgtattgtattaaatannnnnnnnnnnnnnnaatacaatacaatacaacacaattcaacacaatacaatacaacacaattatagcttaccaaacgagccgtaagactctcgaaattaaaggacaaccgcacaattaaaatgttatattattatgcaattataatatatagaaggatatattggaatatacataaaagaaattataagaagaacaacacctacgaaaattaattacaatatataaattcccttttgaaaagtgctttttgagagcttataatatgttatgttgattcaattataatgatcatattatgttaattaattaattaattttcttattattataatcaattgtttccccttaattaatttaaatctgttagcaccacaaggtatcttgtaaattaaactaataataattaataatagctctcatacacaatccaattactaaaaagagtatatacaaatcaattataatataaattaataaaattaaaaaataagcattcaaaattaatattgtgtgccatgcatgcatacatatatacaaaaaatatatatatannnnnnnntatatatatatattataaatatgtatggggtatatagctagctagtgtcatagggtggtttattattaatcaaggcgattttcatatatattaatttagttaagtggaaattaattaattacaaatccaaatcaggtaagtaattaggtcatgaattaattgattaataattattatgattaggaacttgtacaaagctatatatataaggcaaagtggaaactccacacgcctaattattaatatatatatatatnnnnnntttttttttttaaaaaaaaagcacccagctcctatattattaaaaattctaatgtattattcaaaaaaaaaaaaaaaaattctaatgtattttttttttcaaattattatgatcaacatatttttttttctgccttttatataattaaaataaataatttatatttattaattttataaataaaaatagttattgttattaaaagatacataaataaaattctatttttatatataaaatagagtgctatacatataatagtatactaggtgattgttacgtgccaagccacgtagtgttagttttatttaatattttagttttttattttaattaataattaaaatagtataatt

SEQ ID NO: 47767 - DNA, 2124 bp, Cannabis sativa
  modified_base (2088)..(2088): a, c, t, g, unknown or other
aagaagagacaataaccagaaattgagcgtctagtgtcttgacaagccccccaatcagcatccgaaaagaaggatacttgaacattggatggagaaagacttgtttcggcatatgctgaaatggtggttgtagtgtttgatgggaagaagagtccttggcctggggttgattttaagtactggaagattctatgtgcagcatggagatgtggaacccgaggacaagttaaaaattgacttaagtggtttacggcataggagatgtcgggccttgtaatagtcaagtatatgagtttgcctatgagactcctataggctgtagggttgggaatagactttccttggtctttacttaattttagatttgtttccatgggagtagacacaggtttggcacccatatagcctgtgccttttagtaattgaagtgtgaaaggcctttgagagactgaaatgcctttctttgtgcgaccaacttcaagaccaagaaaaaaacgaatggtgccaatgtctttaagtttgaacttgtcatggagataagttttgaagtgtgagatggcattgtcattgttgctagcaacaactatgtcatctacatagatgagaatggccaaaaaaatattgtttgttcttttaatgaacaaagaattgtctgaaagagattgaatgaagccatccgaaatcagagtttgactaagtttgctaaaccattgtcgtgaggcttgtttgaggccataaatgcttttgttaagtttgcacacagagtttggaagtgctttgtatcccgcagggattttcatgtaaacttcttcatggagatctccatgaaggaatgcattattgatatctaattgatggacattccaattgtgtatggctgctagtgccaaaaaaattttaagggtgttaaatttagcgacgggggcataggtttgggaatagtcaatgccatgtctttgagtgtagcctttggctactagacgggctttaaacctttcagcggccccactttcattatatttaactttatatacccatttgcaaccaacggctttatgtccgggtggtagcttggtaatgacccaagtattgttgttttcaagggcggttgtttctttgtccatggcaagtagccaatgtcgaaattgagctgcttcagcatagtttttgggctcaatttcagagtatgcagcaagtacagctgctcaaaattgaggatttaacttgatgtaagatagaaaaggttcaatcggatgtgaggtaacggaagcatgacaaacaaagtctttgaggtgttgaggtttgtgcaaaattctaccagttttggtggtttttaggggtgtttgagcagctgttgggacagctttttgatgagaaccagtggtaatagcttcgaatgtggaagtacgggttattgggactggtatactgccaattggcatggtatttatggtagaaactggtgcatgatggctaccaggatcgacaattgcttttgtggtggtttctggtggtgaaaccagtgggttagaaccacatttaggtggttgaatgttaccagcaggtgaggttatggctgtgtgattttttggcgtggaaaccagatgatcagtgccatgtatgagaggtgtaggctgtatattgacagcagtagggtctggtgtgacaccagatgaatgggaaaattcatttgctggtgtgaaatcagaaagttatattcttaagttggattgacctcttgatgtattggttgaaaggtgggaaggacaacatcagcaaataaatggtttattttagatggggatgttggtgaaaccaaaggaaaaatggtttcatagaagacaacatcccgtgaaatataaatttgtttggtttcaatatccaatagaatataggctttcatgccatgagggtaaccaataaaaatagaggccctactcctaggtgtgaatttgtgtctcttggaagggagagtggagccataggctaagcacccaaaacttcttaagtgatcatagttaggaggtttattgttaagaacttggtatgatgttaaccctttaaataatttggagggtgttctattcnttaggtatgtagccgtttggactaggtaagaccaat

SEQ ID NO: 47768 - DNA, 2435 bp, Cannabis sativa
  modified_base (1018)..(1040): a, c, t, g, unknown or other
  modified_base (1446)..(1446): a, c, t, g, unknown or other
gtattttaaattttattccattaccatttctatttttatttctgtttttattcttattcttatatttttatttctcacaaccaaatgccatcttagtttttacctatgttttttttttatatatatatatatatattttagttaatattaaaattagatgtgtaattgaatatctaattaaaaaccgattaaattcaattagtaattgaattagattggattaaattttgagattaaattaaatcagattgtatgataattttctaaattcaattacaaatttgattaaattaaataaagagaaaaaatattaaataggattggtgtccatccctattataatctatacaatttaaatatatcacaattattatttatatttatataattaattactattgatgtagaaactattaatccttttagtatttctcttttttgaatgtcagcctagaatctcttcgggagtagagcaattatccattattaccattataaaaaaaatgattttatattacttaaatctgacaacatgtggataaaattcgattttattgaaaataatgtgaggatagtgtgtctctctttttctgtatcatatcactaagttagaaagaaatgtagatttatacatgtatgtagtaagggaaggttgtattaaatcatgctaaacaaataattaggttgacttagagatactaattaattaagatggtccactgatgagggacaagtgagagtattgtatgagtatttcattacaactgggcataaaaggaggaaacacatatctgttatcatatgttatcttagctgtcctctctctcactctctctgatctagtcctttaattacggtggcagctccagataaaaattgagggttacagctccaataatggttgacataacattattattagaataagagaaatgataaaaggctccagtagtgtttagtatcttcttatgtgtcaatatcgctattggtccaaataagtatcgggtcccatataatnnnnnnnnnnnnnnnnnnnnnnntatcgctagccaattgcaacgcgatatatcgcaaaggtactaggcaccactaatgcctaataacaatgctcttaaaataaagagtatttaatttggacccagacgcacacacacgcctcactgtactcaaacttggaaaaacattttcatattaattatgtgttaatgctagccacatcgatcacacacacaactacacacatgggtcactttctctcttgaaatcagaaataaaaatataatgagacccccaacaagcacccacacagacgggtgtacattaaggccatggtccctgtcaaaattttttaaaagttaaaagttatatttccatcctaattattgttaagtaaactctaaaattttaaatatatttttatcttcttcttttctttttttttttttntttttttttttttgagaaaaagaaggctgcaaaggaggaagaaacaacagcaacaagcagccaaagaggaagaagagggactttctctagctcacttctccagacctgagagcttatcgagcatgattatgagcatccatattaaattgccgaggaaggaactgcaacgaagcaccagggaagtttgagaggagcattcgaatgcgagaaactaaaccagaaagagcagaattgtcctgccaatctccatttacttttgagacgagatttagacaatctgagaaaactacttgtggagaaaattgagagtcaatgcaccactcatctttgtgtgaaacgacgagagtggaaatttttaaaattaattattttttaataaaattattaatttttaaaattataagtacatcccactcatcttttagttaaaattgaataacttcaaacccttaaaaatatagatttcgtcaatgaattatgaacaccacagaattgaaactatcaaccaatgaatcattcaataaatttagatatataattattttatttgtttatacgattctataatataaatatttttatcattatagggtacccttatttttatgtgtatacaaatatgcgattgtatatattgtgaggaaacacttaagaaatataaatattacagatctaaatatattcttaaaagtgttttaatatagaaaattctaaatcaaaaatttatggaacctttgctaaattaaagaagaagatgctgataaaagataagcagaaacactaacctgaaatcattattgaagattgcagaaaatgttttgatcttccaagaatacactattttcttagatattttttctaatgaggaaggagagaatacagaaaccctagtatttcttggtgaccactactttttataggctcattatataatgagttttgggtatttataatttggcccctcaacaaattataaattaacttatggt

SEQ ID NO: 47769 - DNA, 1266 bp, Cannabis sativa
  modified_base (1216)..(1223): a, c, t, g, unknown or other
acattttttctttctttaattttttaatttttaaatttttaattgtttaattgtataattgtataacttataactttctaactttcaaataacatagaaaaaaattagcataaaatttagtatacgtgcctcgcacgtagctttttactagtatatatatatgtccaaaagtattatttttcttagagggttattgaattagtttatttgattttcatatttatttatgtatatgatcctttcatctgctacttttcaaaatttgggaaagtttgtttgattagatcatatgatacttttatcaaccttacattatgaataagaaaataaataattttgtttcattttcaactattagaatactattctaatggaatatcttttctgctattttagtaaaatgactattccatattaaaatagaaggaaagaccattacaatgtaacatgagaaaaaaattaataattttttttttatcaatttttttatgtatattaaattttattccatatttgattcctattcttattctcattcgcatccttatttttatgttttcattcctctcaactaaacgctactaagtgtaacctaagggacactgtttaccaatgttaaattgttaggagtaaatacttttaacttttgttttatttttattttggttctttcggtttccaaactcctccttgaatattgataatgataatggggaagaaatgactagtatatctttttctattcatgtttattattcttttcttccataactgagatatgaaaaaataatttttgagaaatatgagggctttgggttaggtcattgtttacatttttgttgtgattattttggtgctttgattttatttacatactacttagaatatgtatttacttgttgtttgtgtatttacttagattaggttttgagaaatgctttgatctttctgttgttttgctaagaaaagtaaacgttgatatctatagattttaagaacgaattgaacaaaggtattgttcaattatttttcttttaatatacaccaatgatcaattatgtaaggacattggttgtaacctagaaggaaaaactgggtcttggcttatcttttctctgcgtatggccacacagattagaaaaacctaacccacttacttgtcagttctctggattatatgttcaaaagtttaatttcctgatttgtcagttcactnnnnnnnnactggcatgataatcagcgatatgtatacttacaccttggata

SEQ ID NO: 47770 - DNA, 4490 bp, Cannabis sativa
attatcacattatgacagcatctcgcatttgtctccccttaacatcacaaaagaacgcgagaagtacttctcaagattatacttagacacaataagctatcttcaaagtaaagcttcataagatggaacatatgtgttgcgaggagaagaggcgtagtcagcacaattgctcttatagataaagacgagcagttatgacagttacttatttttatcccatatgttataaatataaaacgcggggattataaaaattttcatgaatggttattataaaaagatcccaatagaataattgttatcctaaaattcttataaatagagacagaacttagagaaaaaaagacgaccaattttaaaaagaaagagtataattcataaattatatcttgttttatgtatatacttgataaaattccaaaaataatatgtacttgtggagtatgaagagttaacttcagaaccacattaaaaatcttcgtcttatttatatttattattattatcaattattataattctagagtttatttattatattaaggctcatttattggttaataaaattctgcattaacagtttgatattttcattgagagtcttgtaaataaaaaactcaaaaaaatacattccttaaaaaatatccaaaattttcatccatggcacacgacacccctcaaaacgaagatacttaaccgggagagacaactcaatgtcctgggaaagaacatcagaattcccataggacaagtgcgacagaaactcctcgtttgggaagaggaaatggtgaagaagtatttgaacaaactgggggtgaaatcccacaaagatgtagtgcaaacgtgtacgatcccacaagatattgagtttattatgggacggttagctaacattactctacagtccactctcttggaaagaattaaagaagcacagtatcaagacctggacttagtaaagtctcgagacaagattgtagctgggaagatcaacgattttacagtggatagtaatggtatgttacggtttatggactgtgtttgcgttcctatggatgatgatattaagagaaatttttaatgagtctcatatgaatccttattctgttcacctaggcacaacgaaaatgtatcaagaccttaaattcatgtattggtggcctaaaatgaagaacgatatattagagtgcgttggaaagtgtttgacatgtcagcaagtgaaagctgagcaccaaaggcctgcaagtttgctgcagccattgaacctttcggaatggaaatgggaagacattgccatggacttcgtagttggattacctaggactacggggcagtacgactctgtgtgggtcatagttgacaggtttacaaagtcagcacatttcttgcctattcagacgaacttctccattgatcagtatacaaaattatatgttagagaaatagttcgtctccatggtgtcccaaagtccattgtttctgatagggatctgaagttcacatcaagattctaagagagtttacatcgagctatgagtactcaactaaagatcagtacgacattccatcctcagataaatggacagtccgaaaggactattcaaatttttgaagacatgctacgagcatgtgtgttagactttgaaggatcatgggtaaagtaccttcccctgagctagttctcgtacaacaacagttatcaggcaacaatcaggatggctccttatgaactgctatatggaagaaagtgcagatcacctattcactgggatgaagtaggtgagagaaagttcttgagccccgaagctgttcagagaacaagtgaggcagttaacaaggttagagcgtgaatgctcgctgctcaaagtagatagaaaagttatgctgatccaaagctacgaaatattaattttcagatcagagatggtatttctccgaatatctcctatgaagggtattaaacgctttgactactaagaacgcttcacccattgaaatttactttcttcatcttttttcccaagttcttcacacttcgtagacaccaaacctccattactcaaacacattgacaaacacggtcatcaaggacaagagaccattctcttttcttgcttctattggtttattgttcccaagaaccttacaaccaccatccttatcagattcgtgaatgttgggtctcccatgagctttgtgttcataagtctcgatacagatttcacctaaaaatttatttttgtattattgtccacacactcttgagaacataactctggtgtgtcggacccaaataataaaataaagtagacataaccccattaccatcgcgatatgggagtgaactactataaatccctgatctccattttatttaatgtgattttatttagccaaattaatttctcgcaatcttctttatttttacgatcttcttaaatcagttgataaaaaatcacatcaacacaatcattcaaagttactgtcatcattgtattaactcacagtcatcaccgtgtctcattcattattatcacagtatctcacataccgtatctatctttttctcacttgtagtcattgtatcactatattataattataattttattatattcattccaattttgattctaattatcaataaacaagttttttttttatttttttattattatttgagaaaaaaaatatcgtttgaatttaaatttaaatttcaatataatcttttttataatattttgtacaaataagttaaatataaaaaattaattattatttttctagtgatatatctttatagatatcttaatcaaaactaaaattatattatataatagatatcaattcttttttttaatatacatccctcacaaatacttaaaaatattagttaaaaaataattaattaatttataataaaattacactttcttatcattcatctttatcacttataaataagttatcatcaaattgttttatatttatcataacttattaaaaagagacactacagattccttcatatatacattgagatacctttctcctcaagtttaatttaggaaccttataatttaatataataaataacactatttttgaataaaataatatattgtattaattattataatcaaaatttttaatacaatttaaattgtattatttaatacataacaaatggttcgtattagtttatattataatatttataaaggattcggggtcaactccaatctccgacctagactcaggacccagtgtcgaacctggactcggttgccgagacccgagacccgaacccaaacttgggacctaaactcgaacccagacccgaaacccaaacccggactcacacccggacctagacccaaacttagacccgagaccagaactcgggacttggacccaagactcagacccgaacctcgaacccagactgggacccgaatctgaacccaaactcggacctgagactcgagacccagagctagactcgaacctaaactcaggacccaagacccgaactcgaacccagtcctgaacccggacccagactcagttccgaacccagactagacccaaacttgatcccagaccctgattccagacctggacttcagacttcggacctagacctagacccgcgacccgaacctggacccaaactcgagacccgaacgcgaatctcgatcttggactcggaccccgaacttagacacccgacccgaacccagactaggacccagactcgcactcgaacctggattcagaatcggccccaaagctgagactcgagacccggagccgagactcaggatgcgaagctatactcggacccaaacccgaacttagaatccgtacccagacccagacgcaggtcacgaacctcagacccaggactcgacccgtagttggtgttggagttgagtatgttgaaaatattctattaatacaaatcaatatcaaattagtattgtattaaataatacggcttaccaaactaacacttaaagttatgtaatataaatagattaaatgttttagtttttttttagaaaatagaataaaaagagaattataaatataaaaaattaaagaattaagataagagtcctcaagtgattttaaagtgtcatgtcacccaacttgattctttgctttatgtagatatatagatgctattctttagtgcctttagaaacccctccaatgtatttttatttcatttcatagaaaatgataactaaggtactaattcaactacttattgagaatgaaaattatttacagttaagcaggcaaattgcccaaaggatgatagaaaacagaatgtacaacaaatatgtacagagattacatacatgaatatcttctgagaagaaactgtgttggttattgaccatttttaattgcttatgtcaaagtactttggatctgaaggaaaatgatattccacatgcaactgcaaaatgtaaacaaca

SEQ ID NO: 47771 - DNA, 1868 bp, Cannabis sativa
tcctattgccaattggttttgagatagaacctcattcatcttatcctaaattctaacatggtattagagcaaaaacaaataaaaaaactctctaatagtaatgactatctgactccaacaaaaaaaaaaaaaaaaaaaaaccgattgaagtagagcgaaaaaaaggagccacaaaaaatctaaaaataattgatcaaagagccaaagttattaaaaaagccacttgtgattcggggatagtgagcaaaaaaaaaaaaaaaaagagccacccacacaaaaataccgatccaaaaagtagagcaaaatgaccacttgtgatgagcaaaaaaaaagctgcttatgattgagttgtccaagatggtgagcaaataattaaatagctactatcttgaggaagaatgttagagtctctcacatttctaatatataaatctcattcattttatactaaattctaatttgagctttggaatcattctaaaagcttcgttaaaacacaagttatgagtgtttgaagttgagtagtgaaatttggaattttctaggcaaattgagttatttgaatgttgagcatttttggactaagttttaacaagacaaaaatctgaactttttggatatagtttcaatatatgtaaagatcactgtaattttttaaatttaaatttctcttagaaacgaagttataaattttttgttagaaaatcctaataattagatttttacttactggcggttttaaactagtaacttggaaacactataactcaagactttaaaatgaaattttacatgcaaaatctcagttatttcccaatggttttagcaaaaatgattcaatattgaagttttggtaagatccatacctttgaatttagatgcacatttgaataataagatatgacttttgaatctgaatattgaaatatttagacggtttgttttcttacatctgaatgtattttttttttatattttttaacaatatttttaattgtataatattaataaatttattaaagtatatatacttttaaaatattttcaattattaaaatataaaatataatttatttaaatttaaaactaataatatgtgataggatgaacttattaggttttttttacatttataaaagatgaatattatcattttattactattatatctattaaattcataaataaaaaagttagaaaaaaagacattcttataattctataagtttacacatacattataggggcttttttatttttacactaacaattttttttttgtatttttacggaattctacatagaaacacctattgcaactagcgctgcaatctaaattgcaacaaaaaatcgtatagaaacccctattgcaactagcgctacaactattttagaaacccaaaccgtaaattttaaaaaaaaaaaagttaaaaaaacagtagataaagtaattcccctacattataatattaaaagtcataatatgtaacaaaagtaaaaaagaaaaattcaaaaaaataaaaagtaaaatgtagagatgataatataaaagaaaataaataaataaaaaagagaaagataataataacatagaagtgtaataaataaaaatagtactaattgatttgagttaaggtgttgtttgagagatggataggaaaataataaaaagaaataaaagagtaatatacatatgtattaaaagaaagtcataatatgtaacaaaagttaatttttttttttttaaaaaaaaaagtaaaacatagagatgatattataaaagaaaataaataaataaaaagagaagaatagtaataagataaaagtgtgataaattaaaaaaaatgctaactgaattgacttgaggt

SEQ ID NO: 47772 - DNA, 1193 bp, Cannabis sativa
tattgttaattaattataagacgtccagtcacttataatttttttttttttttttttgaaagacacttataaattttttgaatatactaacaatactattttacaataactaaattctttcacaaattatgcaatgatcactttttgacactacattcctacacgtcgtgtatataattttgactaataatttttacaaaaattatactacagaggccattgtcattttcaactataatataccactagggtttataacccatttttttatatgaaaatatatgttagttatagtaaatattttattaatttttatttttatttcttgaataatttacaatactaaaattaaaatttaatataattacttttgcatatacacgtgattttatttgtatttttttatgcatgtaaaaaaaattatcaaggtttaaaacatgttataactataatatacacctttatcgaaaaaaatatgttataatttctctacatgtgaaaaacagagaacgtaggttaaattaatactcgacatatacctattatatttaaatattctctttatatttcgaaatatattacactaaaaattaaagttttagtaaataacataattttttttttgtaactaagtatcattttagtccaaacaaattatgatttttgttcataatatttttagacttatagttataacataaattttatgaatttttttagtaattacaaatatttatttttagtcacaaattttattgggactaaaattatattttgttttgtagtgttaaacagaattatttgatcccaggattcatggaagagaaataatgagtattagtttaaatttgaattttttttcttaacaagaaagtgtattatataggttgtatacatattggaatggaaagtgttaaatgaatgaataaaatactaaaatgtgtatgtgtggtgaaaggtaaaaaatttaaaaagactagaaagttttatattaaaataggaacatataatataaatttaaaaatttacataaaatagactaacactacaaaatacaacgctacctttagtaataatttttaatcacgacataaattttttgtgattaaatgtgattttatcatcacaatttatataattaagtcaagttgtcactaatttagttttagtgtatggtgactaaaaatacattt

SEQ ID NO: 47773 - DNA, 1342 bp, Cannabis sativa
gttagtcaagacacaatgccttaaatatagggagcattaggtgataaatattttttcttaagaggggtttaatagtttcattattacatgcattatgcattttaattataacttgggaattaaggagtggagtggtgatattttggtactattgagatagaatggtcacctattgctgcctctgcattaggtgttggtcaagttgaattttagagtgtttacaaagtaaaagaatattttcccagaaatattatcaaaaaattaattaaattaattttattatacaatgaccctttttttttaaaacttattagtagtagttgggagcaagtttaatcaactagcgaaaagacaaaattatgaatatatatgtcaagtgtcaacaattaattgctcttctataatagattgcgctaataatattgcaatatagatgtagttaaaaagtcaattagtcattgcttggagtactctttactaaccctattaattaagctgatcatcataatcatcatcattacatatcacaactcatttagtacgtaatatttagtacttctggacgttgttttgatacttttaattcaacaccaaaatctcatggccacacaagcaatatatttgttatatatatataaatattatataaatacatatttatattatatttcttaaaatataggatagcatgcaacaacaaaattgtcacatctattgatgtatattttcttcctgctactattttatttatttatttatttattttttgtggcggaaccaattaatcgaatacaaagtgcataaatatagaaggctagaccagagtatgacacacaattagctaaccctatcattattttaaaccctaattaaagaattaactgttaattaagatttcatgatatatgataatggcaacttcaagaattcttgttttggttgattagttgcgtacgtactatatacagataaatgcaaaatttgtttgttggaatttcatagtaagaatattgactgaactaatctcttatatgactactttattacaaaggaggaaatatccagcaaataaggaactaactattagtgtctatatatattgttgtgaaacaatacctcagcaagaacacacgtacacaaatacaagaatgataaatggaaactaattaggatagtgtagagaatgacagcaagcataaaccaaagtaaaacaatgtcaaacatacacacaaaaaacacaaactttacgaggttcgaacaaggtaatgatgacagggccggccctgagagtagggaggctaggcgtgcgcctcgggcccccgaacgctcagggccccgaaat

SEQ ID NO: 47774 - DNA, 1857 bp, Cannabis sativa
atatgttttgtgtttgttgttttagtttttgtatacaactagttttatttttgaataacgagttttagtttatttttttttaataattagtttcttgtgttatttttttccctgtgtagcatatgaatgtttctttttattatctgagaaagaaagttaaacaagatcaatatctttgaaccaaagggtaacaacaactgattgtgtgtttgattagttgattttcagcaaatataacacatttttggaaaatcattccgatctgagtacaattgattttgatatagtgttatatctcgctatatttttggagaatatttgttttcaaatactgcttgggttttcacagatcatgttcttataattgttcatgtgaaagatcaatctcaccggatttttatccattttaggatcaaggacatgatgtttaatgtttacaactctttatcagggttacgcaatcagaacaaggccttgccccatgttaaggcatattttgtgatgttgccttattttcctaaaattctttaacttttatgcatcgaggccagatcttagcatgaaagatggtccatattctgtaggaattagagagcctcctaattataccttaattatggagctgcctactcaaaagaagaggtaaattttctaactctataatagaaactggttttatttatactgtttattaatatttctttattttttttttattataaccagttttataatatatttttttaagtttgatatttttatatttttgtttgttaaaacttttattaaatgctgtgattgtagagtttttgtgattaagtttgctgatttgttcatcaatgagaagataaatgagataccacgaaatatggctgataagatcgcaacttacagagatgatatggctgttaatttatttactcatgtttggaggaaacagattggtaggcatcaggttgaagatgatgttcaagttaggaaggaaaagtcaaagaaactaaaggagaaggaaaacgctaaaggcaaaggaaaagaagcttgagaagagggtgtggatgttccggagtagtctttttgttaatttgtttttttatttcgtttagataactaattttagtaatgacaatgatacttaacaatttaaatgtttttgtttgactcttgttattttgatgtgttatgttaaacacactatgtaacggttattagtggaattttgtgttatatcctaaaaatggttttttttttttcactactttattagaaatttgtgaaagtagttttttctttcataatgttattagtaatctaacttctgattaattagtagtattgaactactgctctcaaaactatatttaatttcactagagaacaaacttaagcagcccttctagtaatgccacacatcaatatttgcaatgtatagaaattaaaaactatacgtggaacaaagattataccaatctcattactgaccacataccctacatggtttccacgtactatacatgcaaaacatgcatatccctataaataccatatcaccacagtcctcaacttccaccaaaactaactctaactctctatctatcttcatcaattcaaaaatggcgaaactctcatccactgcagctctcctcgcagccctgctgttggtggcccatgcagtcgcatttcgaaccaccatcaccaccgtggaaagcgcagaagacgaggacaactactactacggcggatcttctgtgccagaatgccggcgtcaggtccagaggcaggcgttgagccaatgcaggatgttcatgagggagaagatgatgcatggcggaggacgattcgatgaaatcgataactaca

SEQ ID NO: 47775 - DNA, 4158 bp, Cannabis sativa
attagatttttatttattaaatgtacctaatataattttttttcctgttttttaaatgcatattaaatttttatttattaacataaatatttacttaattatttattaaaattttctaaactacaaaatcataaacctaattatttttcattcgatgtttctgtcaactctctaacgatacacaagtctattattaatttttctatattattattcctcaatttttttatagtcaactttctctttctaattttatactttttgctcattctttttagttgtctttaaatttatatgtttattattattttttttaatgtttctcttaactctctaacattacaaaagttcattattaatctttctatagtattattcctcaatgttttttaatgccaccttttctttctaattttatacttttcgcttattttttttaggttaactatccttagatttatatgttcattgttttttttttaaaaaaaattatccatattattaattttgattaataatgatcctaaaaaggtcaagatgtaagtgtatattagtagtattatattattagtccatttctattttaattttttctattgtaatatgaataaatattgcatcatattatttacttattattattgttgttattgcagtacttagtatcatgttattagtctgtttagactttctctattgtcatattaataaattattatttcatcatatttttcacaatattgttattgtatgttattatggcagtaatttggtttgttttatttaaagagaaaatttaatggaagggatagtgatgactacaagtgaaatagaatgatgagaacatcttcaaatatgatcaactgacgactataagtgagatacggtgataatatcggttttgaatcttataattttctaaatttatcaattgtgttttttttctttttttatatatagatctctattttgtgtgataattctttaatttctaatattttcttcactataacctttgataaagaacttaatatctaattagttacaattctttctttttcctcattataattaattgatgaattttatttggtatatttcttctataataaaattttaaattcatttatgtataaaagtgaatagttattcattgtttgatttgttttatatacacaaaatatgttgggaatgatagttaactacaagttagatatgatgatatataacaacacacttgaatgttataggttgattcttatcacaattcaccctcaaaataagagtcaagcctagcatattattataactaataagattaaaattcgatacaatttattagttagttatcattaaataaaatttataatttattttataatataatttaaaaaattttaaatgtccgtcgtgaagcgcgggttgtttactagtttaattataattagtttgagttattttattctatttgtttctattctttatgttacagaaccggttatatttgaattataaccggtttgagttattttgtactatttattttcattcattatattatagaatcagttctatttttgcttatatttgagacatctacttctgatgactttttcagcaactttttccggcgacaatgacttttccggtgactttcccaacgacttttccggcatcggtgactttttcggcgccgatgacttttctggcgccgatggcttttccggcacctctgacttttccggagccggtgacatttccagcaaaacttattattgtttataaatatgagatttctatctttatttttttacaaaaatatggcataaaaaactcatataaatataaaaaataaaaaagtccatcaccctttagcattatttatttatgccataaaaaagtaagctcttataattttctcaaatatagtgtaatttctacagatttatattggacaatttgaacataataccaactcgctcaatcaaccgaactaacctgaccaacttaattaagaaggtttttttatatatatatatatttatatttttttattatctatatttagagattatataatttatatgaatatttaaaatatataaaattaaaattaatatgttttattatggtggttgatttcaactttaaattcaatttatatatttatgtcattattaaaactaaataaaatataacaattgtatgtaaaaataaaaaaaaaaattagaaatatattaatggttggtttggacgggttaacccaactaaattgaacaattttattggacgtacgagttactattttcttttttcttaattggatgggttgtacttaaatttttgtaatctgacctttacattagattgaataaaatgtagcataaatcgaccaaaccaaccaaccaacgtgcactcttacttgggatacgtaatttggcttcctttatttgagtccaataaagatgtacaatatagctataccgatgtagttttataactataacatttgatccatgccattcaattatacttaaatcttttataataatttgtatctaaataatatttattttagtgacaatgtatccttttgtatatcacaaaaacttataatatttagttaaaagatagagtactataaaactttttaagatgtattaaaaactatccagattatgatagtcttaccttcgtattcctgtctctctttgtagcataagtaaataaggaattatatatgctgcaaatgagatttttgttataccatggcatggcgtgaaacaaacagagcccaacatagcccagaacgaatcgccgacacataagttgtatcatataatattgtaataatgtatatgtatacagacaccatatatttatatataaatcagaattaatgccggcaattcatccttggctttattgcactctctttgtgttcatgcaatgcccattatagtacattacatctttctctttctctaaattatatgttacatgtgtacaatacgtagtatatatataggcaaagaacggtgcatgtacaacataaaaaggaagatattatacatatatatatttaaatagaatcttcaatggattaggaaattccttgtcgagtgatatcaagccactagctggctagcttttttttttttctgctaaattaaaggtacatcattatgaccggaacccatgccacatacatgtgatgaccatatggttttgttctataaagaaaatactatatttggttcgatcggtgtattcagataactgttgacattttttcttctctcgtggtatctcaataaaattctttggatatgggtcaacgtaaagtaacttgtagaaaaggcatataataacaaagagatttgattattatgttatggggaatggttgacatgcatgctatggacttatcatatacagaattcaggaatatagaatctcaaccacagatattgatgagatgtgaggataagtactgccgattatgataagtggttttcatttacaatatattcttacaatttttcagatttaattaatttatatgggtttttttttctggatttttctttcatgcaattttcaatttcatttgtttagttatttttctatcatttaacttgtcacctctaatttcaggaaaataaccgaaatcactactttaagtttaaccgtactactttacaaggtgttagaacttttatgataaaaattgaatagtatgatttagtctcctattttttttttgagaaagcatctgttattataaattaaagaaaatcgtttacaacaataaaaaagatagccgagggtaattcctcaagccaaatacaattattatcctgtactgaagcattttttgctaaaccatgagcaacatgattagcatctcgtctaacatgacgagcacaagctaaagggagattggataaatgataatgaacatccacccaaatcataaaaataagacttaatgggtcttggattgttaattgcattagcaagaagcaaagaatcagtttcaatgaaatccaattgtagattcagactcctagcaaaaattagactataaaacatggccttagcttctatttcttgaggcctatagcaaccacgccgaagaatctcgaataattatac

SEQ ID NO: 47776 - DNA, 2844 bp, Cannabis sativa
ttttacgaggacctgcgtagaatttcaaacttacatcaataggctaagcaatggtcttgggaaaaaccatgcttttattgtacttattattatttatttttccctcttaatgaaaaataaaaggtcgttgacaatgaaaatgaatgtattccgcaaaataaaggacgataactatttgagttagatctcaatccagtatctaacaggcataggcatgaaatttaccagagcttcagcagtcacatagtccttttccatctccagaaactgaagaagtcgatccacgattgcatttacatcatactgctgaagtgctattttcccaactgcacgaattgactctcttgcaataggaatatcaacatttgcagcatattcacataattccgtcactgaaattgacacaagaaagccatgcattagtcataataaaaaataaaactaagagaatatctgcacctgtgagtttgtgaccagagaaaggtcacttaacataacaggatgcagattcgaaatgtcatccaaatgttgtttgcttaccaatttcataagtgttgctctcatttgccactgcagtcaacatgtcgagctttaatttctttacataagttggctcattgtactggcaatagaaatgcttgtaatcattggaaaatatatatggtgcacgcatcaccaagagatgcaagtggcttagaactgcataagattgctctggactccccgagctcactaatgttaggagaggagctttaatgcgttcatacacctaaccaaaagatattttcattagtacagatgttcgttttataaaaggaacatatttagaacaagacaagactgccatatcactgagataacacttctaatgaagtaaacatcaaagcaaaccaaccatgacgtcacagccacactaaaatattttccctaaaaccacatcctagtcataaatgtctttcagccagttatcctataagaacttttctaatccaaacaaagaaatatagttaacttccaaaaattgtttagcattcactgtagagcttatatgactaaattcagcttgtaatacaaagctcaggcacaaacttacactctgaattacaagacatgaaatgtaagaaattggtatatatataaatatatataggaacctacctgttgatgcacatcagtcatggacaaagtcaaatgtagaaacactttggtagtggccaagacaacagcaccatttgcatgctgaagtctatcttcaagaagattcatgatgtcaaatatatcattgctatcggaaggtatatatttcgcaaccaactcgagtacaagacattgagcccattcgctaaattccttgattctgtgttgtgatagcagatattaaagcaagttggagatttaaaaaagtgactaacatgtcaactccgcactttttaattcaaaatttagctacaggttacctttaactcaagtacatggttttcattggtttttgcaaatgtagtggcatgcaaatatttcacaaattaacatttcaaagttgaccaaagcatcaacaacttacagctacatatatcccccctttccacacataaaaaacaagatccttcaatatatgcatgttgttgaaaatgagctcgaaccgacatgtgaaactaatatgatcaaatcaacatgtaaattatatcaagcggaaaaacctcaaccactccagatattatttggaaatattgtttacagatgtatatatcccactaaagtcaggaatgatgcgtgaaagcttaaaaatattccctataatacagagtcaatacactcactctagtaaaagagaagagtgcctttattgaaactgcataataaaagagaatgactaagtgggtgggatattacctatctaggttcgaatcactatacattttcttctttctttatagtcttatttacaattgctctcaagcatatatctttacaataacacatttctgccatcaacattttcttgatgatgagttttgccgtcaacaactgctaaaatctttttcagcaggcaaatgtaaaccataacgacacaagcgaagtaaagcatatattgcatgattatccacatgtgacagcctaataagcacatagaaattaagccaaatttccacagttcaacgtaacacaatattattatgacctgaaaagactgccgtaggaacaaaagaatagctaaatgcactacaacttaacgtgtaataaaaaaaagagagcatttgctgcttcataccgattcagaagatagtaaacaattggcttgctaagtaaagtttccctctccctagatgcttcctcagaggtggtcgcttctaaggtccaaatctcttgcaaggaagaaatacaatttgcaactacctgacgtagcaaatttgaaagtcattagattgaaaaaggaaaccttttcttgaatcatctagagaacaaaagataaataatattgaactatataaaacaataatatgaatgaatagaaagccattccatagcaaaagcagaatatgaaatatggctaagaaaagaaaaagaggggaaaaaaagattgataatagcaaatgatagacaaagaacacccaaaacgttgaacttttttttgacatccatagactttgttatacttatatgtttctttataaccataaaggtcaagaaaaagcataagagtttatttctcaatggtatgccatcttgcacgaataacagtatcagtgtatcaaaatcaattatctaagtcaaatatataggtactaaataccttaaattttgtaactgggaagcccttaaaaatgaaaaagaaaaatcaactta

SEQ ID NO: 47777 - DNA, 1125 bp, Cannabis sativa
atgttagccaagagaagccttgagaaccatttgactcaatcctttctcaattcttctcctgagtggttagctaagtattgtaaagctagcctccttcattctttgtaattttgagctttgtttaataaagttttctttcaaaaaaaaatatataccaattccatcatatatttaaaataaaatttaatttatctagatatgtattatttttttctttttgaaaaaatttgcaacttcatcagtacagatccttcaacaataaagacattatattagtaaaatattttttatactaattatacaattaacttttgaataagagtctttaacaagataatagacaatcttatttaccgatcatttaacaaaaattaataaacacattacttgaaaaagataacaacaatttagattcagaaattaaattctcataaaaaaaaaaaaaaaagcatatggatacaagtttagcaatccacatttccctcaaaaatatgttttaagtgtactaactaaacataaaattaactcaatttctatatgcaaattttctcatctaattaagactcaaactagaaaacaatataaattcattattgtaacaaattaattatgataaatctgataatattgtttcttcttccatatttaattgtcgggttaaaaactacaaaacatgatctgcagatccaaatgttttgatcaccaatctatatgtttacatatctttaatcgacttattttcagacttattctctatatttatatataatatgtatgtaaagcattaactagcacatggtgaattttttattaaaatttgagggataaatatagcaatgtagcttacaagtggaaagtataatattaaataaaaatgatagataggattctctaccctacatttttcagatatatttgatatattatatttataaatgatctctacatgcatatatgctcgtagataatttgtcagcgcgctctacattatcaaatatttataatgaagtgacgcgttataattagttattgatttttgaaatttttacatgaaaaatccattttacacaatttattacaaaattactcacacacgcctatgactacatttttacttacaaagtt

SEQ ID NO: 47778 - DNA, 1539 bp, Cannabis sativa
acacaaatacaattaaaaatggaaacaacaaacattgaaaatggaaacaagacaaattaaaaatagaaaatggaaacaactgatagtaaaacaaattatattgaaaatagaaacaactagtattaagagtgtgtaaaaaatagaaacaactagtatcatttgagtgtgtgtgtgtgtgtgtgtgtgaactataaacaactagaatttatataaaaaaatcgaaacaaatatcataaaaattggaaaataaaaacaagtatcaaaaaactagaaacaactcacattaaaaatagaaacaagaaaaattaaaaatagaaacaattagtattaagtgagcgtgtgtgttaaatggaaacaactagaatttaacctcatatatataaaaataaatggaaacaaatattataaaaaatggaaacaactcacattgaatattgaaaagtggaaataactatcataaaaataaaattactacattttaacctcatatatatatatatgtgggaaatggaaacaaatgccataaaaaatgaaaaacaactagaatttaacctcatatatatatgaaaaatggaaacaagtatcataaaaatagaaaatggaaagaagtcaaattgaaaaatgaaaacaactagaatttaacctcatatataaaaaaaaaaaggaaacaattatcattaaaatagaaacaactcaaattgagaatggaaacatgtcaaactaaactggaagcaataaaattaaaatggaaaaaactcatactaaaacgaaaaataattaggggggttttcaattttgcattttttatgaattttttttttcaaaaataccttaatattgaaacaaattccatataaaatgaaaacaacaagaatttaacctcatatatatgaaaacaagtatcataaaaatagaaacaatacacataaaaaaatagaaacaactcatatatatatataaaaaaaaaaaggaaacaagtatcattaaagtagaaataactcaaattgagtatggaaacatgtcaaataaaaatggaaccaataaaataaaaatagaaacaactcatattgaaacggaaaagaaattatattaaaattggaaacaagtagtatttaataacaatagatacaaatggcataaaaaataaaaagaacataatctttagatggaaacaactagcattatgagtgtgagaaaaaaaaatggaaacaggccaaaaagaaaatagaaacaacttacagtgataatgaaaacaaataccataaaaagtaaaaacaactcacaataaaaattgaaacaaatggaaacgaaatggaaacgattaatcaatcaaatataaaccacaaagtatttagtttggaatttggtaatctatgttttattagtatgaaaacacttgtgaaaatacacattttccttcattaaattttttttacaaaatttttagggtaaatatggaatcttaagatactttatttagggtaaatagataaaaccctaaataaaaccaatcacctttctttcctttctctatcaacc

SEQ ID NO: 47779 - DNA, 1256 bp, Cannabis sativa
cgttatgactacaatgaacaccatagcagaattttttgtagactttcaaaagtttcagataatttatcatgtcaaaataaatcatttatatgtttgttaaaagttctaggaggtctcttgagattaacagatgatgctgagaaatagatacaaatagccaatagtaatctttgggagctccaagataaaaggagcgagagtcttccagctgcattagaagtaagctatttttatcttcctcgacacttgaaaggatgttttgcttattgttcaatattcccaaaaggctatgtctttcaaagagaggagttggtgttcatatggatggccgaaaatcttgtgcagtgttccaagaggaacaggagaatcgaagaagttgatcgtgagtattttgatgatttagtatctttttcatttttccaaccgagtaagaggagggtgtcttgttttgtcatgcatgatcttttagttgatttggctagaactatttcaggaaaatacagttgtttgttggatcaaaatggcaacactgataggcttgagaaaatgacacgtcacctcagatgtgccacagaacataatactgataataagatagctagctatggttttggagatacacgtttgcgaacctttttgacattattaggttcaaggtcatctaaaataagtttttctacagaagtagtgcagaatttggtgtcaacgttgaaatgtttgaaagtgttatcttttcgtggtcttcatatgactgagttccatgattcaattggtgaactgaaacatcttcgctatttagatctttccaagactaaaattgtgattttgcactaaattgtacaatttgtagacattgaaattagaagattgtgatcatcttcaaactttgcccaaagatatgcatcatctcattaatttgagacatcttattatcagtggaaaaatgctagttgagatgccaagtcaaatacataaattgacgaatctccaaattttgacaacttttgttgtggggaaggatggtggcgctaaactagaagaattggcagaacttcaaagtctacactgagagctttccattaagaagttagaaaatgtggtcaatattacaaatgcaccggatcaagttattgtactggagaagaagcaacttgagaaattgaggttggaatggagcgttaatgatgttgttgttggtccaaagcatggagagggtgtgcttgaaatgctttcacctaacacaacgttgaaggagc

SEQ ID NO: 47780 - DNA, 1377 bp, Cannabis sativa
actggaaattcaatgatgtcaatgccttaatgagccgaattgcacaagggcctgatcctactttatattcattgggttcaagttcaagtatggaagcagttgcagtaccaccaccaggcgatggcttagctcatccagtgtttcaagagaccaatagtgaagtgagtgacattagttgataaaagataatagaaaaatcagcatgtaaaaaaaaatatcatgttatgtatcatatttacgagtgtattctctccaaaaaagataaatatataaataaatgttccatttatgatccgtcccgcctcggctcgttggactatttatccagatcgaatctggtctgactcagcttattcggattagaaatttagtattttttttaaagatttttactaatttactaatttttatttcttttttaaaaaaattttggtaaatttatatatgattgtatttaatttatttatttttagaacaaacataccaattttttaagattattgatcaaaaagctcaaatataaaatgatcttaaatttaaaaattaggtgaataaatgtcactttctataaacatttagcaaaatggcttattagttaaaattttcataatgaatttacaattataatctttgaaaatttaccttagttttctacctcttctcagtctcttgtgttcaggccaaatgtcttgctttcttcttctcttgtcgcgccgataagttcagctttgttcctctgttctagtctgatcgccacttactgttagataacatgtcttttttgagacaagataaatctccgaaatatactcttcgagacactaccaatcttccaatcgaactgaagttctattttttcttcccatgtccaataatagctatacaatacatatttataagcttttacactatttgcaaatcactaatgagctcttatagcattttcatagtctaaaatcacattgtcctcatagtggtaaaagtaaaaggaaaattcaatacaaatacaaacataaaaatttaaaacttaacccacttttcaagcccattagacttttatgtttagtccataaaagaagttcatttttcttagaattatttcacaaatattcaaaaattacaaaacacatttatacagaattttaaataattatacaatttttataagtttatttatagaaatataattttttgatgtatttttacattttttttattaatttaatgttaatatttttaatagtcgtatgttatttttttattatttttatataatttttttatatataagaaaatctttaaatattaaaaaaatgtaaattttttagaaaaaaaaaaatagtgctattatccttttctttttctgttttttttttt

SEQ ID NO: 47781 - DNA, 3398 bp, Cannabis sativa
  modified_base (26)..(33): a, c, t, g, unknown or other
gtattttatgtaaataaaattaaaannnnnnnnaaaatatttaaaattccgtgaactgtagcaaaacaattcagctaattatcttgatttgttgtgttacatgactcaaataataattaagatagtagattatgaactttagtatgattgttgatatgtaaaatctataatctgcagtcccaaaactcaaccgatcaaattgctagaactaattagactacaaaaatccgatgtcaaaaaatttgatttcatctaatttcagttaactttgattagctaaagatactcatgtgtactataacaatgtatgtggcctgtgaccacatcagtaaatcattcaaaaattaaagtacaccaaaatagacaatttttcaataataattgtagtgttgggagagaagtgtaagtgacaaaattctacaagctcaataatttaaagacaggaaaaagttttttacccttacgtactggacatatgtgcctaagtggatggttaggattttatatgtatatgtagagagcatcgagtgtagaatgactttattcttatatgtaacttaagaaattaatttcaatttcttgtcgataaacctttgttccaaaatattcgcttatttcaatgccattttgtaaatcaagattttagtgtcacatgtgttaaactaattaaaatttaacacattaattaatctaatttatattaaatatgttaattatttttgttgattcaattagagatttatttttattaatgtatcaaattttgattgatttaacacagtatgaaatactaatttttaacaggaaatcttaattcccattctgtaagcatagagattctcaatatgcctttattctgtaacaaactctatgacgtgtcagttgtgcattgaggcacattttccttataatagttgtaattacatataacactaaagagtaactcatgctttgaaatgagatttacacccttcaccatctttgtttaattatgagaaatacaaatcatcttatctacccaaaaagaaaaaacaaaattatattttacataattaatataactacataattttcgctcttggtaaaaattaccataaaagaaaataaaatctcatggctataaataatttgaggaatatatcacaggcctcatgaaattattgagggactacatgtatattactattgaatgaaatatatatataaaactagaaatgacattttcagcatatattaaatcaataaaccctcaaatgaacagtgtagtagtactgttcattggcttcattttgaggtcacatatctgatttgccagaaacttcattttggcttttaacacaaggttggggatgctctaagtgtcactctctttgataacataaattcatgtgagagaagaagctagacaacaagagatctttccattacattcaaacaaaatttctttattttttttactattatttcaattatcatataaaagggttacaaattacattacttgctcattggtacaacaataattattacccctctttctttttcctaataatgcaaaagaaggtggaaaatacaccaaaaaaaaaaaaaaaaacaccttcatagagtctctagataataataccaataatactaataatttatagagacaccccatttgaaaaaaaataaacagagggttttggatttgggttagggataagatacatttgaaaataatacacttggtgaacaagataaatatatatatatatttagttaattaggtggaaaaaaatcttgtatgaaattgtttgattctttccagaatctggctgggagtccattttgaggcactggaaatgggccatattgaatcccactttgagatcccacaacttcccacctacaaaaccaatattaaactcaaaattaattataaaaaaggagagaagagtggctagtagtactacaaaataagaattgctaagcattatggaacttagcacatttttttggtgtcatatcactattagtggaattaataagtagcaagttctatataagttaagaaaatcaacattgctaaaaggcatcatttctacttagcactcttctgagtgctattggtgtaattaagtataaaatctcatataatttaaaaaaataactttaagaaaatatcgctaaccaatcgtataaggccacatggttaacaatgctctaaaaaaataacttaaagatttgtttagttaagaatcattttgcattaattgtaattaattacctgtattgagtgactaaatggtggataaaaactagcatctctaacttggcaagctcatttccaggacaagagtgtaccccattgccaaatggcataaaagtattactctttggaggaacctgtaaccacattaagattttagtcattagtataataattaaataatgtctttttttgtttttcttttttcaacattataaatgatgactctggtatataaaaaccaacctcaaacctagaagggtcaaaattttgtggatcagggaagaattgagggttgtgatgaatgtttcgaaacaatggcatcactttccaaccctttggaataatgtatcctgcaaaaaccaaatataatcaaaataatgtaataataagaagacaatatagtacataaaattgttatatattaattttaatgagtaagagaatcttctagattgatggtgccctttacataccgttgtattctacatcagtcactgcttccctaaatgtgaatgatataatactagccatcctcaagctctccaatatcacctgaaaaaataattattatttttatttatttatttaataatatttaaaataaaataatcaaaattgggtctttttcaagaaaataaaaataaaacaattttttttgggaccaaattaattaagaccccactcacacctaaagtcggctctaatatgaattaaaatctaataccttatgtgtaagtggcatacttctagtttgtttccatgtcaagggcttttttccttcatcattttcttgatatattaccatttgctctgcctacacaaattaatcaatgacaaataaaaggattaattagatatatactaataagtaagccatgatcaaaagtgtgttaggccatttttatacacactaaaaactcctatatatatacagtattttctcacaaaatgttatgactgaactttaaaatctattataatttgatgagagtctacagtatcacactaatcataatgagacactgtataataaagaatataatttttagtattgtagttggaattagaaaaaaaaaatttactactaaaataatattcttttagtgtaaatttaacaccaaatttaagtttcgatattagggatgac

SEQ ID NO: 47782 - DNA, 1584 bp, Cannabis sativa
taaattatttaataataaatattaataatttaacattcaagtatatatcaaaatattcaactctttattaataatcaaaaatgtctatataagcttctcaggacataaaccctaacaatatatacatttaataactagccttgaaaaatacaaatggtagacatatttaagtctctccttaaacatttaagggcgagtcatgaataactactattttgtaagaccaacgagatgaactaatataaaaagtccatctcaggatacacaaagtaaataataaaacaacagttagctggaaatgatagataatatgttctttaagagcttgtaacttattgacccacatactcgtgagtatgttgaaagactaagggatgtacacaaaaagtgattcactaacagacgacacaggttgatagtgtctcacgtaaatatattcagtcagctctaacattacaaaagaatacgaggagcactttagaaataatacctcagcacagaaattgtcttcaaaataaacatcaaaaggtgatttatcaatattgcgaggcgtataagctaagtcagcacaactgtttttagataaagacaagggcgattatggcatttatctatttatctaatgtgttgtaaatatgaaacctaagaattgtccacgtttcatgagcagttttgaggataggatcatagggaaataatcatctatcccatacatctataaataggggaagacttcctagaattagttacgaccaaattgagaatcatagagaaaaaaaccaaacatcgtattttgtaaaaactcatcaaatcctgataataagattgactcgtggactatgaacaattaacttcaaaactacgtaaaaatctttttgtttgtatttattatactattattatttattattctaaaattaatttataaaatcaaggctcatttattggttaacgaaaatcaccgttaacacttactttcatcaattatatttaaataaggacatagtgtggtataggttcacttattaaaactaaggtcattagtcgtcatgtctaatataagctcatgtaattttttctactattatctactaataagcaaattttagaagaaaaataaaataataacaaaaaattatgaaaaaatagaagaataataacacaaaaaatattaatattatatgtgtgctcgtataattttctacactattatatatttactaataaacatatgagaagaatattaaaaaaaaaagcaaaaaaattgaaaaaaaaaaaaaaaagcacaaaagaaaaaagatggtaaaaacatgtacaaacgacttaaaaaaatttaaaaacaaaataaagtaaaaaaaatgagagagatcttttgagaaaaatgaagaaaaatatgaggtttaaaagaaaagaaaaaagacaaaacattaataattggtaaaaacaaaacaaaatacttaactccaaacatagtaaaaaaaaaaaaatacaaattactaaaataatcttattcaattcgagaaaatataaaagagtaaagacaataggaaaatctctacctaagcaatgcacaagtaaaaaaaa

SEQ ID NO: 47783 - DNA, 3229 bp, Cannabis sativa
aaactggattgaagtaaggttagatcgtgcactcatcaacgacgcttggtctcgaatttttcaaggtgcttctctgctaaatcttgaaatttcttcatcagatcactgtccactttttttagaacctgaaattaatcattgtttccctactaatcgcaaatttaagttcgaaaatgcttggctcaaagaaccaatgtgctttgaaatagtaagggactgttgggagagtgaaggtgatgataatttgccaaataaattggcacggtgtgcagataaattgagtatatgggggaaggaggtgactggcaacttcaaagctcgtattactcgctgcaagaatgagatcaaaaggctagcaaataaaagagacacggcttccattcaacggcataaagaagtaaaggaggagttgtttcatgttcttgatcagagagaatcattttggaagcagcgctctaaacagctttggttgaaggaaggagaccataatagcagttatttccataaggctgccacaaccaggaagagacataacaagatagtgagtttgaagaatgacaatggggttcgggtaggatgggaaaatggtcttgatcaagtgatgaaagattatttctcaacattgtttcaagcatctaattctacttgccaagaagtagtggatagtgttcattgttcggtccctaattctattcatgagaacttgcacacggccatctctgaagaagaggttaaaaaggcgatctttcagatgcatccagacaagagtcctggtccggatggtatgacacctgccttttatcagaagtgttggagtattgtggggcgtgatgtggtgagaactgttcaaaaattcttcatgacaggggagtttgatcagagttgtagtaaagccaatattgtgttgattcctaagaagaaaaatccagaagatatgactcaactaagaccgattgccctgtgtaatgttgtgtacaaaacaattactaaggtaatggtgaaccgtatgaagccttacatggatactattgttgctgatactcaaagtgcctttatcccgggacgtctaatctcagataatattctaatttccttcgaggtgctccactatctgaagagaaagaggaaaggaaaagaaggttttatggctctaaagttagacatgagtaaagcctacgacaggattgaatggccctttttagaagcgatgctaaggaaattaggctttgatcaatggtggatttctttattgatgaagtgtgtaactacagctgaatatatggtggttcatgagaataaggagatagggccgattataccttcccggggtattcgacaaggggatccattatccccttacttgtttattctctgtgccgagggcctctcggctttattgaacaagtatgaacgggctggtcttatccatgggtgtaaggtggcgaatggagcgccgcgtatctctcatatgctctttgcagatgatagctacctgtattgcaaggctactatcttggaagcgaacagaataaaggatatcctccaaaagtttgaagcagcttctggccaaaaggtgaactttgcaaagtcgtccattttctatagctctaatactatccagtcggttcgggataggataagcaacaccctacacatgtctatggcggatgaaaacagcttatacttgggtctaccaagcactctaagtaggaacaagtctgcggtgttgggttatcttaaggaacgggttcgaaaaaggattgaaggttgggagatgaagttcttatctcgggctggtaaagaagttttgatcaaaaccgtggctcagtctcttccaagctacgcaatgagtgttttcttgttgcctctagacatcacgcgagacatggagaaagccatgaataagttctggtggcaaggtgcaaataaagctaagagtggtattcattggttttcttgggatagactttgctcacataaagctaaaggtggaatgggattcaggcacctacgggattttaacgttgctatgttggccaaacaagggtggaggctgctgtctcggcctaactcacttgtagctaaagtcttcaaagctaggtattattctaatggttctttcttcacggcacagttgggtcccaatcccagttatgtgtggagaagtgtactggaagcacaagatctggttagaaaaggcactcgctggtgtgtgttcgatggtgaagagatcaatgtcctcaaagaaccttggttgccaagtgaagatgacccctatgttcattcaaatcatcctagtttgggtgaagctaaagtgagaaacttaatggtcatggagggtgggagttgggatgttgatatcttgaatgatttgtttattgagcgggataagaagctcattttggatatccctctcaacataagccacggcagtgacaagctcacttggagttatgaatcatcgggaatctactctgttaaaagtggctacaatttgcttcagaaaattcatggtagatgggatggtaacgaagatgatctcaccaagttctggaccaagttttggaagcaaaaaattcccccaaaagtgaagaacctggtttggagagctgcccgagagtgtctgcccacgctgcagcaattgaaaattaaaagagtggatgtacaaacatcctgcccagtctgccacagcgaagatgaatccgtcattcacgcactcatcacttgcacaaaggtgaagcaggtgtgggacagagttggcatcggaacaacctctgctgcagccgaaccagaaagctttctggactggtttgtcgctgctttcactgctgctgaagcagagaaaaaactgctacttccggttctgtgttgggccatttggagcgcccgtaacgatgttgtgtggcaaaagaaatctgttactgcagccagcattgtagtgttagcaaccggttaccttgaacaatggaagaatgctcaaaattctcgaatcgagacgtcatggtcaggccttaaagccgatgacggggctgagcattggactgtcccaagtattaatcacatcaaggtaaatgttgacgctgctctctttgatagtggtaacaagtatggatgcggtttagtggcaagagaccatcacggcatgctaattgagggaaatatgaaactttttactggttcggtttctcccgaagtagcagaatccattggcattcgtgaagcgttaagt

SEQ ID NO: 47784 - DNA, 1961 bp, Cannabis sativa
  modified_base (1907)..(1920): a, c, t, g, unknown or other
ttcagttgcaaacacaactcacccatttgcaacaaggtgaccaatccgtcaccatatactttacaaagctcaaatcgatttgggatgagctaaaataattccaaccaaacgccacttgttcttgtggtgccatgaaattgtttcttgattactataaccaaaatcaagtcttgcaatttctcaccggtctcaataagtcttatgcatctgtaagggctcaaattcttcttaatgaactgattcctaacctctctcgagtcttctctatgatagttcaagaagagagataaaggactttaagatcctcatatatgtcatcccttgcatccttggttcgcccttcttcatccactaacaatcctcgatccaaaaaatcgaggccttcttgtactagttgtagcgaaccaggacattatgtggataaatgctactttctttatgggtttccaccaggctatgtggacaaaaagaaatctgataaaggcaaggccactgccaataatgttgcagcaagttctaaaccagaaattgcgcatagtaactctcaagctgacctttccacccaatgtcagcagctcatttctttactcagtcacaaattgagccaaggtccaactcgtgatgactccaacaatgttcctatagcttcaaacatggctagtaacaagtctttatttcaaaaaaaaaattcggataattgataaaggagccacacatcacatgtgctccaccaaatcttatttttccaattttactaatcatgctttcccaccacaagtgcttctccctaatggcactaacattcatgttcaaagaatcggcactatcaaattaaaccagcaactaactcttcataatgtgctgtttgtacccacatgcattataaacttgttttccattcctacatttcttcacaacaccactaacatggtctctttcaaacttaattattggttttacaggctcattcttcgagtgtggtgattgggacagctagaagacttggaaaattttatgtcattctccaagattcacttccaatagctagttctacttgtcctttattttctactaataatggagaccattgacataaacgccttggccatccttcaatgtacatttctcaaactttcaataaaatgcatgatgttggttccattaattccaagaatcacttctatcatatttgtcaccttgcaaaacaaaagaggttgcctttcatatcaaataacaactttgttgaaaacatatttgaccttatccacatggacatttggggaccattcaacataataagtattgaaggttacaaatattttcttataatcgttgatgacaaatctcgatttacatcgacattcatgcttaaaaccaagtctgaagtgcaaaatactatccttatgttctataacatggcttgcacgcaataatcaaaacctattaaagctattatatctgacaatgccaaagaacttaatatgcaatctttttatgcttccaaagacattttccattaccattcgtgtgttgaaagaccacagcaaaactcggttgcgaaaagaaaacaccaacatattttaaatattgctggagctttatgcttccaatcccatttaccccttccctattggtcatatctcattcatactgctacatacttaatgaataggacaccttctaatctacttcaaggcagcacctcctatgagatacttcacaataaacccccctctatgaccatcttatattgtttgggtgcatagcatatccctctacccttccctctagtaggcacaagttctcccctacgagtcgtgcctcaattttcattggatacccccaaggtatgaaagcctatatattgcttgatattgaaaccaagcaaatattgttgggttttatgnnnnnnnnnnnnnncatttcatataatcagatttactcattaataaagatcagaa

SEQ ID NO: 47785 - DNA, 1745 bp, Cannabis sativa
tctctccacctattgttttgaatgaaattactcaccaaactaacaccttctgttgctactcggcgtggctgaggttgtagggtgtccccgggaacccaaggatgaaaccaaattgacgtggcattcccatttccaattttttggcaaattcctctatgatgaaaggcctaatctggagtatagctttccagagcatggagttagtggcctgaacatccatgtctaggaagttttgattcttaatgtgctttgtggccatgactttgctccataggcttgtgtcgccaacaaggattttccatgcccaattcattaaaaaggctttgtttgtggcttctgttgatctaaatctcaggccaccgtaagtcttgggtctgcaaagcttctcccaagcattatagtggaaaactcttttttcctccgagtctccccactaaaagtctcttaacgctctatcaatcttgttcgccgttgatatggggatgttattagaagatgcaatgtagtttgctaatgttgagcccacagacttgatgagacaagcacgcccgacactagataagagtttggccttccacccttgaacacacttcaaaactttatccataaggtggttatagtcttctattcggtaaggggacctgaataagggtaggcctagatatgaagcatttatgcccatcttcttcatcccaagataattagtgatagctcttatcctctcccttggcacaccttttgaaaagaacacataagatttttggagattgattgattgcccagaccattgacagtacgtagataggcaatcttggaacgccttagcttctttcaaagtggcctgaccgaagaggatgatatcgtctgcaaacattaagtggtttaccacagttccatgtctctccaacttgaagcctttaattaagcatttttcttccttatcaaggagaagacagaatagagtctttgcggcaataatgaacaaagatggggataaggggtctccttgtcgtaagccccgctctggattgattttccccacaatggatccgttgagcaagagtttaatctccttcactgagatgcaggcccgaatccactcagtgaataagtgggagaagccaagttgagtgagaactgcgatgataaaatcccagtccattttttcgtagattttttccaaatcaagtttcatcatcatgaaacctctattccccctctttttcttcatagaatggacaatttctcttgcgatcattgtgttttctgcaatgcagtggcccttgacaaaagctgcttgatttggtgaaataattttttgaattactcttcgaagtcgtgacgcgatgatcttggaaataatcttgtaggccacattacaaagcgctatcggtcgatagtcctttgtgtacactggagaatgtttcttcgggatgacaatcgtggtgtcattaatgtaatgaggtagttccatatgagtgaagaaatggataaccatctcaaataaatccgcttagatggtgtcctagtggtgcgcaaaaaaactcggaggaaggccatcggggccgggggctttgtcctttcccatctcgttatccgtagtgacttcctcagcattgggaaaagcatttagaatgagattatcatggttagaaatagttgcactaaacactccattcaaagccggtggtgattagtcatgctgtctgttgaatagaaatcatatttataccttaatggacatt

SEQ ID NO: 47786 - DNA, 1061 bp, Cannabis sativa
tttttttattaagtttctaatatcttaaattttaattagcactacaaaaaataattatttgcattaataagaatagctatagctagctgcctagcttagtaaaaaatctttgtttgcaactttatatgttttttattatacatgtcgaaacaataataaattaagatgaaaaacaacagataaaatataattaataaaaaagattaaacattcttcattcatataatatctaaaattagaaacttatatacataacttgttcaaatttctacacaaaaaaaaaaaggtttctacagcatgtctgtcacttaaaaatgtgtaaccaaaccatagaaattaagtctttctttttaaatgacacattacacaaagtaagtgtcaatttttttaaaactaatcttatctaattaaactagacagtaattggtaccaaggatagaagaagtcctctcattctttaactcttctctccaccttaagttggtcctttcaatgaacttttcactcctcctctgcaattcaatatcatcataatcatcatcactatcaccatcaacatcttcattactattatcactataaaaatcagtactatcttggtcagaaccataaaagaaattgcaatcattgcggttgtcgatgtgatcatcatgataataatctcggccatcatcgtctgtttttgcttcttcgtcaactttgtgtgatggaaatagaaatgaggcatgaaggttattgatctcatcaacacaatctctatagtgcttatgataatcattatagaggatcatgatgataagatgattgaagacaataaatatgacaaagattgccaagggactcgatttgactgaaacaatgaaattgaagatggagataataaagtcacgattcagtgaaaaagagcaggtaatgaataggatcagtgtgagaagaagaatcaaattaatgtaatgatatagactaatatttgaaaatgtgaacattttctccatttttgctgatgtaaaaatgttaaaggtgagatttgaagaaaggctgacttaagaggaaagaagatg

SEQ ID NO: 47787 - DNA, 1810 bp, Cannabis sativa
  modified_base (1279)..(1294): a, c, t, g, unknown or other
atatatttatatatatatattgtttatatatgtagacatgggtcccctccttatacattttattatttgtactcgtttcactctcctttgtcctttttatagaatataggtatatttaaaaagttgccataatataatataatcaagctcaatttttagcccaaattttgatttgcatgctaatttatgaaatagtcaagttagcatgtattcaagataggtatgaaatatttaaaattgcatgcaaaattcgaagtttattatattcttgatgacttatgttaatccaattaatgtattggctttatatgcttttatagttaaacatgtggtgacatgatgatgatcaccctattatttttttttttcaaattaaagattgcctttaaattttgatttaaggagtatatatatattatatatagggttttttttttagacatcatggtcaacagttctaattaactaactagctttgatataattattgagggttgtggcagaaagaattatagagagaaaagaagagaatctgaatttattattattgaattgaattattacaaagctaaagaaagaatatatacacaaaaataacagaccgacttaactaaagaaggaaaagaaagtgtaactaacttttaacagacttttaacaaacttaactaacaactataactatttatttaacaaactctttaatatcctccctcaagctcgaaggagggtactccagtgagagcttgtgacataaaaaattgaacttgggaagagttaagggctttgtaagaatatcagctggttgttcttcagtcggtatataagcaactgttattttgttctgagaaaccaagtcatgaacatagtgaacatctacttcgatgtgtttggttcttgattggaaaacatgattagaggcaagttgttggacaccctgattatcacaccagataacaggagtggtaggaggtgtaatgccaagttcgtgtaaaacagaggagatccatactacttcagtagcagtagaagacaaggatcggtattctgattctgtgttagaacgagcaacagtcgtttgcttctttgaccctcatgtgataagatgatccaagcataacacagtaaccagtgttggaatttcgatcatctaaattacatgcccaatcagcattagagaagccttccaaagttagaagcttagctggtttcaagactagtccaaggttgatagtgccactacaagaaatgtcacttttaccagcacagttcgctaccgcgnnnnnnnnnnnnnnnnttaccagcgcatttcgcaaactacgctggcaaagaggtcaaatttttaccagcgcacatttgtaatggctaaaatctaacttgtaccagcgcatttacgcgccaggaaaagttatttttggcagcgcttttcattttatgctagcaacagttctaataccaatatagagtgtgcgatcagaaaaaagatcactgtccatggtagagagcttatggccaggtgtcattggagtggtgcaagtcttagcatcttccatttttgtttttcttaggatgtcttttgcatattgagcttgattgagatagaatgctgactggtctcgaatggcttaaaacccaagaagaaacttactgattccatgtcttttaaagcaaactaagagttgagggaagagataagatgattaatatgttgggttttatgccctaaataaaactcgttacaatctgattagttatcaatttagaagtaaagtatgtttacatgtatgttacatgtttatggtttaatacatat

SEQ ID NO: 47788 - DNA, 1765 bp, Cannabis sativa
acaaatacctcgcataccaccaactgaactaaggccattgagaagattcgagctcgtatgctgcctcacagagtagatagaagagttacactgatctaaagcgtagagatattgaattctaggttggggattttattttaattcgagtgtgcccaatgaagggaaattaagaggtttgggaagaagggaaagttgagtcccagatttattggcccatttgaaattctagaaagggttggacaggtagcctatcggctagccctaccccatgctttatatagagtccataatgtgttccacatctcaatgctttgaaagtacgtgtctaatacgactcatatcctaagctatgaagatactgagcttcagaaagatttgtaatacgaagaacaaccagtccagatcctagataggaaagagaaagtgttgtggaacaagactattccactagttaaggtgttgtggaggaacaacaagattgaataggcgacttgggagttagagtcacagatgcgggagcagtatctcgaactatttcggtaaattttgaggacaaaatttctataagtaggagagagttgtaatatcctgaaaaatataatagtgttcaattaggcatattgtattaaatatgtgattattcagataatgtgataagattacaatcttacttaaactaattatgagttaattagcatcaatctagtaaaggaatgaatgaaacgtaatttattaattacgaaggttttatcgggttatatgggtattgtaaataccacttttaaaataaaatatttttgggttcagcgaccgtgaaaactcgacagggtggtcagaaatattacagtggttgaaattgtgttatattggagttatactggactaggttaaaatgttgaaaagtaggttaaatcgggaaaattagaaatgaccaaaatacccctaggaattgattttagtcttaaggttataaaaggggcaaattagtcattttagtgatggatattaattttgtcctacatggatttttggctgaaattgaggtttatattagttagataagtttatttaaaatttagtttaataaaataaaagggataaagcttataaagaaagaaaagaagtaaaaaccaaatattatccaagtcgctctcttccccttcgacaggcctagcaccccaagcaagaaattagaaattttcttgaaatttcaaccagtttttagtaggattgatcaaggttagaagtctcctaagttgtgaggtaagttctctatctttctctagttgatttttgaagtatggattgagttttggttagggttttaggatttcaggtctgaggtgctaaactgagtttagattatgtttttaggtttgatttagggttttcttgagttcaaattaagtgtatttaatggctgtttggtttggaattagaaattttagtttaagaacctaatttttggttctagcatggtgttttgaatattttgatgaattgttgagaattgtttgtttgaatgcattatttttatggtacaaaactattctggagagtttgaataagtttggaggcaatttggttgggttttggtgcaaaaaccagagtttcccttttctgcatcagggaaaccgattaaccaatttcacaggtatagtgaaactgatcaactagttttgccagcaagggaaacactagtttttggctttgaaatcggttttcatcggggtgttttttagagcttagattagggtattttagt

SEQ ID NO: 47789 - DNA, 1572 bp, Cannabis sativa
ttttttttttttccaactatatggtatgggcctaaaacacaatttcatgcccatggacttctttaaaagaaacaaaaactttgaacctaagaatgagaaaaaggcccaaaatatcaaagtaagaagacgaagtgacacacttcaatatatcatagtcctaattaagaattaataaatagtaaaaaattctacatcctattcgagttcatgattttaaccgtaaaacttgtcttcctacaattaagaatattaaaggatcaaagattttcgtacaaagaatgattaaggatctcaaattttaataatgatgtgttttatttgtttttctttagtgttgtttttatttattataatttataagcatacaaaggaatgatgcgtgcaaatgcatgataaggacctaaaaatttctatgttttaaattcttatgatggtataactgagtaactccaaccacaatatgtacaagattaattgtgattcttatcaccattcaaaaaactataaaaattgtaataatttgtaacgttaatatttaacggtgcataaaaactatacttaattaaccaaatcaaaacaaattaatgaagtatatatgtatgtatatccaaattacaattggccggattgtaacatatgtgaaattgaaccactaattattacaatcaatataatctaatcatatttttaaacattaaattaaaaaagtttgttgatttgatgttgttttttgtttttaagcaaattttgttgaaatttatttatgaatatatatagtattgtttaatattaaattataattacgtactcatgatttttttttttaaaagtacgtacgtactcatgatcaaaacacattttattttttcattttaaataaatatatttatataaaaaataataattcatattcgtttcaaataaaatattgacaaaaataaaaataaagaaaatccaatacaacttatactactaaatatatttgttattcacgtttttgtggatcggtacgtataacacatgtactttcaaattaattaaagattaaaattaattaagacgttcatttacaagcccaatcaaactcgtgagttagcctatcatggcgccatgcctccagattcagctacaaattccatgtatagatataataaagtcgaaacttatcgatcccaaaaggtcgacttgcctagaagatgaaagaccaagcaaagcgtattcggatgccctcatgggataatccaggaagggaatctgaagagacatttgtgagtaatcctacgtggtacctttttgatattgaatcccaccaaatcagaggttaatttgtctcatatgttagacatgggagtgcacacaccaccaaaaggaacatgccttttgtccaacatcttcttctctaacatctattgtgcgctatcagcgacacgcaacacccctgtcactgtcaagtggtcccctttcgtacggataaccgttgtctcacaaattgggcctcatctaacctgcacaaagtcaatataatattgtatcttaccccatcagtgagcttagttgacacatgcaaaccct

SEQ ID NO: 47790 - DNA, 1049 bp, Cannabis sativa
tacgtgcaactactgtcttacttgctgtcccgcagatgtggagattcccaatccccgggtgctccttaccaagtgccggtaatcctagtgataattttaggattcacaaatatagggttaatacctaaatccactttcacacaatataaatttggcattcataatatagataataaaatagagctcggagtaggctttccaacgatatatagaactctcaaaatgatgtccagatcacaaagttacaaatattcgaagtttccattcgaatctgcccagaaacaagggggcgggccgcgacactccccagatggggacgtggcgcctggaaccaaaacccaggccaccaactggaggtaggccgtggtgcacaaagagctgggccgcggcccctgggttccaaacccaaaaaaaaaaacaacccatttaggttcgcaaaaccagcccaaacacatccaattcaaccccaaaacatgctcaaacatcaataataacttcacaataaaatccataaacgagagagctaccacacacattaaaagctgtaaatcacaacatacatgcaacataaaaattagattttatccataccctaaataagcacaacttatgagaaaactcatctatatcacaaactcaagaacctagaacttgcaacttgacacaccaaaaaccagaaacttaaattagagtcaaagatccattttaatctctaacaacagtactagataaactccaacaaggaaaaatgtaaaattcccctcatgagcaagttcgcacagcaaaatcaccaacatctagcaccatttattactcatgcaatcaagaatattcaaagcttagaaaaacataattttcaatttctactttagctacaaattatagattaaggctatgaaaagttacctcaaattcaatccaaaaccaagcacaaagatccacaaataacaaggtccaaaccaagcaaattctcacaaaactcaccaatttgaaataggttttgagagaaagagatagagagagggggggtcgggtttgaggtgcaagaa

SEQ ID NO: 47791 - DNA, 1635 bp, Cannabis sativa
aataccctaaatatcacaaaaacgggaaaaactagggttcacaaaattgtcccaaccggtagaccggttccccaatcagaatttcggtttagtagagtttcctagggaccaaccggtcgaccagttcagcgcaggaaccaccaaaaatgtccccaacacttcaaattaaccctaaactctccaacaatcttcggaagacatgtatataccataatgaaccaattcaagcaataagcctaaataataaactcaaaaattcaaaacaccatttgagaaccaagttaagttctctaacctcaattttgctcaaaccacaccaaaatctacgaacacaactcaaaaaccactcaaataatcctattgcaaccccaaactatgaaattaaactaattgtacaaccataaaacctaaattctcaaaatcaagcacccaaaacctatcttgagctaaataatattaaaaagaagagggattaagtgttataccttgaattggagcacacaaattcagctaggcttcactgaattgagttgagaaaatctcagctcctgctagttcttggtgactcgagagaaagagagagaattgtagagagagagaagtgaactttctaggttattcctcaactttactaaataaatcctaatttattatttattaaatctaactcaaataaatcaggtttatacaacccataaaagacaaaagaatttcaatgcataaagactatttcgcccctaaacataattaaaaggtttaaaggcctccaagggtgatttggtcatttcccaaccctgccaatttcccgtcatttctaatgcctaacaatgatgtcctgctaacaacaaaattctaaaccatataaaaacgtgactctctaatggcctaatgttacgttccactgccaccgagcacaaaatacagaaaacaagaaatacacatatatatatatatcataaataacataatctggattcatataaatcaccacaaaatgcaaaaatcatgattaataacttaatttcataattaaatcctaattatttaataattcatcatattaaaaattaggcggtcttttcaactattctcacatagacaaatgcttgctttactcagattattatacgatttgagatctgtctagatgatagtttctgaagaattagactttagtcaatttagctctgacttgatctggattgtatgatagggagatattctccacctaggtccaaatatatacaatatagtttattatattttcctttaaaaaatattttgttaatagaaaagaaaaagacataaaaagatgttttttctttttttaaaaaaaatcaagttgtttattcctttaatcatagaactaaatgaatgttttaaaatgtatcaaagcattgttattgagtattagtggtgctcaataccttttataggtggcgttctacgattggttagcgatatttcttaaaagttattttctaaaattatatgagacttaatacttaattatactaataatggtatgacatcaaaaaatgtgttaggtaccaataatattttctagcaattctcttttaaattaggaaattaacataaaactcttcaatagaagagttgttatattattattat

SEQ ID NO: 47792 - DNA, 1001 bp, Cannabis sativa
tagaggatcaaattccacaaatttgatatacgtaacttttataacgattaaaaatcatttgatcggcttagctattgtatatcaataaaattttctcaatatattaacataatttatccaatcaatttaatgatcatgactaaaagtacttgttataaagtactagatcaattgttgccaaatatctttacatttttatttcatatgttagaggtgttggacctcttagacttgaagaacaaaggaagaagaaagaacaaaaaaaaggaaagtaaagacaaggaaaaagaaagagagagaaaaaactatatttattaagcatgagttacatgagcttacaagcatatgtaacaaacactgaaccaatataaccaactaatgacagttgggtaactaacatatatatataatagtcaaagtaacaaattgtttctaatacaaacccttaaacttataattggtaggatcaccaattgtgagtttgtatctaaaagaagagaatagttgactagaaatcagtttggttagaccattagcaagttgatcaaaagctggaatatgtttcagttggaccatttgttgaagaattttctctctcacaaaatagagatttagttctatgtgctttgtgtgatcatgtaaatctggattagcagttagaaaacctgtacttaccttgtcacaccacacgacaggagtttaggcagtggaatgtgtaactcaatgaacaagaagtgtaaccaagtgtgctctgtgatagtgtatcaattgttgattgatccaggtctttaaatttttatttaagaaaattgtttaaatatactaataagaaaatgatacgtgtggataatgatttgacatttaacggtcaaatacctatgaagttcaagaaatataacttaaatattattactacaaaaaaataaatttaaatatttatttacaaccgagttaaatttaagtatttatactagaagttattttattttatatattgcaaa

SEQ ID NO: 47793 - DNA, 1452 bp, Cannabis sativa
tactctctttcttcttagaagaagcctttttagcagcctccctctcctcagcggccttcttgtcctcctctgtctcatcaccaaagaggtcgaggtcatcgtcatcctcttcaacaggagcatcctaagaaattgaatagatacaagagagcatgtcaatccaaatatcctattggtcataaagttgtattcttaagaaagaaaaaacgtgcatgataaattgcataatatatctctattcaattgcaaacaattaaagtcacaaaatatgaattaattcagaagaaaagaaactggtagggcatctcaaacatctaagtaaagaatgtgagtagaagaatgattttggttctttttcctttattcaaagaaagataagatggcacagtatcagcagatatatcaatctaattaaaaagaaaacaaacaaaaatttccaaataccattcttatgatcgatcatttgttacctaaacgtagagttaaacaagaatcattgtcccaaccattcaccagtatgacattaaagcgaaattcctaaagagtcgaacaaagaaactaagaaaagaaaaaaaaaaactttactaatctaaaactacaattcagatccggaaccatttccacaggacagggcaaaaatcaaactaatttgatttactaaagacaaattaaaataccactgaatacacaaacaagcaaaacataccttcttaggttcttctacaggagcacctttgccaccgattccaacaccaacagctttgcccggaaagctaacgaatcaaataaaaaaaatctcaaaattgtgaatttagatttttatatatatatatactattatacctcaaaacaataaaattcaacacatactgatactaatatagagaaaatctggtgaaccaacctggaagcaagctgcgaagaaacgctttcgtaccacctgcaagcattaggataagaatccccgggctttgcagccacggctgcgtacaccttaatgtcgtcctttgtcaatgcatctctaagaacacaatttacatcaccaatcaaactcgagcctaaatatgaattgaaattaactaagaaactaaaataaaatgaaattcacgatttgatttaaatacatacccagagatgtaggttttgctggagagatattgatcaagggatttgagtccctcttcggtgtggagatctgtgaaggtgacagccatggcgattgaagatattagtggaggcggagagtgaagttggtttagtttcactaaaaaaagcaccactcgtcaaaggaagttgctcagcacacagagttggagtatttatattctcttcgataatgaaaccctagtctctggtatattcctttctctcgttccaaatcctttcagggatattttcattttcaccccttactttgagtaatattcaacttcggccccaaataatcgaaga

SEQ ID NO: 47794 - DNA, 884 bp, Cannabis sativa
ataaattctaactcgggtcgtactaaaatagatcatagttaagaccatgccgaaataagatctgatcaagtaccaaccgagatatgattacctcagattcaattgaagtttagataagttgcattcagaacagtccgagataaactaagttgagattatgctgagataaacctgtttatataccgattgagactcagttacctcatactcaacaaaagttatattttacccgaactaagctgagatagttatatctcaggacaatccgagataaaccaaaaactgagccaaagtcaaagtcaaagtatgactataactcggtctaataagcaaaataaatcaataatcaaaagtagttagcatctaagatcaatcaatggcataggggccttgataagtcgggggagtacactgttagttcaacatacacatttcagcaagattagaaaaatgagagcattgctgatgttgatacccgattctagcagcgtttttggaagattaaagtgccaccaaaagcacttaatcttgtttggagagccttgacaaattgtttacctacaaaagtgcaactcattactaaacacgtgagtgtgcaaagaacttgtccgaggtgtttaaatgcagtagaaactgcttaccacgcactgatgtcgtgttcactggcgcacacctactggttttctgctggtttggcgaccggagctggtgcagatcagacatttggcagctggtttgttacagcaactgctcgatggcgtgacgatgatatgaggttagccgtgatgctctgctgggctatttggcaggcccgcaatgaccaagtttggaaaggtatttctaggacttctcgttatattttggcattagctggaggtaatctt

SEQ ID NO: 47795 - DNA, 940 bp, Cannabis sativa
aagtagtttgaagtggaggtaaacctaaaacccctattcttagcatattgatgataatagtgttaggtttagagctaaaatttgagaattaggatactatttagttgaatttagtttagggttgtctttaacagatttaaattgatgatatagacttgtttgagatatggttgttgattgattttgggtttaagcaagtttgagttcttggaacataaacttggctcaactatatggtggaatttgtaatttggagctatacttggttttgttgcttggtctattttgatgattctaggtattctggagcatttggtgaagtttggggttgatttgttcaattgggagacttatttcatttatgcaataaaaaccagttggtcgtaaatggcttgcccttttttctagtgctaaacctataaaacggcctaccgttttttgtgcaagtttccagttttaggattttttttttcgtattttctcgatatttaggacttcgttatgccttttattgatagggggacttttaatttctagtttagattccaaaaaaggttttagaaaattatttatcggtttattagattgtgacataggacctccgttcagcgagtgagtttctatttaggtcgatcgacacgcttgaatttagaaacgagataagataagcataaagtatgtatatgtatgtgtgtacagatgttatatgcatgtaattatatattttataagctaccaacactagtataataatagtactgagtgcatatggtacaacctgagagtgcaatccgatactgccaacactagtacagttgggtactgagtgcatgtggtacaatacttaatggcactcggggtacgaattataccctaccaacactagtacaacgatggtacgtagtgcatgtggtacgacggtcataccctagttaagaac

SEQ ID NO: 47796 - DNA, 601 bp, Cannabis sativa
tagaccaaaaaatatcaataaatttagtaacttcataggaaaatgttaaaatacctcattaaattatgacatataaataaaaaatttaaaaagagaattataataatttttttttgaagtctttgtatattaaagataaatatataaaatttaattaatatactacttaataataatattaaattaaaatgagaattttatctaaatgttgaaaaacattccaaaatattattttatgaagaaaaaactctctgaatgcaaaaatagataggaggtctatcgaaacactctttcaggttggtgtactatagacttaaccattatttttctaaaaaagaaaaaaaaaaaattatatgtgaatggtactgttcagattaaagtcttactactatttttttcaacaagtacgcttatagaaaaaaaaaattgcacgtacaataaaattttaaatttgccgtaaacttatatatgtagtcataaataactacaaatgcacaaatattatgaaaaaaataatttgattaaaaatgctaaaacagataaaatttaaggtatagtataaactttaccttatatttaagtatttaacaaacaatatata

SEQ ID NO: 47797 - DNA, 959 bp, Cannabis sativa
aaacatagtatttaattataagttgtcactaatttagttttagtcacaacaagtattgtgactaaaaatacatatattcataacaaaaagttacttatgactaaaatataatatttagatggaagttgttactgaagttttaatcacaataagtattgtgactaaaaacacatgtattcataacaaattgtaatttttataactaatatttttagccacaaattttttaatcacaacatatgaataatgatttataattaagcacaacttttttacttttttctgtaagtaagtaaatttcatttctatcaaacaaacactacaaccatcaccaaataaaggcaaaaccctactatacatgtaactccacaacccaatatctatctctacaatactgattttatcagtcaaaaaatatgtaactctatttattccatctttcttacttcgctaaatcgggcaatgaactctagcaactttatgatcccataaagcctcatttcggaccctccaaacatgataagtagtagctgccacagcaataacaaaaatcttcttgcgaaaaggaaaaagaccatggcccctctcaatcctccgaatgagcgtttgaagattaaaagaatgaaccatctatccgaacaagtttttgatttgtaaccaacaaaccttcccataagaacaatcaaaaaatagatgctcaatatcttcacaaatcaaccaaaacagattatccgctattcgaccaattggaaacatctgagcacaaatttttgcttatgtaagtgagcaagccaaagaataagaagaatgtttcgaaacattaaactttttccaaataatgttggaggaaaaatgagcatttgtatcttcgttctcaatgagcttcttatagacattttcaatactataagtcccatcagtcaactcttgtattgtcaagacggacttaaacttttttt

SEQ ID NO: 47798 - DNA, 1866 bp, Cannabis sativa
  modified_base (894)..(895): a, c, t, g, unknown or other
ggcctacccaaaagatcaattacgtgtgtagccacatatgagtgtgtagctcccgaatcaaataacatagtataaaaggagttgttgacaggaatttaacttgtcaccacagaaggattggctgcagcatcagcttgattgatggcaaacacctgagcaggtacgagttttgtctctgacttctgttcttctttctttgcttgagggaaatctttcttgaaatgccccaccattcctcaccgaaagcatgtcttccaattgcactctccgggaggatggttcttacaatgtgggcactcatggtaagagtaaccctggtgtccatctctgccttggttcccacaaaattgctaactctagcccgagccaccagatgtcagggtaacttttctcttctaatcagtggtggaacaaccactgtccctaccataagaagtattaggaagagtgggggtcctaccaacacttagagtcacacagggctcctggaaaaactttaccgcatcctcggctcgtaaagctttctcaaccatacccgcatacgatgttgcctcattagtagtgatcattaaatcatgtctaattttcatattcaaaccggcgagatatttttccttcttactgaagtttgttggcatgatacacgaggcgagcttggccaaacagtcaaactttgttgtatactcaataactgacataccctctgtctgcactaacgcagtgaattcttttcgcttagcactgcggacagcttcattataatacttggcgttgaataactttgagaactcctcccaagtcattacagtgacgtcccgggtgagggacatcgattcccaccacactagagcgtcttcatggaaatgaaatgtggcgcaggtcacccgatcattnnaaccacccccatgaaattcaaaattttctctatcactgtgagccattgctcaaccttcatgacatcaggacctcccaagaacactagaggtgcttgcttacgaaacctttcgtataatggctccatactattgccggcaacaggttgttctgctggcacagctcgagctataacggcctgagcttgttgtggaggcactgtaggaggaccctgctaccttaatctcagaatttcttcttcttgttggcggatttgatcttgcatctccgcaaacctctgctcctaatttgtaggagcttgtggtggatttacaggatgaccaccttgaattctgccacagcctcagccgcgaccacagggattcgaggtaatttgatttccctgaccgcctacgttctcaaccatattaccttggcttcttatattttgttgggcgtccatttaataggacttagcctgtgaatccataagtcaggcaggttagaaagtgatcataatacttaatattactcttatggattttaacgcaacgcatttaaaataaataaccataatctaatatgcttcctaaaatgctttaatattcaaataaatactaaacaagtacgggattactcaacaatgagtcgagctttcttcgatgaagattgtacatgtcttggcaagcttcagtagacaaacttggcggctctgataccaaaattgtaacgccctaatgctaaggcacgctatagtgatttttcaattacaatgctatctttactaatcaaagaacttactcgagaatcgtgtcaaattaaaacttttatactaaatattaaactttataactttacaaaatcatttacaagtaccgggatcccatttttaaaattttataccaaatacacaaaatacataaccaggtcgcacaacgactacaaaataataaccccagatgacccgagaccgaacactctaggtcacgctgc

SEQ ID NO: 47799 - DNA, 1418 bp, Cannabis sativa
ccggatgggtttccacataacatcggttaatgctattacctatgcatagtgtggatttgttgattgactcgttctatttttactcactcaaagacagaaaaataattgtacattttagtttgtgttttcattctcctacaaagagatactttacccttcacaaaagaacatattcccaattcatgtaagacgatgcgcacattgctacattggccttgtaagatggctcaagcgatttagtacatcatgtgaagaatgaccaatatttgataatcaaacaaaagaaaatgaaacattgacgtcgaaaagatttcctttgtcccaagaagttgttgaaacaggaaaagagcaatttataagaaaaccattagtgaattttgaagaagtggagattcaatactaaaataaggctctgaaaataaaaataataatagaagaacataatttaaagattttacaagtgctttcgaaaaattggtgagaaagaaaaggggaggggcaatagaatcagtcttgccaagttacaaggttttctctattcaacttatatttaacacattgcctcattgcatttagaaagcctaatcttcccttaagggaacgagaaaatagtttcaaactcactctacaacaatgtccacatttaagctatagcattaaaatggtcactgttaactagaacaacatccttatcctttgattagcaaccaaaaaaaaaatgcaaagctgaatagcaatatagttgactattcttgtgtaactacaccaagaacttcatactctactctaatgaggcattcatcattcaccagtaaaccattctctgggtctcggaatttagtctctgatatgaactctcgaaatccccgagcagcagaaccaaacagtttggtatctgcaaaatgacaagtaccgaaaccgaaaaattatagaatctgtgatcacacaacttaaaaaacagagcactacagctaatgctgtaatcaagaaatgctgctgggaagtattgaattaagagttgtaatcttaccacttcgctcaaaatgtttaccattctttttgtcttccagtcgaaatgtgaaatgcacaagtaatttagtgccagcagaaagtgtcgaagtatccacattaagaaatactgatgtgatattgttgatcttattcccttctatttggtaaccacttggatagaatagaagcctcctgatagaaaagcaaaaaaaaaattacatgggtcattcaattacaaaccaaataattaatcacagaccataccatttgtagtctccaccaacaacgaaaggagtttctagaagtttacgtgttcctttagtcacagcagagaaactccaactggccttgtgagtcacaggattgtctattaatgttaaacactcagctttcgatctagtttttac

SEQ ID NO: 47800 - DNA, 769 bp, Cannabis sativa
attttatttacaagaatcacaaggcttaataatgtattgattggttaatattgaatagagatattgtaatgctcttgctttacttatatagtctcatacctacatagtacacatgagtacatcactttggctacttcctaaaatgacgactggtcttgcaaaccaacacgagtctttccagcatgctttgtcctcactagcacgctctctagaaaaacttttcagaaggtcactcaacctaagattgctccaggtcaagagcacttaatttggagttcataagtgatgggttgctgaaaaaaatatgcatcttatagatataggtaatacttatctattcatttaagccatattcaattgtgtagtttaatacttacatagtctcaaatccatcatatattaacccactccagacaatgtggaattgcacaagtctttcccactacagatcaagatcatagtcacaatctcaagcatgaacataatagggtttatcctcatttcaatcacataatatataaacaaataattgttggaactggttaaatatttaaggttaaaacattaagattagtaaagactaattaatgagaaatgtatagcctagtaatacaagttaaaaagataattacattaagagaattaagagaatgtgtactattaaactgatagatagaacttgttcttaggtccaaaaatatagttttgagtacactaagttatcctagaagtatgggtcaacagaagtgtcaaatgcatgtttcagaga

SEQ ID NO: 47801 - DNA, 780 bp, Cannabis sativa
attagtggacatatttatgaatttatcaagaaatactgatcgagaggttgatatatgtattatctgggttctttccttaattgttctctattgttgttgttgttcttgtttagtaattaatggcttaattaataattgttgttgttgtatgcatgcttttctttcggtaattttatttgtttcagtaacttcagccttggagcttttttatatataataaatgcgaaatgttgttctacactcattttcattggatttaattattggtttggcacccacaattcgagcttatctttacttaatataagatatggcttgagactgagataaaacgtaataaattactgaattgaaaatggtaagaggtgagtgaactttctcccactactacaatttggactcttcgtttggtatgctgtaccgtattgtaatgtattgtatcatattgaattttattttatacaatattttaatataaaactatattaacttttatgagcacttataaaaacatataatattttaatataaattaaattaaagtttcatatagtattatatacaaatatgatatataatctaattcaatataattcaatacaatacaataccacctaatacgacgttccaaacgagcccttagtgacattatttagtgactcacacttttgtgcatgtcactaaagaactaggattgatttttagtgatacgcacaattagactctaaacttttcagtattagtcttttataatgtgtgtcactaaaaatatgaggtgtc

SEQ ID NO: 47802 - DNA, 1885 bp, Cannabis sativa
tatatacatcattttcacttagatgtcattctacatcaataattcgaactgagattacttgcatcggtcaaccctacttgctgactgttttattcataactaagtgatcttaattctctatagaggtacaagtcacaacctcatatatgaatacagattttttcaatatttatatataaattattcaatattaaacattaataatttaacattcatgcatatattaaaatgttcagctcttatttaataattataaatatctttacagacttttcatagcataaaccttaatacgattttgctcattccatcaaattaagccatttaatatttgcccaaactatcacgcaaaagaaaaccaaaatcaagagtaaaggtaagagataagcaaatgtcgagcaaccctcttaatcaattccaccataccattaattaaaacctcttaaaacttagtatataatacacatttcgaaccctaagggtttattgagccaataaagtatagttaattgcaaactataatttaatgagctaattatagtcaaaagtgttctcatattcttctaacataattagtagttattaaccatcacattatagttattaatatttttaggcgcataattaatgattgtggttataaaattatatctataatcatattagtctacaataataattttaacaaaaatttcccacaaaacattaatagaatagcaagaataatacaatcaaaatagtcaatttaccagacataagaaaacttcacaaatatgtcaatttatagaattattaaaattgattgaaggccttcattcaaaaaaaaaaaaaaattgattgaaggcccttaagttacattcatcaattttaataactccataagaattgtagttgcacttgcattgtaattacaaaatattaacacttttaagattcgtttagtacagtgattattatattgcattgtataatattttattatattgtattgtattcgtattattttatatagaactatgtttgatattgacttgtactaataggttgtgtaaaattatgaatcttctataataaactcgactccaaccccgaccacgacctggacttagacccccacctgaactcagaccaagacttcgataccgaaacatgtcccaaacttggactcggacccaaaccccgacctagacttggactccagattcggatcccgacccgaacctagaccccgaactccaacccaaacccgaccctagacacaaatgcggacccagacctagaccccgacttgaaccccaactcgaactccagacccaaacccagacctggaccaagacccaagacccaagtgtcgaacttggagccagatctatgtccgagttcgaagcgagggtccaaagtcggggccaagtccgagtctagggtccgggtcacagttcgaatctaagtttagggtccagatccggggtcttgggtccgaatccagagtcagggccagtctgggtcaggggtcgcaattcgtgtctggggtctaggtctagggtacagatctcggacgggtctagagaccagatccgagtcaggtccggatacaagtacgagtccgggtaagggttcgcattttggtctcagagtcttaggtcagggggctagtgtctgggtgcaagaccgggtcggggtgcaattcggtgttcaaggccagggctagggtctgggtccatggtcctagtccatagttagggtatgggtacaagtttgaagtcagattgaggtcaagaccaaagttaaccccaaaccctttgtaaacattataatataagttaatacagataatttgttaagtattaagatttatgatcgtaataattaatacaatataatattt

SEQ ID NO: 47803 - DNA, 661 bp, Cannabis sativa
tctctttctttaaataatcaatttttttattatttttttcccaatatctaattaatgaaaaggttaaataatagttagatgatgtcatgatgagaacaatataataaaattggttaatgacataatataaatgtataaaataaatactataaaattttgataagatattttaaataatatagtaaaaaatctagtgtgaatactctaagatttacttgatagcgtgagtaaaattatagtaggacatatctgatatatattattattggtataatttagtgacacgttatatattttaaagtaatttgtggtcaaattttttaaattttgaaatttggtacgattaactccctaaactaaaaatttaggactaaaatctccaatctttacaatcatttgctatgtactcctttctcccttcttgacactatcagcctaaatcgttcacgagtcttccctatcaaccttgtcgatctggtcgacccccaatggttaagacccaattgagggaacaggatttaagcaatacattgtactcgcccaaattgaaaatcgggaaaactttgaattcaggtttgggggtgacaaaataggtgtgctgggaagcgagagaagggtttgattttagtttgatttagtttaattgtattttaattttttt

SEQ ID NO: 47804 - DNA, 1656 bp, Cannabis sativa
gataattaagttattgaataattttaattttaattctaaataatagcatggaattcaattttttattacttttttattttttatgtttttcaaaattttttaatcttttgtttttatcaaaattgctgtttttttttaatagaaaatgtcaaaattgttaaacacggactaatccacaacacaactgtttcccgcgtgagtcctccttcgtttgactaatttttggcgcgtgattactgtcatgatgatgtcattcttacgtctcatgcagtccaatttacaaatagaaatttgttagctattttttttttctagtgttctcctcttttatttgttccgatatggtgtctatttaaattgttggctcattattttaacaaaaaaaaaattgtttatcatcctctttgtaagaatttaagactaattaatttttgttttgctgatgttcttattattttctacaaaaggaatgaggattatgtgaaaatgtgtttgaagcttttcaaaagttctgtaataaaaaaaaaatcttatatttattttggtggaatccatgaagagtgcaagagaaagatcatagatattgtccaaatgaaagagggatcactccctcactagtagaaaattgggctttctgaaaggtttgtaagggattttaacgtcagcactactagaaatatagtctatatacttgatttttaacgatacaaaatataaaaatcgaagaaaagtaggacgggaaagaacgagaaaatttgcagacctagatcttcgattatttgaaaaataaacgaagacatgatagctcatagagacctttatctttagttattttaaaataaccgaagacataggttattttaaaataactgaagacataggtctccacaaccctagccccatatcaattacacgtggaggcatatgtcttcagttattaagaaataaccgaagatataggtctataaaccctaatttcaaatttgaaactctcattttctgtttcttctctatttttcctctcaacaaaaaatgtcgtcaccatctctcttaaagccccattttctccatacaccattattttttctcatttttcttttaaatcctctagttttcttaacaaaaacacaaatacactatacaaaattaatttatttaggatatgaggttaaatctaagagttaaggttgacggttttttaagatttctgaagaacgacggttggctaatggtagagattttaaggctttcgatgttgtcttctaacttgcattgagatatacattgctataatgtatgccttttagcctatattgtatttttttagtgtgtatgatttaggatttggatatcgcgatggcggttagaaaatctacggttgttgttggaaagtcaatggcagtgcttggaaatataatagtgttaacggtggtggttgaaaataatattgtttaaggatttttattttagggtttcgtgggtttggggctcgacggcggcggtggtgtgtacagtggcttcgatttaggtaaaaaaatcatttttttttataaaagaaagtacctatctctttagttattatgaaataactgaagacatatgtaacgttcccgcttcaagcttctattgggcccttacacccacagaatgatgact

SEQ ID NO: 47805 - DNA, 2484 bp, Cannabis sativa
tggaggatccagccagccctttctttcttcaccatggtgacaacccagggaatgctttggagtctcaaccacttactggacaagacagctatgtctcacggagcagggcaatgcagctcgcaatttcagtcaaaaacaaaatcggattcctcgacggttctattcctaaaccttctatttctgatcaaaatctttacaatgcttggtatcgtaataataacattgtgatttcttggatcttgaattcggtttccaaagaaatctcatcaagtatcctttatgatgaatgtgcatcgggtatttggaatgatctaaagacccgttttcatcagaaaaatggtcctcatatatacaatttgagaaaagatctcatgaatcttaagcaagaaaatcagaccattagcatatactttactaggcttaaaactatatgggaagaactaattaattacaggtcatcatgcacttgtaatggatgcacttgtggaggagtcaagagacttcaagaccactaccacatggagtacatcatgtcattcttgacgggactctccgattctttctctcaagttagaggtagcatccttctcatggaccctttgcccaaataaatcgtgtatttcatctcgttactcaagaagaacatcaaaggggaactacctcaaatagcaacaacaataattctgtcatggcatttgctttccaaggggacaaaagagggaaccaaaaagatgataatcaatccggaaaatcccatcctcctaaaagaaatcgtccatattgtactcactgcaatatacatggtcataccattgaaaaatgttataaaatccatggatatccctcgggttttaacaagcaaaacagatctaaggaggctgctgcaaaccaggtgcaaaatggggaagaaaacaactctgctgcaactaaaaatcatgctattctccctcagcttccctcggctcagttttagcagctactcaacttacttgcctctcaaactaacggtatgaatggtagtaatcctagtacttcagcaggtaatacaggtatcattctatcacaccattcaatttctccttttctgaattcctggatagtggacacgggagcaattagacacatatgttcttatattaaaatgtttcaatgtatatgtaagacaacaccaactaaattaattcttccaaacaatgatagtcttactgtgaatcaaagtggatatgttgttctaggaaacaacattgtcttgactaatgttttatatgccccacttttcaaatacaatatcatctctgtaagttacctcactaaaaattctcctatttccttttacttcactgctgatgagtttataatgcaggacaaaaccagcaagaagacgattggaagaggtagtaatgtcaaagatttatacattcttgatactacgccaagtccatctcaagtcttctctgtctcagctgaagtttggcattcacggcttggacatttatccaataaatgcctgaatttgcttaagaatactctcaattgtaacacatctgatttacataaaacttccccttgctatatttgccctattgctaaacaaagaaaactccattttccaaatagcaatacaatttctaataaagtttttgatattgttcattgtgatgtttgggagccatatcatgttgtatcacactcaaatcacagatatttttttactttagttgatgacttttctagattcacttggatatttttgatgcaacacaaatcggatgttagcttcattttacctcaatttctgacttatgttcaaacccaattcaagcaggtttttaaagtttttcgttcggataatgcaccagagctggtgtttaaggatctgttttctaaacacggcattttacatgagttttcatgtgttgaaacgcctgagcaaaatgccgttcctgaacgaaaacatcagcaccttctaaatgtagctcgatctctttattttcggtctcgtattcccattaaattctggaatgagtgtgtgttaacagcagcctatctaataaatcgaatccctactcctttgctgaataacaaaactccatatgaattactttttgataagttacctaattaccaacatctaagatcattcggatgtctggtttttgcctcaactttatcaaatctgaaaaataaattctccccaagagcccgtacttgtgtctttatggggtaccctcaaggtgtaaaaggttacaaactctatgatatcaataataaacaaatgtttgtatctcgaaatgttgtgtttcatgaaaacatttatccatttcaaaagctcaataatgagaatgctaacatagatcctttttctctaactatacttcctcattctgtgacaaatgacttacctggctgtgagtatcctacaggtactagcaatgacttcaatgatgcccatcacatagacgatctcagtcttaactcagatca

SEQ ID NO: 47806 - DNA, 2215 bp, Cannabis sativa
  modified_base (2110)..(2110): a, c, t, g, unknown or other
tttatgaagtccttaaagtagtctcgcagggggattatagctccagccctgatgtgctcaaggctccaagcgcctatactagtcaagccacttgtacttccctcagagttttcacgagtaagtcggactggtggttagcaactgaactccccgactcgcaccgacctaaaccagcagtctcgcttgtattcaataccataagtctgcagtgaatcacctgcataacctgcaatggttcgcaccttcaactatattaactctgcctcgaaagtgatgttggggtcctggggagtctttgatttacgtggcttaggagacattatttcaaaatccaattcaccaggttcaaaagcaattgtgaccttgggtaaaaactgaggctcaactaaaggaatagaggacacagtaggaggttcaggccaagcagcatctcgcaagaaacgacattagccttctgtaatctcttgcaagaagtgcctgtggcgactggcaatataatcttggtgggttctcactaagtattccctaatttttgcatcatttatctctaatttggattttggttttgaagttttgggttcgtacaggatggcaagttcaatgggatactctatttctaaatcttttggacgataaacttctaaaccagattgggacattgctgcaagaagaaagcaatcccaattcatggaaggaatttattaaaccagaagttggtaaattagagaacctcgaaaacccatgttctgtctaaatcctaacgattacccagacacaattcagccctaaaaattgctaaaaccaaatgagatgacagcgatgttgaccaataaattggtaattaaatccagaaatacaacataacaaacttgtaagaaaataaggagaaaaatcacttactgtttgaggttggtttttgggataatgaacagctctacaacctgtgaatcaacgaacggtgtgaagattcctccgaatgcttgaagtcaaaaatcaaattggatgaaactcgtaggaaaaatgctaatgacagagatggcatgcaaattttcgagcaaatctggtaatggttttttgatgggaaagcttaaaaagttctcagagtttctaaaacagcaaaggtaatgcaaagatggtcccatttttctattttatactcttgggttaatcttcgttagatcagtgagataattgatcctacgggtagaatttgaaaaagaactggaaaagatggtcattaattgctgatgtaccttaaaaccacaaaaccaccgaaatcagaggacatgcattttttcaaaagggattatgacaaatataccctctataatcatttaaaaagtactttttatcaaaaagaactttttaaggggcaattattatacccaaaattcgactggcacttcagagaaggacatgtacggatcaacaaatataatgataattatattagaagatattaaaaaggaataaattattaaatgtagagctgataaagtatatttataacttgttgactgtaaagtcttaagcgagataaggatatacaaactattgtctcgcgctttgacgagaaaccattctacgtcagaagttcaaagcaaggcaccaacctcgctacgtatgaagatatgtaaataggacatgttgactgttagaacacttagcgtataatatacattatacaacctaagcataacagttgaatgaacttgaacaacgaataacgaggcctctatctcgctataggaaggcattctcatggtactttcagtaatcagctccaaacatctttcaaggagattcactactctgtcaagtaagctctcttagatagaagctgacattcaaatgaaattggctactaaagttcatcttgtcactaagaactgcgactgttagatggagcattatgtcttcaagcgcagaaacaacgtgatttacattatcaacctcggaaagacatgggaaaagcctcagcttgcagccaaggttattgttgctatgttcccaacaaggtgttccagaacgatacgctttacaacgtatttaatacacgtatgcattgacccggtaaaagcgacaccaatcacagctgtgtgattttcanataataaccgcatttattttacttagggcataataaaatctcataatttcaggggattattgttgtaagatatcaatccggtttgtaattaactgccctcttatg

SEQ ID NO: 47807 - DNA, 1822 bp, Cannabis sativa
agaaatcgaatatgaatgcacaacaatcttaccataaatggaaaaattattttgtcaactaacttgcaaaaaaaggactttacatataattttgaaaattctgtaggtacaaactgttaagtgtaaagtaaactgtcacgtgacaattcttgattggtccaaaatttttatttttttttaaaaaaataatttcaatatactaataagaaaatgacacgtggataatgacttgacattcaaagttcaggtacctacagaattctaaaaatatatataaaaaacttaaatatttatttacaattaagagttaaacttaagtatttataccgcaaattactctaacttaaaattttgaataaaggaaaatgtgattttctatgtatatgtctgattggtatagccttttatttattttatttttgttaaataatatttatattaaatactcataaaggtacattgtttcttttcgagctccaatcctcttgtgtatcgttttagcattgctcatcgaattaaggagataagacaacagttagatgatattgctaagaatatggaaaagtttgatttgatcaaaactcagctgaaaatgggtcaaggccttccaatgaatggcaatagggagatgaatactcactcctttgttaaccctgcagacattattggtagagatcgtgaaaaacaggagatcctaaatatggtactaaaggaccaagctcaagatcatgacaatcaaatcccgattatagctgtaattgggattggaggtttagggaagacaacactcatcaaatcaatatacaataacgatgcaatcaaagaaaagtttgatttgaggatttgggtttgtgtgtctttggatttcaatgtgtctaaaatagtaaaagatattcttacagatgcaactggtaatagcaatgccacaagcaacttgtccaatttaaaccagttgcaaaaagttttgacagacaccttgaaagataagaagtttctacttgtattggatgatgtatggaatgaggatttttttaagtggcaggatttagcagaattgttatcagtgggttcgaaaaagagtaaaattatagtgacaacacgaagtagtaaagttgcttcaatcatgggtggaacaaggccttatgaattggagggtcttcctcagaaggattctttgtctctttttttcaagtatgcacttggaggtgaagaagaagcatcaaaatatcatgaactcaaaagaattggtggagaaattgtggaaaagtgtagtggggttcctttggcattgaagactttgggcagtctcctttggttgaagactgaagctcatgagtggaaaacggtaagagatagtaaaatttgggagttagaacgagaagaaggtcatattttacctgcattacgattaagttacaatgcaatgtctccatctttgagacagtgttttgcttattgctcaactttcgaagaggatagtttgatgtggaactttgagttgattagtatttggatggcacttggaatccttccttcgcctaaaaataaaaagcacctcgaagatattggtgactcatgctttgtagagttgtgcaacagatctttctttcaacttgatcctcatgaagattattttgtaatgtggcaagagtttagagtgcatgatttaattcacaaccttgcatgctcaataacccaaaatgagagctcaattgtcaattccaatgacgatagagagatttctgatacggttagatatttaagagttgttatcaatgagaataacttaaaaaagttaagtaagctaaagaaactaaagagt

SEQ ID NO: 47808 - DNA, 780 bp, Cannabis sativa
catgatcctatcacatgataaaccaaagtcaagtctatatatcatcttaattaatttattatgcaaataatccttaattaaagactcactactcgactacattataagttaaaagcataataattttgacgtgtggaaaatattcctatcccatcccccactcccttacataatttgtatattgatcgatatactgtatatggtccctacaaatgatacaaaataagatttaaaaagaaaaatgaaataagattttaaatatgaagaatatatatgtcactgaaaatattttaatttataataaatttgaattctaatttcgacatttttaaataactataaatttattgattaatattttaaataaatataattaaaaaaatgtatcatcaaaaaaaaaaaaaaactaaaataaaataaacatatgttgcattaaaaattaattttaagagacaaaatggaagaagctattttcactaaatataaatatttttttgtggttataagtatagtttagtggttatgcatctcttcttataaagaggaggtttcaagtttgaattctctttcctaatatcaaaattaaaaaaaaatagtaaagtcgatacaatttcaagttttactaatagggtttgataaatgctatatttaatgtgattttaaaaaaaaaataatttaaaataaatcgatacaattaagatatacttagagtgaataatagaaaaattagagtttcttgttcttaaatttatagctattagaggtttttttttttttttt

SEQ ID NO: 47809 - DNA, 4382 bp, Cannabis sativa
tcgacctcgttcttcacaatctccatactacaataaagattcgtgcgcttgcgagttgataaatgtaaaacgtaccattttggtaaacaacaccagagtattagtcaatccaaacgacatcactagaaactcattatgttcgtacctcgtacaaaatgcagtcttagaaatgtattcctctcgaattctcaactaatgataacttgagcgaagatcgatctttgagaggactgcttccctttaagctgatcaaacaaatcatcaattctttgcaatggatacttgttcttcaacgtaagcgtgttcaacttctggtaattgatacacatccgaagggatccatacttcttcttgacaaacaataccgaagcttcccagggtgataccttgggtcgggtaaactcaatgtctggcatcccctgaagttgaactttcaattccttaagttcagatggagccatcttgtatggtactttagaaaagggctctgctctcgatattagatcaataataaaatctatttcccattacggtggtaaaccaagtaattcctcaagaaacacatctagaaactctttgaccgctctcacattttcaagcctaactactttgagtctactagtatcgatcactaccgctaaataacctatacacccatcatataataactctctagctcccaacaccaatatgatgggaattcaggaaccttgaactgctcccatatatacaaatggttccttacttatcggttgaaaagtcaccatctttctcatgtagtcaatactagttgcattattggataagaagtccatccccaaaataatatcaaagtttgctagaaataactcgataagattagtacttaactccctaccatccactgtgattggtatagccctaatccaccgcctagagataactatctccccactaggtaaagggtgccaaatcctaaatcataattataacaggggctatccagtttatcaattactcttgacaccacgtaagagtgtgtagcctccgagtcaaataatacagtataataggagttttttttataaaaagctaacctgtaataactaatggaattgcctcaacatctacatgtgtgatggtaaatacctgagtaggagtggatatgaactcctcctttggctcttccctccttaactgagagcagtcactcttaaagtatctcatctgaccacactagaagcaagaattcttgttacattctcctatgtgatgtttcttacaacgaggacatttcgagtacataaattcaccctgacgaccaccactctgaccttggttcccgcggaacctcttcttttgtctagaactgctcggtgtgaaaggagtcttcctctttaaatcgaaaactaaatctctacaacttctacccaaaccaaaaggaggaggagcaacgactccactagaaccctaagtccctcaaggctcatgcaaaaattgtattgcactttctgctcggagagccttctatactattagtgcatacatggtagcatcattagtcataattttcataccatgattgatcttggcattaggacgacctaatttgatttctgttgagaatttagttgaagtttcttgatgaaaaatgttcattatgatgttttaggtaccctaaaaaatttggtaagtttttgcttagaattgaatgagttatgcaagttttaaaattgggcagtggagtttcggaccgtataatttaggtagaatttgggggtctatttttaaaacaaactgtctgttttgagacttttttgaagactccaatcgagttttttctcgatacttagggtatttccatgctacgtatagcaggaaaacttttagttttgaatttaagtcctcgaaagtgttagggtaacacttttttatttttatagaattgtgacttggggcctccgattaccagtaactatttccactcaggttgaccgacactcttgaaattaaaattgaggtcagactagtataacacacatacatatgtacatgtttattttgccatatgtatgacatataaattagaatgatagttggtatatatatgatggcatcttgataccgtaaatatatgtgtttcgaaatttggaaagtatggaccaatgctaccaacactagtatgccaaattactaagtgcatgtggtattatggttggttatacttttgaatgtatgaactagtgctaccaacactagtatgccagagtactgagtacatgtggtattatggctagttatacttataatatgaattgatgatcaattttactacggtcaagaacgtttgagacacacttatacgtgtttaaaatggcttatgacttattgataggtgtatgggcccttagccgcaggtcaattatatattatgttttattctttttttttttctgatcgactcacaaatgttatgttttgtgtaggtaaaggcaaatctgttgttgaacaaaagtgagtttggagctagataatgagtctacatatcgagacagttgaacctggagtgttggatctttgggacagctaagactcataattttgtagtcactatgcgacatcttttgattatgtacagttgaaaaaatatagatacgatatcccaaaatttataaatgtagagcaatttattttttaaattaaatcacgtttttattaaaatctttgattagcaaaggtttcacagtgactgagaaaagtactgtagcatgcctaagttagtaggctgttacaattttggtatcaaagttgctaggttatctactaaacaccgtcaagatatgtacaatcatgatcagagataagcttgactcattgttcagtaagcttttacacgttttagtagcttattataattagaaaagtatgatagaaacatgttagtgatatattcattaactatgtgtgtgtctaagatcctatgtatgtggtccaaaggttattatgttgatcattgcttgattaaattgtcttatgggttttcatgctagtaccatatggatacccaacataatgtacgaagtcggggtaatgtggtcagaattggtggcggtcaaggccaccaggatccccctcatctccaaggccaaggtagagccagtggatgggctcgtggtgtggatcatgttaatcccccacaagctccacaagagtgggagcaaaggcttggtgagttgcaggcaagaatacaacaacaagataaggtgattgttaggctaaggcaacaaggccctcatgtttctcctcttcctcaaattggtattactccagtatcaatgttgcgagcaaaatatcttgtagcttgtaacaggtttgtaccactgtaagagcagttttggaaatagagacctctggtctttctgggagaccctgatgtatgaaagtaaagtaatggttaaccattatgaaccaaatactgaattttatcagagtaagcggtgatgacagagtggcctgtgccatattttagttccaggaagatgacctagtatgctgggagttaatgtcgctcacatggaatgtcacttgtatgacctgggatgaattctaggatctatttaactccaagtattataataagattgtctttagtgcaaaatggaaggagtttgcaaaattggttcaagaagaatcaatgtcagtgatggagtatacgaccaggtttgagcgactggccaaattagcctcaggtatagtacctacagattacactaagaaggaaaagtacttgagtggctaggggcctgtaaaccatcgagcaacaattttcactcaagttgactgacacgcctaaatttagaattaaggtaagattagtataataatatcatgtgtgattacatgtttagtgtgcatatttatgaatgcctgttagttaatatatcagtaatggcggtgataatgtacatagagttacactggatatcaaaggatatatgtttggcataagtactgattgatgctgtcacattggtacgcttagagtaccgactataggctaatattatggtaaatagtactatcctacgaacgttcaagactcagtatgcgtgggatgcatgataggattataattgggtgtatggatgcctactaatgatctagtttgtgttatgttatgattatgcatttcttactgagtctgttgactcacaattattgtgtacatgtgtagggaacgacaaagctaaggctcagtagcagtgagtgtgacagatgaagattgtacatattggggcggtagacatgaagtgtttgatctttggggtagcaggctttatttggtagtcgttaggtgacaatttttgtagttatatatattgtaaaatagttgtaacttttaa

SEQ ID NO: 47810 - DNA, 825 bp, Cannabis sativa
ttaaattaataaaatgactttgaatatggtgtaatattttttgtggataaaaaacttaaataccatcaatcaaatgtataaaatgttacattattaagactttgaattgagaattagctgtttatttaagaaaactatatgttcctttctcaaaatctagagatttatttgaattttgtacattacaaaaaaaaaaaaaactatatgttaataattaaactcctaaatgacttttcattaacttttttttatatggatgaaaaatagtgtaacaataaaaggtggcttaaaaagtataacaatattattgattggtgagataaaaaaaatattatttaataaaaatggcaacttgattggtgaaataaatcatccattacaaatttacaatagacttgaaattgatcagagagaataatgttgatttatttaaaattacaacctggattaaaataaaaggttctagctatacaacatgctcattattttatcatttaatacaacatttaatattttatcattttttttttaaaaaaaaagaatactaggttatgctaaacctttttttttccttaggttgatcagattataatttttttttaaaaaataatttaaattaatataataattatttttaaagtttacttgctcaataagcaaaacaccaaaaataaaaccctctaaaaatgtctccagtccttcaacaactccagtcaaatagactatagattaaaatttatttaaactacttttaaaatattgaaattatgttatcatcaccttcacctcccttgaatattattattttttattaataaaagtact

SEQ ID NO: 47811 - DNA, 1240 bp, Cannabis sativa
catgaattcagataatttgtacattggaaagaaagaaaatattaatacctgtctaaagtgccatgagcccttgaccaccagagtcaatacagcaagtatgataaagttagtacttcctatgaagaaaaaagataataacccaaaattatattcataaactgaaagaagaaaaacacacaaaaaaaaaatccatattcatagcttaaaaattcattcttaaagtgaagttttttttgaacatgttttgtatctaattcacttctcttcagtaaattagtataacaaactctccaatcccatcaaattctcaaattcccagtaaccaatcaacctaaataaaatttatataaaaaatcagaaaaaattcatattcatatcttaaaaattcattctttcagtgaagtttttttgaacaagttcagtacccagatcacttttcttcactaaattattataaaaaagtctccaatgggcatattctcaattaaatctcaaatcccatcaaccaatcaacaaaaaaattttaaaatatataaaagaagaaaaaattcatattcatatcttaaaaattcaatctttaggttttttgaacatgttctgcattttcttcagtaaattattttgacaaactcaccaatcccatcaaattctcaattagttctcaaaatcccagcaaccaatcaaccaaaataaaatttaaaaaaaatcagaaaaaaattgataggaagaattaccagcaaagtcagtgactttatcaattttgagaagagcagtgactatgaagaagagcaactgatatcccaccttttgaaaacacaaaaccccaaaaaaacaaaattaataatgaataaataatcaaaagaaaagaatttaaagaaaaaaaagaaagaagaagaagaagagttaactgtaacaatggcagtaaggcctaagaaatgggagtcaattacagtgcccattatgaaagaaagaaacttttaggatttttggtatagaatggaatagaatagtattaattaactgaatttttttgtgtgtgattgggttttgaaacttctttggctatatatatgggaaatagagaattgtgtggttgatatttgaacaccattatatatatatatatgctttgcttcttctttcatcaaattttgtattgttgaagagaaccacttgcttattattttgttcaaactttgcaaatattatttagtcaaaagaaaagaaaaaaaagaaaaga

SEQ ID NO: 47812 - DNA, 1095 bp, Cannabis sativa
atagaatcaagtgagcttcttttgttattttctttgtgtttcttttcttcccctgctttctttctctacaccatgctctttatttttggtagtttctattgtgctacgtttaatattagattgttgctcgttgtgatagtttgtattgtaggaatttacgcctagtagtctgtctagttctagttggtcaggtttggggataagcaaacacttggtcaacttcttggccgaccgttgaaattagttaggctagtttaaactttttgtaattggctctatgtttctataaatagagatcaattgttagaatcaaattagccttgtaattaaagattcatagactaataaaaggagcatagactctttcagattcaactcttatctaagtgttcttgattatatctgtggtgacttgtgtacttgaatcgatccaacagcggtatcagagcttgggagtttgaagaatcaagtgaacagattgaggagaatcaagagttcgaagtttgatcttgaaaagttcatggggagaataatttcagtttataaagagtgaagatgagggcattgttagttcaagaaggaatacaagctggacttttgggggagaagaaattgttagagggattgatagagaaggagaaaggtgagataatgaacaaggctcataatgccatcactttgagcattggagacaaagtacttaaggaagtctcaaaggagcaatttgctgcaagtctttgtctgaaattggagagcttgtacatgaccaagtctttggcaagttgattattcttaaaacaaaagttgtactctttcaagatgtcaataggtaagtattgaagatcatttagatgattttaataagaaaattcttgatttttggcttagtataaaatgatgggattaattgcatctctatttataggactctatatatggactaatttagaaatattattaaatgagtagcttctaccttgttctacataattctctctactaatacaagtaaaagataattttaaaaaattcaagagtactcaaacaaacaaaaaaactctagacactttagtaaatataagaatagtctagaaa

SEQ ID NO: 47813 - DNA, 841 bp, Cannabis sativa
taaattctcacataataaatctgagaacaatataatagatgagagagagaagtacagtaaaaaccctagaaaggaagacagactagagagagcgcgccccatgcatcaaaagaagtgtttatggggaatttttaaaagaattgcattaacattaactggggggggagaaaggggttagtatagggtgacgaaaagggtgtggtatctctgttgagtctccctagtcccttcacttcacaccgctttttcgctaacaaaaatgtaaacaacaacaacaacagcagcagattagacagtacatcaaaaagctctctgttctctttcatcatcccttactaactttgttccctttaccctcagcaatatcaacgtctaatcattcaaacccctctttatcttttctcttttatataattacttctttttctcttggaacaaacatgatccactacaaaaacaatacactaaattctcaaaatctaaaactgtcaaaattaaatgaacgtgatcatcatcatctttatcatgtaatataaattaaccatataaagcaaaattgattctgaatattttcatgcatattgggtgatgtggggttagtagttcaatcacgatcacttgagcccgccattaaatatatatttttcaatacaaattaaagaaacaaaaacaaaaaaataataaggaattaaactaatttggacgagtactagtgttgaggcgaaaagaagaaacaccagcagcgtggaccccaatctggtcaacgagcttggcaagcctcgcgtgcttactgcaccaagcttcgaccagtttcgcctctttgctctccgcttctctctgc

SEQ ID NO: 47814 - DNA, 2244 bp, Cannabis sativa
  modified_base (26)..(27): a, c, t, g, unknown or other
  modified_base (247)..(248): a, c, t, g, unknown or other
  modified_base (1077)..(1085): a, c, t, g, unknown or other
  modified_base (2199)..(2219): a, c, t, g, unknown or other
attaccaaaataccacttacactatnnacttacacaatcaaacgatagttgcagggtggttgttgcgtggttgcgcggtagttgtatcagacaaaagtttcaatcaaacgatggttacagagtggttgcgcgatggttgcattagacgaaggtttcaatcaaacgaaagtttctgggtggttgctaggtggttagccgaaggatgcatcagacaaagattttaatcagacgaaataactgttagcannatatttatgcaactgtaatgcaacagtaatgcaactattgtgaaacattaaaaattagaagaatattttcacgtacgtaactctatctacatgtctctttatgatttaatatgaacttattcaccattagaaatttggaaaacaaagaataaatacaccaagataaacattttactatagtattgatgtaattttttttggattatacttgagttggattgtttgggaactccagttcaattttttgagatctgcctttcatggatctgaaaattgaagtcaggacattagttttatgcaaattaagttagatttctgattgaattttagcttcgtagttgtttttctacaccttttttttttcatgaatacagcccctgttttaattgattctggtcgtcttctcaggtgcagtcgccgaaattaatgggggttttctttctggttaaattttcgtttcggttgcgttgggttgttgcgtggttgcacgatggttgcgcgatagttggatcctgggttgcgcaggtgtgtatgagtggtatttgtgtattttttttttatttgggctgtagatttgtttatttggccagtttgaagtatttttgtaatattattactttttttggttaaaactgaaaaaagccctaaaaaatattccttattattatattatttttttaataaaatttttaaaaaattaatatcatagtaattaactaaaatcatgacaatgcaactttctaaataaaagagtcgtgagtgcaacagacagtttaaactttattttcaacatattaaaattttttaattttttaaaattttacaagannnnnnnnntaactataatgtacacgaccatgaaaaaaaatagactaaaaatctcttgaattctaaaacaagtaggagtacattagagcacgacttttaaaaagttacattattttcgacgtgttaaatttttttgaatttctcaaaattttagaggatgttaaataattataatatgcatgactacagaaaaacatttaggctaaaaaaaatttttgggtgccgaaatagataggagtgcgttagtatgttacttttaaaaatctacattgtagaatttttttaaaattaaatacttaattaatttcataaatacatctaataatataaattttaattaatatgtataattaaaaaaaaatatgcagcgtctacaatgctctgaagcattaacttcaaaatagggtcttcaataatgcttcattggaacaaaattaagcgacatacatttaaaatattgccgctccttagagaagtatttactcatgaatatgtattattaagaaaatttatgttttatgtttaatttttcttataaaattagaaaaataatctcttatttttagatacatgtttcatagggttgaaaaaaaaaattaaaagaaaaagttgtttgataaaaaaaatttgagtttaacttaaatattttttttatataaatatatatttttgatgtagtataaaaagagatatttttttatatatttttttaattaagtaactaaattaaacataaaaattcaaaaaaaaatcattaaaatttaatgatttaatatttctaaaattaatatttataattatatagaatgtggttgtataacaagatgtatttttttaagaaaaaacattgcaattcaaatttaaattcactatacacaaatctctctttatcttttattttcacatattaaatgtggctatatataacataaagtattttttctattttaacattgcaatttaaatttaaattatttgtaaatctaattatattaaactagattttatttagagcagacaatccaacaggaacttatgctaagtcctaccagaatcttatcctatatatatatattatctaattaagatgctattgtagggcttattgttgggttttatgccnnnnnnnnnnnnnnnnnnnnnataattagatttacttattaatata

SEQ ID NO: 47815 - DNA, 1027 bp, Cannabis sativa
  modified_base (26)..(35): a, c, t, g, unknown or other
accgtatttttgttgtttttttgttnnnnnnnnnnatttgtgaaattaacccttttaaatttttaattataaattttattgtgattaaatataaaaatttttgtagtactatcacatcaatatagtattcgggtactcaataataataataatgctcaaactttaatatatcccattgtttaattacttgtcaaattaaaattattttaaaatattttataactcccacattagtatattggtcaatattttcaacgaatgggatagttttcaacaacttaagcaaacaacaattcaaagagtaaaaatctacaagtgcaatgaaaaacattttattaataaaacgagaaagtaatgtctaccaataaaattatcagtgtttgatttaattatcatttaatagcatgaaatctacacatttatcatgattgatgacagtatatattattaaaattaccatgcaattatatgatgccttttgtcctaaatttataaaattaattaattaattaaattatggtactattaaatttttattgattagatatatttggaggagtgaatttgagagagaggttgatttagattagttattacttaattattagattattaaacgcgaaagattccttgtcgtttgacccaacatgccctaataatatatcaccatgatttactttgctaattaattaatttaaataaatcattaaaattattaaagcttcatatacacagcctacgattaggagctctggtgtaatataagaattttgttttggattaattacataaaatactaatttttgtaaaaatcttataattttacatttaaggttattttttttttaaaaaaaaaattacattattttataaagaaatagatattgtatttttcttttacctatatatatataaattattagaatttttcttttattagaatttatgatatattaattatacttttaaatgttatctacatattagttttaatatcatcaccattgaaatagatttatttattatt

SEQ ID NO: 47816 - DNA, 1545 bp, Cannabis sativa
atcatcttgttaccctaaaatttttgaaggaaattaacaaaatctgtaaaaaaattctctggagtaaaagaaggcagcacaagtgaattgcaaatggcatcttgtgatttagtttgcaagccaaaaaagtatggagggttagggtttagagaagggttgaagtggaacaaatcttctttggctaaatatctttgggcactaacaataaaataagattgacaaaatctgtagaaattttctctgaggtgaaaaaggcaacacaagtaaattgcaaatggcatcttgggatttagtttgtaagccgtaaaagtatggaggtttagggtttagagaggagtcaaagtggaacaaatcttttttggctaattatctttgggcataaataataaaacaagatgtcccacgggtgaaatgggtcaactatgtttactttttaaccaagatgtttggtctcatgagctaaagctcgatgtgagctagtattggaagaagcttaagaggctgaggaaaaccttctccaaagatgagattgtgaaagcgggtattatgtgtaattttcaagtgaacgagatatatgattccatgatagcaaacaattttagggtcaattttgagaagcttgtttggtgttcatcatcggctccaaagcatcgcttcataatgtggcaggtaattcatatactaatcttcttactagagatattttgattaaaaaacttgtgtatgtttaacgttgctgattgccaagtgaccagtgtatgagatgaacatattagatcatccacactcgttttttcttttggagagttttgcaaagaatgaaattcggttgggaagtcacatttaactttttgtttgattaatgaagttttcttttatgattaaaaaagaaaaggtaaaaaaaagcataataataacaatcatgtgaatagtaatgatttgtttggaaaaaaaaagctattaaggatttttgcccccgaattatgacatatgtattattgtatcctctaaatttttcaacccgttctaaatagtccctgaactattcataacattttaaattggtcattctgtcaagttttgtcacacgtggcaaacaaaatgatgatatggttgcttaaccaattgccacatcaacgtcacgtgtataatttaatattaaaaaaaaatatgcttttttcaaaaataattaaactaaaaattcattattgattaagaaattacgtaaaattaaattaaaaaaaaattattttttaaaattaactatatccatggcgttgatatagtattgacgtgatccgggccggccttaaccatgtgcaagctgtgcaattgcacagggcccaaccttgcacaaggcccaactaaataaaagctaaactatttatcattttttaaatttaaatccttttcaattttttttttaattaatggtccacttccttatagcgagaatctctcacaatttatgttagtttactatttatttttttcaatcttttatatttcattcaatatatgtttgatagtagaatatatatataa

SEQ ID NO: 47817 - DNA, 1171 bp, Cannabis sativa
catgatttaataaatgtcaaaatttatgggacaaaaatattcttacctaaccttataatattaataataataataataataataataatataagtgacttttgtctaagttgaaaagccaaaatatggttaagagtatatgactccttcaaatatgtaccatatataatagtaacatgtgaaatatatataacaaaataaatgaaaattatttggtaggggtatatcaattttgcttttaatatagggtcattttctataatttggtatatatatatatagagaaatatttgtaaactaatttttttcatataaaatgtgtacattattataattacagttggtaatttatttattttttaaaaaaaaaaataagattcaaatagtgattagcaagtgtatactttatgttaattatgcatgatgttgaacttaatttatttttgacactaaaaattatatattcagaataactctcgaaaataggcataatgactaggctagctaactactataataaaccttcttataaaaagataaaatataatttctcactagaaatgaaaaacgcccctacaatatggccaaaagtaacaccctatatatacctaacaagatcccaaaatatatatatgatataactctctttaaatatgtaattacatatatatatatatatatctatataatatttattagttggtggtaataaattaatttctcatatagatatatatatacaaaattgaagtctatatatatattgagttaatattcgtaactaactactcaaaacacttttaattaatattacattaatttataagattatataatcaaaatgcatagaagcaaaatttacaatacataatgagtgcatattggtcaacgtcaactgtgtggtgtgtgactatatatatacatatacttaatctatagtcatatgatagagtactaatagtagactatatattactatagagaagtttcaatcctattggtcatgcattcacgtgactgtattcacgtgcatggctatatgtgaataatgaacgtgtttaccaagacactacattgacaattttgtcctttttattctcatctttatccaaacttctctctacacaaaatatgtatcaatatattttagtatttaaaaaataaattttttt

SEQ ID NO: 47818 - DNA, 1441 bp, Cannabis sativa
tattgttaatattgtaattaattgtgacacaataatgttaatgtttactttattttaatttttttggcatgaaagtcttaatgaaaatgtctcatgaaaggaaacctataccctaaatatctccatccatttttatttttattatttttatatcaacttagttaattttattgcacattaatgaaactcaattttgtgtaaattaaaaaaaaaaacatatattatatgtgaatagagacaattgatatgaaggaaaagataattaaaggaatccaagctctccttgtctttctctacttaacttctgcttggttttcgttttttttttatttaaatatatatatttattaaatgtaaaattataaattataatattggacagaacaacttaataatttatatatcaatataataatagaagagctcgattagactgttttaccttctcaaatatttcgaatgtgttaattaattaattaattaattaactaaatatatcatgacatatatgatgtttttctttaaaaaaaattcgagtgtgtagctatggtttacattttacagttaataaactctaaaaatagctctatataagtctctttatcaacctattacatacagcaacttcaacttcattttaatacattattatgttataaatttataatgaattacaccattaaaaatattttactttttaatttcagtaattaaataaatattgacatcatctgattattgaatagatattataattatcaattatcaaaagtacaaaatttattaatgaactaaattattacattaattaagaaagcaaaaaaaccctatcaataataattaaaatgtaaagttaatcttacaaaattattttaatatcactaaagttaatgttaataaattactttaattaatttatttgtactctataaatatttttatttattaaaaagttaaagtacaataatatagtcaaataataataagtataacttattatattattattatttttgataaaaatgatgagatgtttttcatctttgggttcatcaaaatgggaataattaattatatattttatgtaaatcattgaaaatggcattagcagtgaactcaaatcaatgtgtgttcttgtctaatattgtaatatggaagatctagaatttaaagtaaaatgggcataatttcttttattgaaatttaaaattttaatttctatcatatatataatttaatttaatcattaatgtttataaatatatattgtaattaatcgaaatgaatatacatttttgttgcctcttgatatgagttagaacttagaaccaaacaatcatgaaatttatatgtaactcatattttctacattataatgggactgtaattaataattaatttggagtactactatataattaattcaatcaatttaaaaact

SEQ ID NO: 47819 - DNA, 1275 bp, Cannabis sativa
tttttctcgattttttttttcaggggggcgactgcccccctcgctacaatgtgggtccgcctatgtatatatatatatatattgactgatatttatttttctaagttttgttagtgtactaatgattaactctgtttttattttatatttttggaggagagaaagttattatgcatgtttttctttaatggtatgttttgtaaataaacaaggaagagggtataatgatcgggagtagtgggatgctgtatatattatatcaatactcacccacaccaattcacatcccctaaaatggttgaacttacggatcacggtaagagtaactaaattacatgtatatataattaattaattgaattattattataaaatcaagtttatttagttgagttttaatagcttgattttaatttaagaccaacaagtttcgtccataaggtgattattatagccagaaatgccatctttctttgttgtggacattgtcccacataaaataaatggtagagaattgagccatataaaaaaacatatgggctactccactcattgccaattgatttgagatagaaccccatgattctcaacatggtatcaaagttatattccttttgtactgttatataattatcatcatttttagtgttaaatacttatgtgttaattaatagagaaattatattcaattattattattacctgatcatggaatggaagacgtaactctcttgaggagatgtataaagaatctttctttggccgcaaaactaattttcaaaaagcctacctaccttagatgcatcatctgattgtgtccattatgtaaaagcttgttgataagccaagaggcgatgtagtctaataacacaaactttacacccctttttaacatgtatgcatgcatggctcgtcatcttcattaatatatatacacatacatgatacatattattatttctctccttagatagttaacacaactaattatttcaaaagcaaaatcgtaattgatggaggcatatataaatcactaattaattagtctcccgcgcttcttaaacttgtacttttttttaatatatagtactataaagatatgtgatttaaataactcttaatttgtatgttaagtatttatctattatctattaccttgataaaagtggcaatatctttaatccttaactaattaaattactaaaaactccttttattctcaatatatattgactcattaatatgtaaagcaaatcattttattattattattat

SEQ ID NO: 47820 - DNA, 2918 bp, Cannabis sativa
aaatttgaatttctcgaatttccctcaaaagtgtacgctacgtactcattacaaggggtgtaatcgtcaatcacgtgcaagcatcgaaccgtgattagaggtcaaactatcaattagcattaaatggacagaaattgaagagcccttgggcggaggaaaatatccctagcagttcatatatgactactcaacatctgtaacattcaaacattcgagcagaatgattgagaagatgtccgaccaaggtctaaacatgtatatgccaagcgaagcatgagagataatgattccaaaaattaatctcattgcgtccaaacgcgatgacaatccctataattacgggtttgtgtcagagaataacggtaacaaaacctagtgtcctatttctcacgttataactatagaattaatgtagtttcctatttaaaacattataagaaaaagggaaaccatccattatgtattaagtccatataaataatggtctaacctccctacgaaggggataaagagaattgcttcagaaatatattatagagaaaaaagagtgatataacagagaaagttactcagagatcaattgtgagagcctttgagaggaagatcactttgtttccttctctcatgtcaatacaaatacaaggggagtaggctatttccatacttacggggtcgaacctctttaaaacttggtgttcacttgaaagtaagatcatctatattttactgtttttgctttcttttattaaacttatctaatcgctttatttttgactcactatcgttggctagaagcaaggtcaacaacttccatgttttgtccaatctggcctttgaacatcttgttgactaacctttgtgaggtagctccaacattcttgagaccaaacactatgactttatatcagtataaattgatgtctgtttggaagcttgcttgttctttgtctggtagatgcattcgtatcctattgtacctggaataagcatccataaagcttaagattttatatctggttattgcatccgcgagttgatcgattcttgggagttgaatatagccttttggacatgccttattaaggtcagtgaagtcaatacatactagacatttcttgtttggcttgggcaccagtactgggttgtccactcaagttgggtagaaagtttcagcaataaatctatttatccggagcctttctacctctttttttagtgcatgtgcacattctttatctaggaatctccttttctactaataggacaaaagtctagatcaatataaagggcatgagatatgacgatgggatcaattccaaccatgtcctcatgtgaccaagaaaaaatgtctaggtctgctcttagaaattttattaaggctaattttatttcaagaaacaaaaaattgccaattttgagttttctagtcagcatggctagatcaatctccacttcttctagctcttctactggcccaacgtttgtgtttgtttccccacgtcaggaatccatgtcttcgttcccgccttggacgaattcctatttggcaatgcgttttcccttctctaaactctagctagaagtatcttctttcttggtgttagataaagaaaggttgtagcattcccatgcagtttgatgcattccttttagatagcctactccactccatgttggaaacttaacgcacatgtgaaagactgatgtgacagctcttaagtcatatagggcttgttggcccaacatgacattaaaaggtgaagggacgtcaatcactaagaacagtgccattgttgttgtaatcgtcagagcatgtcctattgtgagtggttagtgaatctgtccaagtggtgctacgctttggctggagaatccgtagaccagctgagtgcacggaaccaaacctttaagctggagtcccattttcccatatcttttcttgaataaaaaatttgtagaagctctattatctaccattgtccgagccacaattttgtttgcgattttcacttcaacgaccaaaggatcattgtgcaaaaaaatgaagtggctagaattcgcttcgctgaatgttatgattggttctcaaacacgttgtagtttaggctttctttcttctataggaaagattacatcctttagttcatattgtaaggcttagagatactttctctatcttttcctgagtctctagcaaggtgggggcccacaatgataacttgaagatgtccatccactggtggaggcatcaattggttctggttagcatatgttttggcagcccttggttctttgttagctttcacatatttggaaagtgcaggttgttttttttttatgagaaattcaatttcccgctttaagttgttgcatttatttgttttatggtcgtagtctacatgaaaatgacaaaacatggtggtatcccatttgtgcatatcctttttcatgggacagggtttcttatatggctccatagactgggtagtgcatatattgtatctatgtcttctgttaggatagtgaatgcaatgaactttgaggtattctcccgaggatgctgtttggcgttgtcattgaacttgcatttcttctcactaccctgtctgttgccactgtgtgacctttttccaccttaattagaactgctacgattttgtgaattccaatcttgttggacggatgtattggccacagtggtgtgctattgagttttcttttgtctaactatgtctacacacagtactacttcatagagcttgataaatccatctactcggtccaggaattcttccattgatcccatagttaatcttcttatgtccttccatagctctcctagaggttcgattcctcctagtattgtggctagacttccatcttcgatcatcctctttacctttgttgcttcagtcatg

SEQ ID NO: 47821 - DNA, 1643 bp, Cannabis sativa
gcaagagcagaaccgagaaaaaccctaagtttaatttttattattattattactatggaaaaaaattaagctaagtgtttgataaattataaattttaaagtgttgtgagttattaagattctattataataataatgttataatctagttcattataattacaaatatatagaaaattatgtcaaacaaaatttttattttctatatattttcaattatttttcccatagtataaattaatatgcatttgatataaataatttataatatttttaaattttacttttatcactttttttttttaaaaaaaaaagtactttatatataagatcactctagatttatgtggtttgttaatagtttttttttttttggaagaacaaaagttcaattaaacggaaaagcagatgggaaccacagggggaattccctccccttgaaaagcttcagcaaggtcattagaaaatctagctcttttgccaaaccattcacaaaagagagattacaacgcttaacataacagaaaatgcaagaattgaaacacttaataagatctataatactcaaggaaaggttgagaagcatctaattaggaatacatctcctctgagccaaggcctagacaataatttttgagtctgataaaatacaaatttgatcctaattgttttgagccgcccaggatagagccataagaatggccttagtctctgcttccaagggggaaagagcagtagctttttgcatcttataagcccacccaccacttcttaaatcaatccaaattgcagcaagacatgcggatccagatagccaagaggcatctgtcatcaacacaaaagaaatctcactccttctaatttttttagcagtagggacattttcatatagctccagatttaagtctagaacctgggataattcaacccacttagagtatatctgattctttaaaaaagccaaatcgacagcagcacttttgaagattattctattcctttgattccaaatctcttggtaaagacatcccataaatcacaacagagaatcccttcccaaagctggcacagaaaggactagattctctacaaattctaggatagatacactaggaattttatcactaaggatagggaaagggcccaagaaccacattgctttcgacacagaattatccctaaacacatgtaaactggtttcgagctcatcaccacatagaaggcaaaatttctcaatacataaaggtagtttacatcttaaagggatggcctcattgagaattctccaaaggagaacccctatcctgggatgtatcttcgaattccacaaccatttccataaaattttctttggccggaaacgaagctcttgatctaagcagtaagcacttttaacagagaaggcaccattaacacttcccttccaaacaatttggtctgaatgattgagaggtgaccttggaatttccaagattttcctcctaatagcaccaaagatctgaagtagcatcaaccatgctcctgtccagacttcccatcagctaatcaaagcctacatgatcaagccaaagaatccaaggttgttgataactctatggtatagagttattttttatgcttttaaactgaaattattgtgagaa

SEQ ID NO: 47822 - DNA, 1617 bp, Cannabis sativa
  modified_base (26)..(31): a, c, t, g, unknown or other
  modified_base (149)..(149): a, c, t, g, unknown or other
tttaacttttttttttttcaaatttnnnnnntgagtttctaaagtggttgcagggctaattgcaataggggtttctgtagaatttttttgttgcaagttaggttgcagcgctagttgcaatagagatttctatatagaatttcgtaaanatgcaaaaaaaaaaaaaaatgtttagaaatgtaaaaataaaaaatgaacatattttatccttttgttaaaattgagcattaattaggaacaaagacagcgatatggaacaatattccacctcataacaattttcactatccaaaaaaaaaaaaaaagttactgtatatgtgtagtgcgatgctctggactggagatgcttccattttttatatttgttttaagtaaaaaacgataagaatttgggaccattaattatttagtttttatggaagtattatcactgctagctgcctccccttatcttaaaagtcatcaaagttagcagcatccctgtagaaaccttttgtagatgttaattaggagttttagatttgaaaaaataaaaagtaaaccagtaattaaaaccaataaatcaataagaaaaattacattagagtcttcttgggtttaattttgattaattaataaaacataaataaataaaccattaatactttgatgtgtagtgctaaagatggttgcgtgaatggccagaacgatactaatggcggtggtaacattaaaatgatgtcctatcgcagtgggaaggtagtgccatattgtagttttagaacgaaaaaataatgcatgagaagaggacttaactgggtgattgcagcaacgtcaacgcaaaggactgataataactttcctgttatggagcttaagtattggagaacttaagaaaggtagaaaaaattaacatagtttataaaaatatgagagaaaaaagtaatgtcacaaaacatgatgattttcaagaacaattattgcctgtcaaatcgccatagcagctattaccaccgaatagtcgctgaacttttatcattgctgccgaaaatgttactagaaataagttgtgggaaagtcgtaagggttctcatcgccaccgcaaatatcaccaccgaaaaagttgttgaagttttttttgtcatcggagttagacgttcatgtcgtcattggagttggacgtcgaactaactttatcagctaattaaaaaatttgatacaaaaaaagtaagttacataaaacaatcaaattaaaattaatacacaaaaatcaattacttaaaattactaaaagcgtgtttagaaagccaagagaaaattaaaattggatgtaattgaaagtaattacacagatttgtgtatttgtgtggcaacataattacactataactacataattgaaataactaagggcgtgtttagaaagccataaaggaattgaaatttgatgtaaatgatggtaattatacaactttgtgtgtttgtttgatcccacataattacactaaaactgcataattggaggtaattgagaggtatcaattacactctccgattttcatactctccatgaaaattgagtgtaattacaatgtgtaattactaaaaaatttacattttaaatattaagtactaaaa

SEQ ID NO: 47823 - DNA, 815 bp, Cannabis sativa
atactgcagtatgaaacttattaaaaaacacagtaaaaaagtaaaaaataccacttgacagtatttttgtaaaaaaatgacaaaagttattataccatttaattttccctaataatattactctacgtcacttttgatttcaaacactaacacacctgatacagtttttttttgtaaagaatttttttttctttctctaattattttttaaatttttttaaaacaaaagtctcattaagtgacatctcacgcgtcctctcccataagcagcaagcagtgtccacacacattagctattctctcctacactacttgacactgtataaaagtaaaaaaaatatgtatccgtaaatgaagatgctattgctttttagtcaatttttgtaattttctcattaaaatatatatatatttcaaactaatgtggcagactgccagtagacaattcaattgaatgggttgtgtgatataggtccaacttaaaaggaattagatttccacgaacatggatcgctagactttagtctagtgttacttccccaacagtttcctttccaattttttaatttaacacccccaaatcacaaactaaacttgtttccaagaattgcatgtttagactgcagaaaaacaaactttaccatattaactttaagaaaacactatattattatgaacatttattgattcatacatatatgatgacaaaaattatatatgaactaacaataacaactatgatcagtatgtatatgcctctctctcgaaacactgactgagtcaaacaatgtatttatcaaaactttgtgtaaacc

SEQ ID NO: 47824 - DNA, 2412 bp, Cannabis sativa
ttcttcttccaagacaactgggaattgcttgagaatgatgtctatgaagccattttctctttccttcatttatggaacttgctgaaagaaatcaattcaacagtaattacactcaatcctgagatcaaatgccctaacaaagtaagtgactatagaccaatatcgtgttttaatgtgctttacaaaatagcaaccaaacttatttattctagacttaaaaatatccttcatgatctagtatcactaaatcaaggaggatttattaaaggtcgattcattgcacataatatcatgatatgccaagatttgatcaggaattatggaagaaaaacatccaaagccaattgcatgatcaagcttggcttgtaaaaggcttatgatacaatagaatgggagtttttaagaagagatgttgaaagcctttgagttcccagataagttcattaaactgattatgagctgtgtaaaaactctaagattttctctcatgttcaatggaactatgcatggtttctttgaagaacaaagaggattgaggcaaggcaaggagatcctatgtccccattgctctttgtctatctaagtagaatcatgcttagagtaggaaagaagaaagagtttggatatcatgaaagatgtgaataattgaagctaaatcatcttagttttgcagatgatgttttgctattctgcaggggggttttaagagtatatattcgttgttgcagggtctaaagctcttctcaaacgcacttggtttgcagccaaatagagcaaaatccattgtgttttgtagtggaaaagatgagaggaaagttagaagagtgcttgacatatctagattcacaagacaaaatgaacctttcaagtaccttggtgtgcctatttgtgctagaagaatatcagctgctgattgtggtattctagtgcaaaaaatgacagcaaagatcagaatatgaagcaatagaaatctatcatttgttggtagattagtgctgattaattctttgttattaacactacacatctattggagttaaatcatgattctacctaagaaaaacatcaatgagatagaagctgtttgtagaagttttctctagaaatggagaaatatgatggcaggggcaggatgcatagcttgggagagcctgtgcaagcctaaaaaagttaagggcctaggcttgataaacacttctatttggaatgttgcaaccatggttaaacatgtttgggcaattacaaataaaaaagacaacttatgggttaaatgggtacatattgtgtacataaaacaacacaactggtgggagtacaatgctccttcccaaagtagctagtattggagaaaaatggtagagattaaggataaagttaggcaactggtgcaaacagatgtatttacggttaatgaatataaaattgcagcaggttattgcttgtttgatcaggttcaagaaagagttaatttgtgtgatgaagtctggtcctggcttaacacaccaaagcatagtttcatgatatggattgctatgctaaacagattaaaaactcgagataggatgttcagattcaaggttacagattcatcttcctgcattttttgcaataatgcaaaggagacaggagagcatctcttctttacttgtcctttctctcaggatcgcttattgcacgtcaaagcatggttcaagtggaataccactgctggtactctacaggtctgttgaagtggataaggagagcgaagtagtccaggtttaagaaatgtgtaaaataggttggaatagcagccttagtatacctgatttgggctgttataaatgacctgatggggaattcaaataggatgcattcttctgagctgatgtagcagctgaaatggattgtcaaaaatagagtaattcttgtaatgccaaagaaagtaagtcatgaggatataattaattggtttcatcttttgtaaatatcaattgtatagataaaattaaggccttctatttaaaagtgcttataggatgtacaaaaattgttaatggagtaatgaatatacaatctagttcataaaaaaatatttagatatgcagtttaaagatcatttaaatgaacttggaattatatctcaattaatctcctctggaactccacaacaaaagagtgttctaaagtgatgaaattgaactttgataaaaatagtgaggtcaatgattagctactcaactcttccaaggcattaaatgttgttcaatctaattctctttctaagacaccttacttgatactataaatgacattttaaatgttgttctacttaaatctgttcccaagacacctataaaaaattgaaatgataaacaacctagtttacaacattatctgaaaaacgatatgtgtgaaaaattaaacaggtat

SEQ ID NO: 47825 - DNA, 945 bp, Cannabis sativa
tggaattgactatccctataattaaaaattgtaaatagccatgaaaaccggccaaagcacatgaaaccctggcgtggtatcaatgactcaattaactacataattggtactcactctttggtgtgttgcattaaccaaattcaccaaagtcgacactctttggattttagtcaattatgattaaacttcaaaaaagaaaaaataattataacatctcaaccatattttctctgagagagagaaaaaaacaaaaaggagaacggtgtgatctaattaaattaatatctcttataatagctcatcaaatcacagaaacagagagtagtcccactttcagaatatgaagacttttaatttcaatcttaattaactttaatttacttatatttatttttttttcaaagacttatttaataatgaaaaaacaataagaatatatattatgcgaaaaaattaataattgtcagagcttgctgactactttttaagaaataatcagagtgtacttgataaattattttactatatctacactattgttttttttaattattattttttttgtaactatatatactattgttgtttttgtagaaagcttcttaaattggctagggtacatatatagagtactgggtcttttaattgacagttaagactattcaaagtcgcatttaaaactagctagctaggcaggcacaagtaattatatatacacaactcatatatgtataacaccattgaataagctcacgctggatatggctggccatggccatggccatctactacatacgtactcaactatctttaatttcttgtcttgtatttcacagccaaaaaatgctaataaaatggggccatggaagtattctaataggaatataatgcatgtgtcagtgtcacaactcaaaccccgcttagtgagccttacaattttaatat

SEQ ID NO: 47826 - DNA, 1222 bp, Cannabis sativa
tataaatttggtgtaatatcagctggtacgtaagattcaatcattggaagaagaaaaactacatgtgcgtgaagttatatgttggtattttgtatctttcttatatattatgtttttaatatgataatcaaaatttatgaataaagatcattatatcgtacgtatagacatgatctatagaagatgttgagacatgcatgaatcgcttttttaggttttgtattcctgtattgtatttttatttaattttgtagataagatcgtgatagatccactgaatgtacatgcatatataaatatatatacacatctatataaaaaaatgaagtgtgcatattgttgggaccttcttggtgtgtgaggggggcaagccattaaatcattacatgaagaaaatgaacgctgaacagaacccacctttgatacatcataatccatggatttcccactttattaataattatatatatatatatgtatgtatttatataaaaagatatataaatatatatatttgtatatgatagagatggatcgactaattaatgtgtgcaaaatgaaagcattgcccaaaaagagggtgccaagctaacatggggttgacaatgttggactgtccaaaagaaaacaatatatgtaaatattatatagatatgtttttattattattattaaaaaatactaaattctatatatttcgtggcaagtatatatgtatatataaataacaatcatacaagtgaattttaccgtactaataatacttatatataatataagaaaattctagaatgcacccttaataagagtgtacttaatacacctttatttattttggtatttaaaaaagaataatttaattttttttatgatcgtatacgtacgcacaaccggcttttatggtgtgcaggctgttcaattgcacatggcccaaagataaaaagggcctaattttctttttttaaaaaaaaaatcagattcatcaatttaggttataattatttcagtttcgtacgtcttacattaagatattaaattaaataacaccgaatataaaataaacaaagctattaaaaatgtagttaagtaatataaattaattaagttctaacaattagttgatcataaaaaaaacaaatatgtatatgacaaatatgtatagctaatattcgttaattgccaaattagatagttagtagtgagaatgtgatcaacttttttt

SEQ ID NO: 47827 - DNA, 2238 bp, Cannabis sativa
  modified_base (26)..(47): a, c, t, g, unknown or other
aatggtggcgaccatacttgacttgnnnnnnnnnnnnnnnnnnnnnnagctcataagatagaattgccttgccgctggtgtgtatgaggacgtggatgtctgaagttgatccccaatggttcaagtatggactaaagtggcctgtactcaccacgccagtccgattgtacaactttaatcttggtattaagctgtaattcaacataggatttgaattgtctaaaaatagcaacaacttcagatttagctttcatagggtatatccatgtaaatttggaaaaatcatcaatgaatctaacataatatctatccttctattgaatttaaaaagagggtccccatacatcagttgtactaaatcaaaacaagaagtagtcttaggaaccgaactacaaaaatgcatactgtgaagcttgccatattggcatgcttgacagaaaggaagaaaattatcttattttggaattaattgtacagaggacagtctttagaattcttagtgaagcatggccaagccgatgataccagatttgagtgtcaaagaaggatccattgttgttattctttgtacagttgaaaggagcaggtgggggaaagggtcgtcgattgaactgtgtggagttgattttggctttggacagatccaggtgatacaagccttgcttaagatggcctcgaagaagagcttggcccgtaatcttgtccttgatcagacatgtatcagaatcaaacaataaaattatattattatctgttgtaattttaaagatgctcaataaattcttggtaatattatgggcaagtaaaacatcatttaatagaattttcttgcaaggattagttgtatcaaaagtagattggcctatgtgagaaattgagatttgagagccattacctactattattttgactttgcctttctaatcattggtggaggtgagggtttgagcatcaaaggtcatgtggtgtgtggctccactgtccacataccaaccattgtcttcagcaggtgtattagtgtcagagaaaagggcttgagggttgtggcctgaattttaagaattggaggaggagccttgattgtttgtgtcatatctgtgatagcatttgtaagcaagatgtccaatcttgccgcaaatttggcaaactggatgagaagcacatccacggccattgggggggaccccttcctcctgtttgggatccacaaccttgagaatttccacgaccattagattgacctctgccagtgttgctctgattggatctagagggatttttattgaactgagcatagtttgcttgagctgaatccaagatctgaggagctgtgttcaattctcatttcctgattttgaagcatatactgcacttcttgtagagtcggagcatcagctcttgcagtaagtaaaaccacaactgtttcatattcatgtcctacaccttcaagtatgtacatggcaaattcttaatcagataatttgtgacctgcagcagcaagagaatcggtaagattcttcatcttcaagatgtactcgtcgatgctcatggatcctttcttagtgttttgaatggcaagacggagttgaagttgtctagccttcgattgagtggcaaaaaggctagcaaagaccgtccaaacatcaacaatggattcacagtggagaaggtgcccgagcatagcctcagaaagagaattcatgagacaactcgttaatagagcatcacaacgaatttaatgatcaaaggcagggttaatcgtatttgtacatgtaagaagaggctcaggtcgtggagttgtgccaagaaggatgttgtcgagtccatgggcacgaactaaaggaaggatcaaagatcaccaataggagtagctatgatgatccagacgaatatttagaggaagaagattgtttggaatgtgaaattgtggtgcgactgcctgaagtgcgaccagagcttctggttgaggtggtggagcagggtggcggggtcgtcaggatcgaccataggtatgataccatataagagcagaaataagagagagaaacagagaatattgaaagagaagctctatccaagaatgtagcagagatatgtattatatagtttgagaacttgaactgtattacaatgccacacataatcgagttgacaaaaagatgaaaaacagaataaaactaactaactgaattcctaactaactctaacaatatccatttaggtggcgtttggttggag

SEQ ID NO: 47828 - DNA, 1118 bp, Cannabis sativa
taatattgcaaaaagtttacaaaagtacagatttaaagtttttttagcatttttatgaatttaatttttttttttacaaaaatacatacagttattttcacattattgagctatattatgttgcagcataaaaataacattgtttcccataaaaaaattaactaaaaaaatatgtaaaaatataaaaagaaatctatattttttattagaaatgcaaaataaatgtgattttagtattttgtgtaaaaattcttttttacgtttaattggaaaatagccaaatgttaaaggagataggcaaagaactccaatacacacatgttacacaatatgttagtgaaaatcactccataataaatctcataggaatattctacaatgcatcttttaaaaagaggtgtaccatgtatctttatctatttcgatattcgagaaaaaaatttaatctaatttttttttatggtcgtgtatgtacatcctgcaaaagtttgaagaattctagaaaatttaacacgcaaaaaatagagttcaagcagtctactgtatgcgtgatttttttattttatacttgtgtggaatagactctttgaacatttatttctatgttgtaaattagtctaaactttaaaagttgtcttaaataactataactatgaaaaaacttaaactaaaaaattatcctgaatgttaaaacagatataaggtgatcaatgcacccactttagaagggtccattttagaataactcaatctcatattaggccaaaataatattgggtgcttctacaatgcacctttttaaaaagagtgcactaatgcactttttatctgttttggcattcaaaataatttttatgtccaacttttttttttattcgtatgttatagttatttaagatatgttacaaaattttgataaattcagaataatttacaatataaaaagtagtgtttaaacagtctatatcacacacgtataaaataaaatagtcacgtgtgtaacacaatatttgaaccacgttttagacgtgttaaattttttcgaatttttcaaaattttataggatatctaaaataactataacgtatatgactatgaaaaaaaaaaaattaactaa

SEQ ID NO: 47829 - DNA, 1159 bp, Cannabis sativa
tataaaaactgctccatatttatagaaaatatagatgaggtggtttttgagagaagaatataataattaatataagcaaattaaggtagtatgaactcagatgtaattcaaaggttgaggaaaagcagttggtagttatttgactttttgttccaatataatttccatattaatattagtgaactatgcatttcatgggcttattaccacccaattttcggcattaaataagtaagaggagaggacttgaatattgagaaatgctaaagggtaatagtggtgcctaccactctcttatgtgttaatatcgctattggtctaactaagtattgggtctcatataatttaatataatagcttttatcgctagccaatcgtaatgcagaaggtactaagcactactagtgtctaataacaatgctcttgaatattagatgaatttcatcaccatcattatttgtattaaatttgtcaacatatttcaagtcaaatgttggtatttttgccgcagtcagtgggggaaaatctcaaaattaatatggttattaaatattcacgttctctaaacagcatatttgtaaatcaatttataatagtaatattaaatgtacgatattgatttatatatagtaagaaataaaaagtcaaaagaagagatgattggtactgagtactgtagtaagtaagaaaatatgttccaatagatgggaactgctaaagtccaaaactatttgggtgtttggtttgtctctacgtcaggtactactcatttgtacctaaaacaaaggaataattttatatattagctagctaccacaagattataatacatatatagtcaatatttttttgcgagataactagatttttttaatgacatcagcatgcatgtccattgtaattacactaaattatctcatatttattttttaataaaaatatgaaattaattatataaattaattgatggtgcaaatattataatttttattttttgatatattacgtcatacaaaatgtggacattttatttgtttaatttttttttattttcatgcatgattgactaatactcaattttatttgaataattgtaagactaattaggatttttgccttctgaattttgacatgtattaaatcatgccccctgaacttt

SEQ ID NO: 47830 - DNA, 2092 bp, Cannabis sativa
tttttttttttttttttatgacttaatatgtaattagttatgagtgtaatgcattgatttgttgttgaatattgctgttcaaatgactaatcttctttcgtttaaggtagtggtgtacaaacttaaagtcgtctagagattataaatttatataatatgacatgtgttactgtggttttctatttttacttctacttcaggtgatctacggtaatattttgatgattgtaaacgtattgtatatataatttatattttgttgttctttcatttatggatgatttagttttggaactttttctctaattggagattgcatttgcagggattgatttttaccgcttactctttatgacaaatggacttcccgatggtgtcgagttggcatactatgtgagggatgtgtatatatctatatactttatataaataaaacaattttcatttttttctcaattataaataaaacagttagttgttatactgtacatattatttattttatctttggctggtatttgaaatttatagagctctcatagcagacacatctacaccttgagttagactaaatgccagggacatgtatatacttcaaattcatttgtttgattttggagggttttggccaaattataaataaaataataattaaaaaaaattgatttatgggatttatgaatatgcgactatttaatgtataattcgcctgagttctaaagaatatttggtggctgcaatctgggaaatggcatcatattctgcgattgctacagtagaaaggtgaagttcttgattcagatagacgttttgtagtatgataattttgatgcatcttaattagtttctgacatcatttgcatcatcttgaacaagttagtccttcccagtttgaagctaatgccgggatgcacgtatactttatttagatgagatgtttttttttctaatttatggcaatgtagcttaaataaaactaatattttcgtggcttggcacgtaacatctaactagtatatatatatatatttgaatggaaaaatcatcttttattaagtaacaatttcaactaccaaacaaaggtagcaaatttactacaacatccttcaggtaaaaagtacaatcagaataaaataataaaatagagaagcatttgcaaaagcataggcaactttattcgctgatcgtttaataaaaaaacagagatatttttcagctcagaaagaaaaacattacaatcatttatattatggccaaataaagacaactcatatgcaatgagcatctaagagcttgaacaacaccactagagtccgtcacgcaaacatgatgccaacccttatagctttgatccaactaagggtttctttaactctcaaggcttccgccagcagaggttccattgacccatgaaaacgtttgcaaaaaccttcgagaagaagacccttatcatcccgggcaaccactccaacaccaaagccttgaccttccccaaacaaagcaacatgcacgttgatttttatactattagctgtaagtgtagaccaacactcataacaactcataataaattttgcaacaatatgaaatcaacttggtttatactgtattttcaagttgaacatataatattctaaaaacaactcaaagaagcttcacaacaatatgataaaacaactcattattatattttaatattttgtaatttttatttagttgcgcttttaactttttagtttttcatttcacatttacatgttgaaaacaatagaaagattaattcttctgttttatttcattccatacattattcttgtatgaaaaagtcacattcattaatattatatatatatatttttaagaaaaattctcaaaaactaccttccaagcagagagcttaaagataaagtggatgggagactgattgtatcaactctactcatgtaaaatgagctcgttgatacaagaagtataacgaagtcaccaaattttgctaataacttccgacaaggcatatttagccaaggaatgtgcaacaatattaatagttttagaacagaaagaaagactggcaaagtaaaaaaaaaaaaaa

SEQ ID NO: 47831 - DNA, 611 bp, Cannabis sativa
  modified_base (41)..(70): a, c, t, g, unknown or other
ttagtcacaacataggaatgatatttataattagtcacaannnnnnnnnnnnnnnnnnnnnnnnnnnnnntgactaaaagtaagatttttcgtaattatgaaccccaattcaatatcatataattgtacccacatatcaagccaatttagtggtattgtacgtgaattaactcccacggtgaccctttcaataataagttattttctaccgtaagtccagtacgttgtatatcaagttcatcataaaattgaaacaaataataattgtctttaagatccttcacatacatcctttttttggggtccgagagatacactataatattttaaaaaataatgaaatgagacacccttcctgttaagagtcttcccactaggttattagcctgaggaatattgtctttaagttcacgatatttgtacttaaactaacatatgtttttcagtatatatttaatttagttaaacaatttcttttttaattaagcttaaattagagtttaggtgatttgaaaaacaattattccaaatagacaatactattagtccttttgaaataaaaaatcaccaaaaacatattttggagactatttttattattttaattatga

SEQ ID NO: 47832 - DNA, 3198 bp, Cannabis sativa
gatttcccccaacaggtactatgattcatgattaaaagggttgtccttatacaataaattatacagtaattttatgatgtttaatcattcttggttgggtttaacatatatatggcaggaacttatgggtgtttttatgaggaactgcatgtcgcattatgcagcgtatagaaatatctttcctaattgggccttggctgagtatcgtaatttgattccatttcaatcaacaaattaattgaagactagctgagatattgtttggtgtaagctaaatgaagacaaggttgtattaaacttaaaaattattttgcaattttaaaattaaattgttgagaatgcttattaatgtgttcatgattcgactcaagtgcattgtattttattaaaataaaaagaatacaccatataactaaattgttcaaagaaaaaaatacacattttatttctatatttttcaatataattgactgaagaaaaatcaaggattaatatttggtctctgtgacctgagtgctatcgatggtctttaacccttgttctaaggtttttgatggtgagtatgtctaaatatggtgttaattcttgtatggggattcatgatattgtgaatcgtacagacaaggagtgggcatgtgctgagcctctatgggtcctctgtcctacgaagtgtaatgacaatttcctcaaaagtgctttttattcactttcgggaaactaaggtgggttcggatgtgaagctaagaagttagtacatttgctgtaaagtctcggtcaaacaaaaaaaaaatcctattgttattgtgatttactagtcgaggtgattgttttgacatatattacctctattttcgacgaagtttccaatatatcaatttctaccgccagtgattgttattgagcaccgcttaggacaaagtgacttatgaagtgactaaactatttggagttaaagaatcgccgggcttaggagtgtctcctttgcagaaagtttgatgatcctaaggaggtagggactcaacttaattgaatattaaacttgattttatatgtgattatgatttataaaatgttaaaaaaaattgaaaacttaatgtgcatatttttcaaaagtgttgtgggacactgagtgtcaaacacatttttctagaagtatttatgcatgttatgattttttgctttattcaaattgcatactgctaaattttctaaaataaagagggaatatattcttttgttattcttgtttgcctgattttagttatactgattactgattagagccatgtgatcatgatttatgcatattatttttttcatgacctagtctctgtgtcatcataagtaagattagatgtgcactcacctataagtgaaagacctaaaatctgtacattaagtgaattaaatctaagccattatggttgctatcaggtacaactacccaatttaggatatcgtttaatttgattggtgttgagagctaggtctctagtggatggtgtgatatgcatgtgtagcttgtctcttgtaattatttgtggtctctctatttcgtttatacatgatgatgatgagatgttttttctttaaagctaaccatgcagaaatttttattaaactactagtcctttgatacctattgttttcttattgggctttataagctcgcccttatatttcctctttcaagaactcattttggtacttgtgaatgagcgagaattgttggtgtagaatgatgtgaatagcttagtctcatcttagttattaattttctttcaaagtctgaatatgtatctacttattaatgggtgtttcatttaaatatccatgaacagttacgcatgaggaataagttggagtatataagtattattttggtgtttttcaacttattaaatctaattatttggtgactataaaactgtggggatattattgttctacatttattcacgagtgatcctattttattacaattattttttattaataataggagttatttatttattttatataattttgtaatataaattaattaaatgatcatttgtaaatattatgtcccaacacgggtcaaatgtgactttttactaccaaagttatggatattatttatctatcatagcttagggttcgagtcgaaacaaaataatagtatcaaagcaacatgttcaaaaacttagagtgtgtcaccaaacagactggattgtcttaaaatattaaaaatgaatcatgtatttttgcaatataagagcataagtatacagaacatccattcctcgcttatttgttagcttttgatacaaagaccaaagaataaaagcatctaaggcgaagtgtagtaggaggaggagatgccttcaaagggaagagaaatgaggagaaagtatggagttaatggcgcttaggctaatgaccctcttccggaggctaaattcctcttgaatgccattttgaagctttaggagctattcttacttaataaatggatgtagtactggatcaaaattttattttaagatctttcactaggcctaattcctacattttaaggtgtataagatccaatggttattgaaagatagataaggaggataatgaaaccttgacgctagggaaacacctaaagaataccatattacatttattgtgtccaagttaaaatttggtgcagtggatgtgggataccttgaccaaaataatggagaatgatcaagtgacctgaagagatttcaaaaggattttagagattaatatttctcttcgtcacataagaagataatgattggagcatgtgacggttgagataaaaggatatgacaaggaattatgcatgaggaatgtgtgattattttgttcaacctatgtgggtgttattgatcgctctttttattggacagtttatgcatattttaggtatgtagtacttgatggaagggttgacataatgaatctactcaagggaaaaacaaaagtaaaagtctatgcttaacctatgctcttagtgttggtgatatacatggggtgcatgacaaggagttgttgacaacatagttcttatctcacactcttgagatcatgtatttgttgaaatatattttaccaggatctagatttactaacaagtttgtttttaatatcctaatatgaatttctaaaacgataaaaataaatatataaaaggtatga

SEQ ID NO: 47833 - DNA, 2174 bp, Cannabis sativa
ttcctctcagccgccagatctctccgactcttcatggcctcgtccatgcccctgaactcggacatgacgtacccatgattaattaaagtctttgagaggtgaccagtctctgcggtgatctggcaaaataaggaaaaagagttaagtatgagagatcagatgccacagagtgaaacacaaaataaaagaaaaaatcattagcaaaggcttactgcggtcatagcagtgctgatatcctgaatctgatagatggagattgtggaagcgcaggctgcgtatcttttggccggtagttgggtcaggttggagacaaaatggctcgtcaactcggaggcaaaaggagcaagggtaagaccgacgaagcggtttaaccagtccatcaaagggtccatgttcagttcccaggcgttcctaaaggcctcctcgcgtaaggaattttgctgagcctcccgtaggaccattttcagggcttccacctcggcattccccattgtgtactcagcatttttatacatgtatttatatatatttatttccttttggatggggtgctttggaaagtggaaagacataaatactcttggagccgcttctcgcaattcgggtgcacgtgtttgcttgacacgtgttttagtgcaaaagtgatttttcgtttccgttttcatggcatctttattaattgcatgcagtcttctgtgtataaataagtttctagtttagccattttcctctaacaatcctttcaacatttttttgggtaatcttttccacttcttgttttatcctttttgcattattgcttcctcactcaaagaccagatacctcactcgaaggacctttcttcttccaacatttttttaggcttagagcccttggatcctgctttcctttccctggatcctttttcaagttttcgtgactttgaacccgttacgtttcccccactacatttctcggaggtttgcagttgtccatgtttcgagcaggctgcgctaggtttagggacttacgccacttctcgagttgaggttgtgccacctttggcaatgtgtcccttcgctgtatttcctcctgtattggcaccggtcgaggcggttaaggaggaacccgaggtgtcagagtggagctcaactcaaacgacagcggcttattatcccgagcttgcgtctactgcttagtttgagaatttcgaagaggttcctgtttctgccgatgcttcacttttggttttttgtatatccgcttcttcctttcctcaggaattacctcgggtggtttccaagattatacaccctccttcttcttccaaccgtcgagggtggctcgtaatgcggaggacatttcaacatagggaaagtttttctgtatagggggcttattaagttttatatttatacactttgtaagcttgcgtcggcgcctattttgctatatatatattttgtaagtttgcgtcggcgccgtattttgtataggccactactcccctagtttttgaaatagagtgagtactctattcaaaaaactttaattaattgtttgtaaggaggcagtagttgtctatttgtgtagttcaactccttttattaatgtttaatttacttattttcctggcattttagtgagtacttgtttatttatggacttaaactttgtacggatttttatttttatcatcgtaagatttgtatgctttaattgctgcttatcaccttatgctttttgtggtttgcttattctcacattgattgccttttataaaaggtcttaattatgtatgcctttcctgaaaggtcttaaatattaccgactttgcatttcgtaaaaggtcttaggacgattaaggttttgcctttcgtgaaaggtctttttagcacaactgctctttgccttccgtggaaggtctttgatcgttcatagctttgcctttcgtgaaagttatttggatagcttcggtttcgcctttcgaagaaggtctttgaagtctctgttctcgccttccgtggaaggtctttgaatgattatagtcttgcctttcgtgaaaggtcttaatgctgcctttcgtaaaaggtcttaatcccatttgtttccgacttgattttttatgatctatccttctttcattatttaaaggagaaagtacggtgacagctatagtgaagtttggagtttc

SEQ ID NO: 47834 - DNA, 2487 bp, Cannabis sativa
gtaaattttgaggacgaaatttttgtgaggtaataattgtaatattctaaaaaaatataaatatgtttaattggacatattttattaaatatgtagttatataaatattagagtaagattatatttctactaaagccaattatgaggtaattagtgactttttagaaaatgataaatgtttattaattatagagattttatttaaacatttgggtattatatgtactaattttgaaataaaatattttcaggatcaacgaccgtgagaactcaattgtttggctaaggatgtcaggccagtaataaaataagttatggattgtaccagaatgttttactatgtttgaattgtcggattattcagggtagataactttgaccaaaatacccctaaattataaattttcttaagagttggatttagggtaagatggtaattttacttagtttcaatcttttgctttatttgattgtttagaaaaccttaggctgaagaaaatagatttagtttatgttattagataattaaaagataaaataaaaaataataacaagaaaatttcacaaacttatctactctctctatctctctcttggctcaaagaaacccaacagaaccaaggcaaaatcaatatctatttcatcacgtcttttcaatttcttcaatcttaggagctatccaaaccttgaggcaagtttcttcatttgttcttgatgatttaggattttgagttgagtctttgaggaatattagatgaattcgggtctgtaggttttggtaagtttagagtatgttcttaggtttaattcaaggttgtttaaattttaatttcaagaattatcagctgttatgctttggttgggtgagttaagttcaagaactcaaaaactcactcaacaatggtgtttttgtgattttaagttaattattggttttgagtattgggatatgttgtatatatgattttaaattaattgggaaggtttcattatgtttggaggagttttggaggggtttgaagtgaaaaacctgaggtagggctgttctgcaggaaaagcagcttaccatttttttttttttgatgaataaggttcttgtattgctcaatcaatatcttacaacatacattttggttacacccgatccccttttacaactagttagacatttacacaattacaattacaacaaagaattatatgttcacaatccaattcttatctacatctttagatttcctaggcataacttccataatccggagcttactttcccattgaatgcgttttaccattgccttgacatgccacatcttttgattccataatacatcatttctagcctcccaaatatggcaaactagacaagccaacaccactttcagcatgcttttttgagttgcagaaactactttggtgtttttaatgcatagcttaccatttttacaaggtactgtaaaaacggtagagggcagaacccagaaaaatagtggtctatttttagaaaacggtggaccattttgggttgtttccagcagttaggttttgtggtttatcgataggggtttgtctgattttgagattaggtcctagaacaggatagattatgttatttaccaaattattgttgtcgtgacataaggctcaagattattaagcatcattccactctggtcgggccgcacacttaaatttggacttaagataagaaaagttaattttactgtataacatgtaaaaattatgatacggtaattacaattaatacaaaagagttattactctaatttaaaactactattaggtttcttacttatcggttgcttctttaggccaagatagtgacattagtaactcgttgctaacgagggttaatgatactttttaaagtatagaggttatcttatagacaattaactgattactggcatttgattatactgtgaatagttgattaaattatatgttcaaatgtatgtgcattgttgttttgaattctatgctatacttaatatttgtgtttttctcatttttcttgccgagtctttatgactcacgggtgctttgtggtactggtaagggaaaggaaaagtagatcagccatgagtcagaggtctcctgacgaatgtacatatcagcctcgccgtcttttgtacacagttgacaggattcgtcttttgtaatgctttgaatatgtaacaatattttgtaacaaactaatacagtggcattttagtaaaagtttgtaaccaaggggatccccgaatacaataataatttggaaaagagtttaagttatactttaattcaattttctaaaagttttaattaaatcacatttttttcttaaattattagtttattattatatactaatgtataaaaggacacatatagcgcctttatgggttagggcgctacatatgtcctcctagggctgatcatgggttgggttggccgggttgaagaaatttcaatgggccaacc

SEQ ID NO: 47835 - DNA, 1787 bp, Cannabis sativa
agaggtcaataaattaattttttaatacatttttgttttttagaattttaaaataaattttgaagcaaaatttgagaggtaataatgtaaaataatttttgttgaaatgtatttttagtaaagaaaaatgtattctttactagcagatttgtatttttcatttagataagtgattagtcataatggaaagcatgagttgaaattctttgtggccatctttttcctttagcgtgtgcactaatcaattgtataagatctttatacatcacttatatcattgcacagtgtaattttctgaacttgcaaacctacctaactaatgagaagcaactaagtgtgattacacaacatcattaataaatagagtgctgagtttgaatagaacaattataagccaagaaagaattaactttttgaacacctaactccagtaatctatatctatacgttaaaatgtaaattataaaaagattatgaatattcagctacaggtgtcatttatataaatatatacacacataataatattgtttaacatattcaggagaattgttcaaaataggcacagaaatgagaggtggtatgtatataatcaattcaaaacgtggctaagttcatcaatgtcttaacatcaataatattcaagcttagtaaacatgcaaatgtaatcttctcagttgtgagcccatagttgctaacctgctttcctatttacttaattctcctttttttcatttttttttctgctatggaaatctaaatcccccttctcctttagctttaaattttcttgagattcttactttactaaattaaagtattattttaatccataaagtataaaaatattttaatttcatccggttacctttttttatttactatttatccttactttaaaagtaaatcaatcctcaccattggataccaaaaataaaaattcttaactaagctaagggtttaaaactagttgaggtttctaatccctcaaaatgaagtgaggaattacataatttgtcattgtaataatacaaaaatctaaggcaaaatagaattttgccacttggatatcttgtcaccatgattttcatcttaagatcaaggcttagttttcaacttttcataatcttagattttataaatcaatggaataaaatcaacataaattaaaatttcattgcaatataaaatataaaaaccaatcaaagaaattgattaagtaaataataacacttatacacttatatatatttatatattgtatatgttcaagaaagaaaggtagaagttaaataatttacgtaactttttctttgaaagcaattacggacaacttaaatgtaaattagtaggaatcacatcacatttgtctaaaaatttatttcatccaatctccaagcattaaagaaacactataagaaatagtttaaggaataattaaatctttagatttttttagtgcttttattgataaaaaaactagttccacaaatgagtacattaaacacttatttataatgtttaagtttacacattttgaaatttatacaccctacacatgactgttactatctcttaattgggtatcaataaacttaaatgagtgatttaaaagttatgagagctattagaaagtatctccaataaacaaaaataggcacaaataaaactgaaaaaaacagtatataattagttactagttactggttttttcagctattgtcaattatcttccaaaatattcaaaattactcctatttgttataaatattaataattatgtggat

SEQ ID NO: 47836 - DNA, 3896 bp, Cannabis sativa
  modified_base (3856)..(3858): a, c, t, g, unknown or other
aatgtgagttaagaaataacataaccaatttctataatttattactttaaaaaaacataaatgtatattattactgtatatagttttgataccaaaatcatggcgggatagaagataatcttttttttaaaaaaataaaaataaaaaaaaaattaaggaaatttaacttacaattgagcaccaaaaatacatatggtaacaaaataaagaaaatagaataccaaatagtatctaaataaataattttataataagaaataaacatagaatagtgctcaatgcttaaataaaaaacctacttaattgtatccaaaacatagtgaatatgtaataggaaataaagaagagtatcaaatagtatccaaccaatatttctattgaattttcacaagtagctataacatttaataaatccaagcttattattaattagcgtaatagctataacatataataaatccaagcttattattaattagtgtaataaaattatgatgtatatccattagtattgatgtacgtaatatagttgatggtgtttagtggttcaatttggataccaattagtaaaattataaatagaaagtgtaaaaagtagtagaatcacaaaaacttattttaataaatattaaaaaatataagatagtagaaaatcagcccaaattaattactcattgataaacttaaacaccaaattatattcaaattttgagaaataccaaataaatataatctagattaaaaaataatactatcccttaaatactacttagttaaataataagaaagaatcactaaaaaaatctaatccaactacgtatcaatacaaagaaatagtagaaaaatataccaaaaagtacatattatgttttgaataccaattagtagaaaaatacttatcatataaacttacaaataccaccatatatctaccataaagaacacagaaaaagtttgtgaatgatcccatattgaacacccaaaccttttttttaaaacaaaatatatacagcttttaaacaaaattataacaaaaagattgagttttttttttctttaattgaaacaaatagtgtatatgaatacccaaactttttcttaaacaccatccttttcttttaaacaaataattcagattaaacaccattgttttcttttatagatcatccttttcttgtaaaggagtttgtatactaaaacaaaaggtgtctaaatgtaaattagtaaaaccaaaaaaggaaataaatgaaatgcttaaaaaaatgatatttattgacataaatcagtttcataacatataggtattaaagtttaaaaattagttatttaagttattaaattttgtatggtatattagtaattatttatattataaggtgtgtacatataaatttcccgattcactgcttgacatgatggccttatgcaaacaaatttgttttgtgggcagattcctggagtgccaatcatgtacatcactcagcacaagtattcaattgagcggatgcctgaagcaacaattggtggaggtaagctagacactaataagtgtgctgtgaagctaaaaaattgtattaggaagttatatttgtgtatcttttggagaaagataatgttttagtgagttggattgaatttgtagggaacgagagaagttctgtttgtttcaatgacgctttgtgcttttgttctgtgcagctcctagaatatgatcaaacaacacacaaactatccttttgcacgaggaagaccaaacgagtgagacataccctgtgctgccttgatatccaagcatggcacttttcagttttcgggttgctcttttagtatgaaatctgcaaaatatgtcacaagtgatgatgttttttcatgtataagtttgtctaacagctcatcaacccagatttatcacacaaatgaagtgctaatttttcagttgatcttttgcttccttctcaccaattttctccagctgctcgtatataaaccttgatgtcaatttaggaaatatatttgaaatgagtgctctagggttaaaataaattttattttaataaaaagatgtaaacaatcaacaaaaatattagttcttttattgaaagtatataaaaatcatattaaatatataaatataattataaattgtattaataagtggtaaaagagtaaatggaaaagtaatttattatgttgtaaaatttagtttattgtgtcaaatttgacacaagttttaggttgttttaaatttaaattacattatacatcactatttgagtttaattttataatcattaactaaaaaaatgcatatacactacatttatagtgtagtgctatactttagcactcttaagaagattagtttgagctatgctaaaagtgtgcaaaatttgacacataataaatataagttttttttttaattacacttttacgatttttttttttttttaacataaaatcttcattaatagaaatcattacaaaagattaggcaagtcttgcaaaatcgcaagtcttgcacaaggaggaataaccccaatccacatagctctcactttgttaatcaaagcgtaattggctaagacatgtgctacctcattagcctccctatacacaaaagagacccctacaacagaccgatgtagcattaattgccgaatacaacagactatgccctcgacatcccgacaactgtcctccttagaatggattaaatggacagccgcttgacaatcaaattcaacagtaaaacgttgcaatcgccgttgtatcccgctttacaaaccattttgaatggccaacagctcaacatgaagaggagtatactccttcggcacagcagtagccgaagcaaataggcattgtccttccacatcccgagcaatgcaactgaaactcgagtatccctcaccgcacctcacaccggcatccacattcaccttcacttcagtacgcaaaggtggcagccagcaagctttctgccttgcctccctactgctccccgtcactctcgacccccgaacctcctgcaagtattgcccacaccagtccacaatctcggccgcccttggcacctgcccaccattagttatttttaattacaatattaccattagttattttttatatatttaataaattaattgtagtggctagaggaatatgaggaaacgacaacttgagctatctcacctctcctccactcctagcaaagtcaaaggatggagaaaccttatagatgtatttggcgattttagaagcagcgattagtgtccgagaagatgaaggaaagcaacaactgatttaccatgtttcgaagacattactatatgttgaaatgagatacactcaactggaaaaattggccttaacacttgtcacaacatggcccaagcttaggtccgatttctagtgttgtccaatagtggtgatgacccaatatccactctgtagcattctatacaaacgagaactttctggaagcttgagcaaatgggatgttgagttctatgaatatgacataacatatcaaccgaggacaaccatcaaatcacatgtattggcagattttattgctaatttttcttgtgttggacaagtacaagcaggaaaagaattattatgtttgaacgagcaaactaactcggcatggacactagcagtagatggatcaagcaattacaaggggagtggcctaggtattgtccttacctcccctcaaggagatgttatccaacgggcaatcagatgtgatttcaaacttagcaacaatgagactgaatacgaggggctagacctatccattgagttgaacgccaaaaccattgaagtcactgttgggttttgtgccctnnntaaaacccatttcaatataatcacatttacttattaat

SEQ ID NO: 47837 - DNA, 1028 bp, Cannabis sativa
tctgaaagaacgggacattcatttgaacaaaccttgagtgcattgtgaacgccaagaatatcttcaaactcgacgaaagcatagcagagtccaatgtcctgcacaaatcaattaaatttgtagtttcttgaaggatattaggtaaaatgtctaaaaagtatagaatgaatttcaaccttgcggctcctgatgaacaccccatcaggcttaatgcggccaaagtacttaaattcttcctcaatctcctcttcagttatatcaggacacaagtttctcacgtagacagatttcggttcacctggttttaacgagttcaaaatacggaactttaaaaaacaagctaactgcagtattagccatctcaaccaaatagaagagatcaagttttcaaagcattttgtcgaagtctttacagatcttaatcgaatttacacatttgggtagaaactcaatcctttctcatatgctaaaatatcatacttggaaaattccctagaaatgcaacattaatacaaaaagaagatggacaaagagaaaagaatttaaccttcatcatcaaagccatagccttcatccgctgcctccactccagaatcaggcacaactggcgatggagagtacgattgttgctcaacatactgatggttccaatctgaagaagcttgggttcccgtaaaagaagtttgaggtgcgactgaaggtgcaacgggaggtgcagctggaggtgcatttgaaggtgcagactgccctttggcgagcaactaccaattcgcaatcatttataaacgaaataattaaatatacatactcgaaacaataaaatagtgaaatttaaacattaaggcccaggtactaagtacatacaatcgaagcatatgttttcttaacagattctccaacaggttcttccactgccaccgattgggcttcttgtacagcattagccacagtttcaaatggagcagatgcttcttctaccggactttcttccaccacaacttctgtttccacttcctgttgttgttgct

SEQ ID NO: 47838 - DNA, 1124 bp, Cannabis sativa
tggccaacgaagtctatttttctttttataaattgcttgaggggcaggtcggtaatttggtgttcaaatttaggtttcctccaaaaaatgacaataaagtactcattaaagagtacaaccgttagaggcacgactccttgtagccgtcctcacaatacttaagatcctatttcctaggcaaggcattaaatgcccaggatactaaagagacaaccaaggattcgcatcgtgcggacaagtcacatctgatcagggatgacatatggggtcaagcatgtatcacccatccgagcaacttacagaccgaataagtccacgtatgagcggttgttcccacacaaacatggggacaaatgttatcccaattccgcacagggtgacatggcactcaataagatgactagtggagatcattccaaggcatggacgagttctttgcccccaaatgctccctccaaaagaatctacgctcaaaactagttacgtcagtctccagcaagcatctagactagacttgtgtgtaatgttccgagcagaacgtcattagccaggaaagcagaatcctccgtgtagaaggacgcgatgaatttagattctttatgatattttctttaaatatatcctcatttatagcatcgttaaatccctacatttatgtgatcgattttgtacagtcgagtaatcctagggatttagaatttaatttcctatttatttcttattattttaagtaacaatacttattgtatctttccaataaagagttgagtcattctattgtttagagatttgagttcatatattctagagagcgcttatgctctcaaaatacttgtaagctttcatcaaggttgttgataaactaacttagtcacctcgttatgatcttgataattaatcttgaaagtaatacaacaaaaaaggagtagactattaccataatcacaggaccgaacctctattaatttaattatgttcttattgctcatatatattattttataattattttaacttataaactcattgctttaaaaatttggtgtcattagctaaaagcaagatcaataaaaaagaaattaagaaacaaagttacaaataaattattaattctatttaaaaaa

SEQ ID NO: 47839 - DNA, 1358 bp, Cannabis sativa
  modified_base (1304)..(1326): a, c, t, g, unknown or other
tgccaatttcctctatgcctgatattatattttgtaatgaccgcgaggtctaacagtttctaatctaatataagtacgcttttcttcaaaaaaaaaaagaagtggaatgatggtttagaaacatcttcctattatagtggtcataagtttgaacctaatttgaaccttgtacttcatttattttttttaataaataaaaagtagatacacataaaaaaaaaagaggcaatgggattccaaacatgatctcccatttaaatttaaagcatcttaaccaattattctatttgactactatgtatatatgaaaataaaaattgtatattaatatattttcaaatctcagggtgggcttcaaccctccctcaacacccctaagtctaactatgtgtgtttgcataaatatatcaaggctgaagagggatgttgtcaaacaagaacattagaggcatacaaatgaaaacaaaaagggagcaaaaaaaaaaaaaaattgattccttaagtaataatcttttaaggaaaatttacaaaatttaactaaaaattgttttttaatttgtaacccaatatatttattgagcggtttggattttcattgtattaattcggattgtattttttgtcaatttattcagtttgatttggacggtttattcaagttggggggtttgtgaattttgttgaacacctttactttttacatagaataactctggttatttttacttttctaattggataattttcatataaatttatatttacgaaaaataaaaaatagtttaatacaaatttcttactttaatgacatcatttaatgtaattatcttttacttttctattttttttggaatgtgatattttacctttctaattatcttatagtttaatgcccatttatgattaggtattcaaaaagaatccttttataatctacattatcattttttttaaaaaaaatatattgtaatacttaaatttccaaaatttatttctctaagagcatcttcaatggtaacatttttttaagaatgctatatatcttcacattatttaaaaatataatattttattttatctttcttccacatcatttttagcacatttacttctaaaaacattttaatggtacaatatcttttaaaaatgctataattataatttaatacattattatatatataattttttttattaaactattatatatattgcacatttaattttttattgtaaaaaaaaaaacatagcattaatgccatagtgtgacatcaatacaaatttcaagaataacattttttttnnnnnnnnnnnnnnnnnnnnnnntattttgtcacataagctttccacctcatcaa

SEQ ID NO: 47840 - DNA, 875 bp, Cannabis sativa
  modified_base (425)..(427): a, c, t, g, unknown or other
attaaaataaatattatgttttagttacaagtgactttttattataactaaaagttatatttaattactaaaatttatgtgatgctaaaaggttatcactactttttgagctcattttggttaaaatgttttctaatgtaatcagatataagaaacctgtcaaaaaataaaaaaaataaaaaagaagaagaagaattatgtgtatgtaaagtgatacaaattagaatatttttaaactatttacacaaacaaataaccatgttctaaatttaattatctatagatttatatataaggacaaaattatctcatgaatttgcatcaataataatgctgaagttttattttatcttattattttatgtgatcctctaagagacttattttttctatccttttaaatgcattattattattattattannnttattaattatttaaaaaaatattttttttccattttgcatactgatttttataataatatattgtatatcatcttatctatttctgttcatataattatttaaataattcattttctacactgtagcataagaaaaaagaaaaatacaatctgatggaatctttcttctaaaatataaaaatatatatatttaaaatctccatccccatccccgcttatttttcatctgggacggggtggggactctcctaatataaattaaaataataaaatttattttaaaactttaatatataaaaatattaaattacataaaaattaaaatactacatattatttattattcaatatactaattattatacaatacacaacttaaaaaattatattaatatactaaaaaatacaaacatataaaatataaaatattaataaaaagataactaa

SEQ ID NO: 47841 - DNA, 2258 bp, Cannabis sativa
  modified_base (27)..(43): a, c, t, g, unknown or other
aacacagggtccaatctgtaacttttnnnnnnnnnnnnnnnnnaaatggtatttaccctttattttcatataaatgtaaaagtgtggtggtgatatccaatagtatcaaacaaatttagtagaagaatgaatgatatgtgaaatttagacatgcttggtgtctaagacttgagtataacttaaacatgtttagtgtctaaagttattacataattttgatatacttggtattaaaatgtgtgaggaaatgagaaacagtgaaaactaatcttctatgattaaattttcaaagcttaagtatacttaagtagaaaagtgaccatgtaataatagacactaattttggttagcaagattcgcttggaatcaaaaagtgtgtggttataacaaatcgtttaatctccgtataatattaaaacatcaaatttcgaagatgaaatctaaactcctttatagttttactcatttatggtaatctatcttaacactagtaaaaatctaatttgaagttcaataggtaataataagacaatagagtgaaaaaatagtacttaacttgtcccatctatgaaagagtactaatggtaaaatttggagggttaaaatcgaaagggtttttaatggaaagatgtgtgccttaagagaagttgagagaaactaattttcacctatatggactagaggtggtgttgcctcttatgaagattggacgctattctctagagagcccatgaaatggatgttgcaaatggccattaacggtgcacaagcgagacataatgaggtctctagtgaattctagcaaacatgtgtgtgttatcaccagtttgtattaaaagaatagttgtttaatgctacggcaactaaaatttcaataaactctttggtaactacactaaggtaaaattcaagtcgaagacattttattttatgcatctaagtaagatctctataagagtgcttaatttattacaatgtaactacactaaggtaaaattcaagtcgaaagacattttactttatgcaaaaagtgcttaattaattcaatcaaagtggagaatatatgtaatatttaattgattaaataatgttacaatggtgtgtcacaagttttaaactagtggaggaatgttatattatattgttataatataagatagattaaaatattaaaatgtgacatattatatattaatatgaaattaatgtatataatgtgattgagagtatacatgtaatattcacataaaatgtaacataagaggtggagttacttacattttgtaacctccacaattattaccaatattaagtatgtaaaaagatgttacacatcttaattttaaattcttaatactataggagttatggtgtatgcatgagttagatttaagtctctaacatccatgggaggttatgagtttgaatttcaaagtgtgtgatcataaacactataaatagatgtctttggttcacttgtgaagacacattttttgtgattttctatcaaagaaaacaccttgctagaaactataagcttaataaatctagaaaattatttccatttctttcttctctaagtacttgtggtaggaaaaataaatttttggacaaagatgtaaaactttattcaagttttgtaattctcctacttgaaacttggtgttagtggtgttgaaattgttctcacatctatatatactactatttatattgtgcttttatttattatgtttttgtaattttttctttatcttcttctctatatttgtatattttatcaagttgtaacattattttatcaatattattattcttgtatattttatttttgaattgtattttggtattggtctttctattgaagtactaataaatttccaacactaagatcccccttaaaaagttgtgttctaaaacaatttgatttggacaaatcaattaatttaatttatattaaatatgctaattatttttgttgattcagttaaaaatttaagtttttaataaataaaaaattaactaaggtgttaaacttgatttaaacacccctatttatcaggcatcttgactcagttgtttaatgtatatttacttaatggcgaacaattgcaaacaaaatatcctaaagccatgtgacacctgtgctacacaaagaatgatcatattcctattgacaacactaaaaacaaaaaaaaaaagatggatgacagctaataaagttgttcctgtttctattaagtagatagacatataaa

SEQ ID NO: 47842 - DNA, 1246 bp, Cannabis sativa
acaaataaatcaatctaaaaatttgacatttgtcatttaattatagagaaagtgtaagagagagtgcaaaagagagtctccttagcactcctcatatattaattgtaatctaatgggtaagctatattagaggctcaggatggcctacatgagatcctagtgagattttaaaaattaccttacattaattttaacggaaaagttactaaaattaacaattgcacatatgaagaaattattagatatactatatttatgaatcgaaacagctaaataataaaaaattaatatctcaaaagataaactaggaaagagaaaaaaattactccttaaacctttagaaataataattttcaactgattttctaatttaagtaagggactatttgaagaaaaaataataaaccaataaaaaatggtcttttttatttttacacttctaaatattttttttttgcacttttacagaattctatatagaaattcctattgcaactagcgctgccactactttagaaacccaaatcgtaaatttgaaaaaaaaaaacttagaaaaatagtatatggggtaattcccctatatttttacaattaaattttatttacataaaatacgtgttaatatagaatttcgttaacaataatgaaactctttaaaaggaaattaattgagatcgaatgaattatctttgtagaataaattataataataaataaggcaatgtgagttttaagtggtgttatagttaaacttatatagtctacgagcccatattaattttgattttaatttttttcacaaaatttaagatattcaatattcactgtatgaaattgtgaagatcgttatacttagacatgggattagtgggacacttagcactaattaagttgattatgtgattatttattcatttcatgctttatagatcctattttcatgaaaaatgtttattatgatatttataggtactctgaaaaaattggtaaggttttgatcaagactggatttatggtatttcaaaactgggacagggaggttccggaccatacgatttgggcagttttaggacggttatttaatttaatttttgttgagaatttaattgaggttccttcatagaaaaaaaatgttaatcatgatgtttttaggtactttgcaaaatttggtattgtttggcttagagttgaatgggttatgcaagttttaaaattgggcaatggagtttcagaccgttagatttag

SEQ ID NO: 47843 - DNA, 2500 bp, Cannabis sativa
gaaacaagttaagggtgcatcagtacatcccttttaagggagtgcattatagaatcaccctatattatattatggcaaattaaatattactcgggaattatatttacaccaaaaaattgtatatatactccagtatttttttaaaacaaaaaaaaaaaaaaatctacttaaactaattttaaaaattcacgcttattattattttttttgtttgattttgtaacattatttatgttagttttaataattctttatcttactaagatatattagtatggagcaggatcattagaattcactgggttagcaggattagcaagattatcggtattggcagaatttgcaaggtttgcaaagtttgtaggatctgcaggatctgtagaattggtaggattgacggtattagtcaaattagtaagactttccatagtgggaagaacacggacatcgggattgattgtcataggattttgaggaagacccgaggaagtggagaaagtgttcctggttattgatcagaatgagatggatgaaaatcaaataaaactctcagtgaaagcacaaaaatattgacttgaaatttggtcaactaacaacggagtcttattaattgctgataatcaccatgtgtaaataatgattataaataataaaagtaacatagaaattatagaggtttagcctccttaatgaaaggtaatgacctactctcttttttttttgtatttattcttgagataatacaaggcagattataagctaattagacattataatttctagctatggctctcttcaatattacaacaatgagaattgagtgttataaattcagaacttataagactttgtgaagaaaatagactaagtgtctagtgagtgacggagcgtgaaagactgagagagaggagccatggggcgtgtgagacttagagttcaagtctcttttcatgtgatctaatgccttttatataatgtagggcttacaatatattctaactcaaagtaatatcccctttaaaataagaaaataactttttttttaatcttatatttaaaatacaaaaataataagcaagaataggttgatactagtttgaggaagaatccctattttcataagcagttaaggctgttccgtaattgaaatttagcttaaggaccccactattcatccagcctctcttcgaggctatctgcacatgctggccagccagctctatttttaggacctagtcgacacataggacttcattggtcagcctggtatggtccggccaaagttccttgcacctccaagagacgttgtggtgtgccttggctacgagtcccaacaggagatgacatgcatgggtagtcattcgtgagctagtttgcatacgcgcatgggacagatgcaccatgctcgatagacagaggtctaacatatggtgccttgagggcctagcaacatgcgtggagggcttatctcgaaggcctaccaacatgcgtagaggcatggtgccttgaggattggaccatggacgtatgggagtgttcaaatagtatagaaaggggcatgattagaagtgttggcatgttagcttagtgttggtatcttgctacacatgttaccttggtcacgagtgacaaggtgagtgacggtgttggggttttccttatcatagtggaaacctatggacaaggcgagtatcttggctagagagcctcgatgcatggatgcactcatggatgcttgcgagcatgacttggcaagagttgttcgagaaaaggaagtgtgcacgaggcatatacggtcgcgcgaaaaataaacctattgttacttggatagttggaaggctgaccttggcttagagaaatcaaggttccacattggtattccgctgcctgaaaaggtgagcctgtgacaccatccaaggtgactttgtccgcttattgaaaaaccataccccacatggtttcagttgtctatgtggacatgccacgtaggtaagaattaggataacaaaaatattagctaaacgtgacttgtgttttgaaaactttaaaatttattttttgttcttatttctaaaaatacttcaaaacaacagaaaacaatatcaaacatgctctaagtttttctcctgatgcgagacccacaaatgcaagttgtattcccctccatactcccatccacgtgtacatgaacgacacagtcacacttgggctttctctgatattcacggtcattgttggatcaacttccatctcttttcgtgaaagaatctgctattatatgaaacaacaaaatatgggctcgtttggtacgccgtataagagtcgtattgtattaaataattataacactatgtttgcataaaacaatgtattgtattaattattacaaccaaattttttaatacaatgtatgttgtattatttaatacataataaacggtatgtattagcttttattataatatttacaaatgatttggggtcaacaccaatccaaccc

SEQ ID NO: 47844 - DNA, 1374 bp, Cannabis sativa
aacctggttctcacaaaaagcacaaccaatacattttaaaatttgtgcttggaaaaggaacattgtttgaacaactattgctgtcacataggtccgttgaccatgattggtggatttctcacaagaagtgaacaaaagaagcatgcctggaagctttctaggttttcagtagctctttggccacaaatttgggaaaatcctattactaatgactctgggtagagagggcattattgtggtatcagcggaaacccaaccttgcctccttgaaaggagcccggctagtgctttgtcccacaattaatgtccccctcattgatttaagtaacgcagatttaccacaagctataatttaaacaagtgaacgagaatttgaaaacatccaaacttctcaactcacttggggggtactatgcctagtcgtgtgtggctcgaaaaacatgcagtgcattatgtttgcttacttcatcaggacttttattacacttttcatattaaaccaaaaaacgagatgtgttttcaacaaaacttcccaaggaaaagatgcgcttgaattctttctcgaggttaaaaaattaaaaattagcataagcgtcgaaatgagatgcgttttcggccaaatttcctaggaaggaaaacttcacctaaattcattctcgataatttttgtgggtttcctaaggtttaatttcttggtatttttcaaagtgagaacgagaaggcggcgtctgaacccctatgcgtttttagccttgtattgaccacaagatactacctaaaatccataatggttacctccaattatatatgtggccctaggggctaaagacttttgttgataagggctagagtaagaaaatctgcttgagtgttgtcacagttttaacccaattcttggacaaggaattacacctagaatctataacatttttaaccatttcttccagaatcctacttaacaaagcgcaagagtcagggaacgcttggaatatgaaagctcacccttctacaaagaaagccatccatgactagcactccatgagcaatggaatgaaagagtaattaactatcctagacattcaaaaagggctaaggttccgcaactatttgatggttcagaaacagttcgaacgccagtttctaaggtaagaatatttaattaatcaaagtttgtaatgactaagaagggttataacaactacaatcccacctaaaaataggagataagagtctttgaatacttcgtaaatcagcagtggaattaaaaactgagtaaagtctaaggtttgaagtgttggccattggaaccacaaacttcaaaacaacctaaggtgacaacccttaaaatggtctagcaagctaacgaagcggaag

SEQ ID NO: 47845 - DNA, 4024 bp, Cannabis sativa
aatttttttttttttaatcttaatatatatttttttttttttaaatatacatttattttactttagcttttcgcataacagttgaaaatacatttatctaaactacattttatttgtgataattttcttaaaaaaatttatatttgatttttttaataataagaagaaatttaggagaaaattagtaaaagttagaaaataaaaaggttttacataataataataatattaagaaatataacgtctctaaatttttaaaaataatacaaaaatataacgtctctaaattgttatgtctcacatatatgttaattagtttatcatttttaacaattaattgaaaataatatgaatatgttataggatgttggcattaaatggaaataaaaaataataaaatattatttaaaataataaaataatattttgaaaaataatatttaaaatattatttatgaaataaatttaatgacaaataaaattatattgataattttgcaaaaattcattatatttaatttagtggtatactacataaattaatatattaatgccgaataaatatcattttatgaagataaaatatttatacaacaaggtctattctaaaaacaatacaacaaggtttaaagccctccaattggcaggacttgtaattttgttgcccataatatggctaagtgggccttttcccacaatttggttggtgatattccggtattcaccatccctttgaacattttatgtaatgaccacgaggtctagtttgttgattaatcaaaaatgcttttaaaaaagaaaaaaaaaaaaaagccctccaattggcatggacagtggtgaacacataaaatacgataaaatgggagaaattttataaaaatactgtgacaccaagttttttacatttttatggtaccaacttaacaaaaatattatatttaaagttgtaaaattacaaaaatactgtatttcagtaaaataaatacagtatttttattgaaattagcacaataaaaaatataaaacactttgtgtcacagtatttttgtaaattctcccttattttacagtatttttgtaaattctaaaaaataataaaagaaaaccttagccttaattttatggggtaaaataaaaaataccttttctatttatcaattaattaaatctacctttaatttatatttaattgaaacatacctctcatacctctctttatatgttttatatgtaatgtactgtacccaaaataccctgatataaggaagtcacatgaaagtatgttgaagtgacaaggaaaaaattggtaaagtatattaaagtcacatggtttttctagctactttttccaggacaattaggagctaatagggaatgatatatatgaaacagtggattcttttttgactacatggaacattttgaaggagataaactccacggtgcttactcttatccccaaagttaagtgcctgaacacagtaaaggacttcagacccattgcctgttgtaatgtcatatacaaaattgccactaaaatgttatgctcccggctaaagaacatccttcctagccttattgctcagaaccaaagtggatttgtaaaagggagactcttagctcacaatgtcatgatatgccaggacataataaggcactatgggaggaggaatgttaaggcaaactgtatgattaagctggacctgcagaaggcatatgacacaattgagtgggacttcattgaagaaatattggaggccttttagtttcctaactagttcatcagcttaaccatgaactgtgttaggactccaaggttctccatcatgcttaatggtactctacacagattttttgaatctagaagaggtctgagacagggagatcccatatcaccattgctctttgttatgggaatggagtacttgtctagaataatgcaaaatattggagatagggaggatttccaattccatgaaagatgtggtggactcaaactcaaccacttgagctttgctgatgatatgctacttttcagcaaaggagatttcaaaagtgtctacctcatgctacaaggattgaagttattctcttgcacctcaggtttgcatcctaatcctacaaaatctgctatttatttcagttgtatgcaaaatggagaaattcaaagaatattggatatgtttgggtttagtaggcaggatgtacctttcagatacttgggtgtcctgatatgtgctaaaagaatctcagggcaggattgtaaattgctggatgagaaaatgacttcccgaatcaaaacctggagctccaggaacttatcttttgtaggtagagcagtccttgtgaattcggcgttgatggcgatccattcatattggagtcagataatgatattgcctaagaatgtggttaatgagattgaagctatttgtcgagccttcttgtggaagggacagaacaccctgaatggttcgagtctaattgcatgggaatctgtttgtcaaacaaaatcagaaggtggtattgggttcaaaagggtagctgaatggaatagagccgcaatgttcaagtatgtttgggaaattgcaaataaagaagataatatgtgggttaaatgagttcatagtgtgtacattcgggaggaagattggtggggctacaaggccccatcataagggagttggtactggaataaggtagtggaggccaagaaccaggttaaagacttggtagatggacatcagtttacccaatccaagtactacatctccctcgggtacaagctacttgttcctccaaatcatagagtccattggagtaatgaagtttgggggaggctcaacactcccaaaactagtttcatcatgtggattgcaattcaaggaagattgagaacaaaagagagacttcacaggttcggaattattgatgaccccgtgtgtgtactgtgtaaaaatcatgctgaaacttgtgagcatctcttcttttcttgctctttttcaaggcatggacttcaaagaatcaaagattggttagggtggaatgcatccactttggatatcacaagactcacctgatggatagaaagaagcaaaggcagcaagttcaggaaacaagctctcggctactttgtcaagcctagtgtaccgtgtttggaaggctaggaatgatcaaatatggaactcgaaagtaggtaatgtagacagagttgtatgtacaattaaagaaatggtaaaacaaagaatatatagcattttgcctaagaaaattgggcaacaagagttggattggtttagatcattgtaagtttgtagagttatactcatattgtgtattacatacgaagttttgaggtccttcaattgggatgctcttaggttgtaaattggtttattggagtaatgaaaacactgttgattcataaaaaaaaaagagataaaaatgatagactttaaaaaagatagtaaaaataaaagaggacaatataaaaaggatataaagtttaattttcaatctatgccaattgaagggctatagaccttgtggtatttttttagtatagaccttgtggtatatattttatcttcatctttatttgacatttattatattgaaattagtgatagttaaattagttacaaaaataatatatgatccgtgtcaatgaaagatgttattatatatctgtccagtcatgcaaaatttaattatacacatcacatttattatatttttatccacatatatgatccgaatcaaaatcacacacactagaagtatagtgtatagtaaaccatacttagcgttccatattgaaaattcctattactttaatacactaccaatttgttttatttatatggcatgattttaattctcttgtacatccttacaaaattatacattctccatatgaataagaaattttcatataattattaatgagcaatttgcggcgaaacccccttatgttttgatttttatacacttaacccccttatctttatttttggtggcaaaa

SEQ ID NO: 47846 - DNA, 706 bp, Cannabis sativa
gagatgatggacaaagtcactaccgtttgtagaatgagtttcggggaggtctatatgggaaggaacaagctgtcatattcgctttacatgattatagaggaagaagcatgatttaatgactcacaaagatgttgacatctggagcaggtagaatcatcaattatatgcctatggtggagaatggcagcaagatgtaaggtattatgaatcactcgccaaataaaatttttaaccttccgaggcaattttagacgctaaaaccttgaccaccagctagagggggattgtgatggcgaaggactgaagcttcacgcaaggaggtagcaagatggtatcctaatttaacagtgtaacacccagtagcagtatgatgccaaataaggcaatccttgggcgcataaagacttagtggaatctgaaggatatggttaatagataagacaattagtgtatgaaaatcatgttcataactattgcattcataattaaaaataagaacataaacaaaattaaagaaagagaagaagaagaagaagatgatgatgatgaaaaaatactaagtagttgctattaatgagtttttgagtttagaattctcaaaacgtactaaaaagatttagggtgcgtttggaaagccacaatgtaattagatttgtgtgtaattggaggtaattacacaatttggcatgtttgtctgaccatgtaa

SEQ ID NO: 47847 - DNA, 604 bp, Cannabis sativa
tgcattttacaagcaacaggcctttcctcgacacaacatgcccatcaactctcatcatggcaacttcagaggaggtttttcgagaggtggaacctatagctctcaatttcctcctcctggtttctatgatcgtggcatgcattcccactttggtcgaggaaatggcagaggcagtcctgctgtgaataaaccacaatgtcaaatctgtcttaagtttggccatactgcatctgaatgtttttacagatttgacaaaagttttacaggtgtctcaccacacattcaaagcagttccaactctactccatccaattcagcacaagctcatatggctgccaattacaccagtcaagatcccaattggtatcccgactctggagccaccaatcactgcactccagatgctctcaatctgtcaactgcagcagcatataatggtgctgaaaagctttttgtaggcaatggtacaggtttgtctattcaacatgttggtcattctacattttccactccaaatacctctaagtcttttctccttaataatctcttgcatgttcctgaaattacaaaaaatttattgagtgtgtctaagtttgctaaagac

SEQ ID NO: 47848 - DNA, 1855 bp, Cannabis sativa
taaaaataatgctacatttattataaaaaggaagttaaaactatatttattacaatatttgtaattatactttaataaacaaaatattattaataaaataaatattttaaaaatattattgataacaatataatgtgattacaaaatacgtaccagtaattaaaaaagtgtgcgtcaaatttaacacaagctaaatagtaaatactaaatataacactacatcactcatttaacattttatcaaacatgttctaactttgtcactcactgcaaactttagtgcaatattttttattaatttaaaaatatcttttaggattctttgtaatgtaatatccttaagttgccaagtcattatgatttgtttataggaattaagccattgatatgatgataatgtcattatgttttgcttagaaattaccaggccaccaactctccttaatccctttttccttgtccattactatgctttaattagaggacattgaagtcatcaaaatcttgtgtatattgacattattctacacttgtaacatattttactttttttggagaagaaatatctttcttttttatatcatttttttgggttttagttatttaagtaataccaactagggaaaagttatttggatttggaatttcagtactttgtgacaatggcacgaaaaagaaatccattatcttaaaatttggcttgtgattccttcatttatgtgatagttaagaattttgtttagcaagttgcttggagacacgcaaatagaaagaaaacaaaaaagttgatgccttattgattattatttgttgcatcagattttttatttattttttagttgaatttggttagaggtaattatatgtaatagaatggaaataaatttacttttattatctcattcacattactattcattcctactactattcctatatttatgtaatgaaatgcaataaaatagaaagtaaataatttttattttatttttttgtttagttatatattttttttttgaaatttccactgttattaaagatttgcttagttacattttaaaatatgaaatgccattttaattgaatatattttccaaatagaataactatttcattttgaaatgggaggaatgcaagatgagaatttttttaataatttatttttatcaagtttaaatttaatttcattcctatttctattttaatttctatatttttattccttccaactaaataatacttattccattggcattatatcctaatttgactttaatatataaaatgagatttgtttagtgaaattagaaagccacactgtaattggaggtaattacacaatttgacatgtttgtctgactatgtaattacactctaactgtgtaattggaagtaattgatgagttctaattacactcttcaattctcatgcccctatgagaattgaatgtaaatacacagtgtaattactaaaaacttttcatatttaacattagctactaaaaaatattattttctcatgtaattattaactattttgtcaaacaaggtattaagaattcatatgtagtgaccacctcatatctaaacacactttacattataaaatatagtgtaatgtaattactaaattttttaattaccttacctagtaattatacaattacttctaaacacactctaaattttttttcctagtgaaaaatatgataatattatgataacaaagccacgtacaaatgtaactatgttatgcaaaaggtgtgtatatgaaatacatgctttagtaattttttttttttttagaatacaaagaatcaaaattacctttaaaataaggttttttttttttttt

SEQ ID NO: 47849 - DNA, 800 bp, Cannabis sativa
tgccatacatcaagcctagatacaaaacacttatcagcgcttggctgtttgacactaaaattaacaaaaaagcaagtaggtaaactcgatgacttagactgatgtttttttatgacttgagattgaccatgatgagtggaggatggaggttgttgatgagtttccagtctgtataacccgtctctaagcactccttgaagcaccactttctgtgttcccttgtccttaaccaaacaaacatcagaatgaaactcaagcagtatgttattgtcattggttaatttggatactaattaagtttttgacaattttgggaacatgtaacatattcaacaactgtaattgattaccatcattagtgtccaaactaccactaccaatatgagatacactgagtttagatccatcacgtactgtgactttttccttaccaccataggattgtttttggtttaatacagctgcatctgaagtgatatggttgctggctccactgtcagcaaaccaggcatcactttcaagcacttctagactggccacaaaggtattgtgattagtttgtgtagtcttgcttctagtcttggcattgttggggtcagatcccataaaattttcatcaaatctgttgtagcaaactacagcagagtgaacatatttgccacaaacttggcagcttggtcttgatgtgttggtacgacctcttcctcgaaagcgtcctgtactgccacgattccttgagaaacgacctccattgccaatatactgatgagtgcctcttccacaacttgcaaagttccctc

SEQ ID NO: 47850 - DNA, 681 bp, Cannabis sativa
caatataagttatattatttaatacataataaatagtgatctgtattagattgtattataatatttacaaagtgaagttaaccccaatcttcgacccggacctgggatccagtcctgaatttggacccgggacccacacctagacgggaaacccagacccggtcctggacctaggacctgacccgtaatttgtgttggggtcgagtgtattgaaaatatattgaggaatacctcaatataatttaggagaattttcatggatgaaaggcttagaggaaactaacacatccaatgttatatgaaactaacatattcctctatataatgttatattaaattaacacttcctattgaatctacttttatgttttattcttagttttttcttctctttcaagataggagtgatagaaattactatattggtatatatatatagcaagcataatttcttcttaacttattgggagattgagaagtattgtagacagctgacaagttaaattgttccaaaacatgaattgattaaaaatgcaaaaactatagcagaaattgtaaaccaaatttctacagttgatattacttttcagtctatgataattttcacattaaatcagtagaaatcaccaactaataaagcatatagtattagctatatataaaaagatcaaataaataaaa

SEQ ID NO: 47851 - DNA, 688 bp, Cannabis sativa
atacatgcatataaaatctagggtttttctactgaattgcatggtgaaaataacctaaaatagaacacatattttgactctaaatttcttttaaccctaaaaattagcaaggaaaattctcgagattaatcaacaattagtctcgagaaagggaagaaaccatctttaagagtcagccaagtaaggttgatggccaatcaaccaaaccctagattgggccactcggccatatgaagaaccatggtcactcgaccatgattttaacaagtcattcgaacatgcacttgagaaagtcacttggccatgcacttgagaaagtaactcgaccatatacttgaggaagtcactcagtcatgcttggacctaggtcactcgaccatatacttgaggaagtcactcagtcatgcttggacctaggtcactcgaccatgaccattcaagaggtcgctcggccaagctaagggagaatgtcactcagtcgtacttggcactgagtcacttagccaagatgaccttgaagttgctcgaccatgtgccaagcttgcacatcacccgaccatgctcttgtcaatgacacaaccatgccaagtaggaatcttcccaagtgttgaagacgaaggcaatgaaagtacaattgcaaggacaaggcgtgcatgcaaggtgggtacaaccacgcctcctacaagtt

SEQ ID NO: 47852 - DNA, 1761 bp, Cannabis sativa
gagccaatcaattctcgccctttgcttccaataaattgccttcctagtcaaagattcattcagtaactgacgaatatcacgttcctccttccaatcccggcctccagcaggtaacttctggaggcgatcaagtttctgttccaggtctttgattacccagtccagtttaccgaattgagtcctattccactgaagaagagccacacgagtagctccaatcttcttgaagacactagcaggagcccatcgatgctcgaccgtcttccaagcattggccacaatcagcttactcctctcatctctcgtccacccttcctcaaatctgaagcatcttttaaactttggcgggggcccccccgtgtcaagacacagcggtctatgatccgagttgcacgtgtgagaagagctaaggacagcttttggaaataattggagccaactaccattcacaatgcctttatccagggcagatttcacatggttactaccagaccgatggttatcccaagtcattttatctccttggatagtcaagttaatcaaacctctagaatccaccaaattcgaaatgatagggacaaacgggtcccttcccttcgacccttcacgttccgagtgactaagaacaaagttggtatcgccaaagatcaaccagggacccccaaacctatcccctaataccataaggtcggcccaaaattttttcttagcatggaggtaaggaggaccgtaaacacaagataaaagccaagggtgagtaggggggtccgaatagaccaagcccgagatatggttacgagaacaagagacacattcaaaactaaaaccaatcttccaagccaaactaatgcctcccgcagtgccaatatgcggaacatcaatattaaaatagtagtgtagggatttaagaatacgtaccagaggagttgcatccactttcagttcagtcaggaaaacaaaatcaggagagcgcgatctgatcagggtcttcagctcgcgaactgtagaggtctgccccaaccctctacagttccaagctatgcctctcatggctcctgtggaggagataaaacatcctcctccacaggggtattagagtgaattgacaggctggagtccgagtctttaatcacaaaagatccggccagagggttcttcaaaattccatcagaaaagctcggagagctagagctatcctcagacggttcatcatccaccaccttagactcaagatccggccgaactgggtcccaagggaaatcacgaactacctccgggtactttctgtgcaccttatgaggtctagtgcacaacgaagcagagccttcaaacttccttttctcgaacggagtagttctctcatttgtctctgaagaaggcggaaaaccaatatcaccaccaattttctttatttcaaataaatccaaccttccaaaatgctttagatcaaagagcaactgttcttgagcattgaaaaaactagccaacgccctctcctcttcatccttaggctcggtctcattacctcccacgaggcctaaagagcttccttcacctataataggtccaccaatcttcaaaggagcctcagaattatccactgttttggtcaaagacggcttgataaaacaagagggaagtgggctcacttgatcaagaacttcaaacttgtcattgggctgagaagataattcggcctcaagccttttcccaccagagaaaccgtccccaggcccactacaatcgggcaggcccactcca

SEQ ID NO: 47853 - DNA, 1833 bp, Cannabis sativa
cataacacaaaactcataaatttttcacacaaaaaatatagttcttacaatctccccctagcttaaaaaattatgatgaatgaattaattaacacaatgtaagaagataagcaacagaaactacaacaataaaaaataacatacaccgagtatgactacataaacaaccatgagacacacacataatttgccacacataaagatatggttcctacattcttcccgttaaaaaattatgatcaatgcaacaacaacataagaaagcatgattaatggttaatgaaaaactaacaaaaactaaaaaaactaaagatgttaaattgtcacataataatcaccaatacaaccaatatacaatatctcccctcattgagcataatgaaacactcccatcatggaaactccccctgggtagatgatttgtaggttgataacaaaagggacagtgtgttcactctgaacaacatcaagttgctccctctggacttgactgctttgtcttagtccattccttttttcaacaagtttgttgacggtcttgggaacactcaaataaaaaggctccccttaaacactagctgatggaaatgaacttgataaatcactagtagtgtgtgtagcagtagagccagaaacaagcaacttagttaaggcatgaagaacccaccatgtgacaatttgagtgcacctcagtaagtgcatactcataattaaccaaggatatttttccaacaaccatagccatggaaaatataaagagcataaaaagactaacaattttagagagttgaaaccaacctctagactttattcaagcacaaagagaaagaaaatgaattacaacatttgaagacattaaatttttttcaagaattgcagccgaaagaatcttaattatgcgttcttgatcgattatcaagctttgatttgtggaaaaattacaacaaatggtgcaaaatcaaataaactaaactttaaaaaatcaaacgattaacaatgataagattaacaaacacaagaagaaatcagaggaaaaataggaatgaacaaagtatgaacaaccataaacaattaaagcagtaaaataataaaatcaacaccaaatttatggtctcaaacagtctttaaggcaatggtaccgcaaactttcagatgcattccttcaggaaggttttcatcaatcaaaggtcgattatactctattcacaaaaggcaccaatgactcccttattgctctttttgtgtacgttgatgatatcatcatcactggacccaatctgtctctactccacaaaatccaggagtcactcaacaatagattcaaccttaaagcacttggacatctaaaatattttttgggatttgagattgcccgatccccagaaggtctcttcctatctcaaaggaagtatacaatacaacttcttgaagacacagggtacataggcagcaagcctaccaagactcccatggatcctagactgaagcttgatgatgaacaagggggaccccttgataacccctctctatatcgccaactgattggtcggttgctttatttaacattatataggccagacattacatacatagtcaacaatctcagccaattcatgcccaagcctcacacaccgcacctttaagctcataatcatctcattcgatacttaaatggtagtccacgataaggtctactatactctgcctcatccaaattacatctacggggatttttggactctgattgggcttcatgtcccaccacttgacgctccacaactggcttctgtgtgttcttaggtgactatcttctttcttggcgcaccaataaac

SEQ ID NO: 47854 - DNA, 1199 bp, Cannabis sativa
gtaccataatttctttccttttaatttgactttataaaagaaataataattatcttttttggttcatggttatcattaatatatactttgtattttctcaaaatttgacaaaatattaatattattggcttttgttgtagaacactgaaaactacaaatatacccatacatacttatacttaaaaatcataagttttttagggtcaagaatacaagatcatttatacttgctaatgatgagatcgagcatcacctattttacaatatatgatttaacttccaaactttattaatagtaaattaaacaaaataccgttataatcaataaaaaagagataatgagttgtcgagttcatgatatattgaactatttgtttttaagattctcttatttattctcttgctaattaaagaaaaaagactacaattaacattcaatgattcacgatgatatgttgatatcaataattattataccattcccataaactcaacctctatcgcgtattaatgaagattcgactcactttgcatcatatctaaacattactaaaccaccatatctactttcactcactcattatttttttctttttgtaaatacttatatttacttttgtggtattagaaaaatatcaagagagtaatgtgaaggaatattggaagtaggacccacatatatttatatataaatatatagcggtgactgtatatatctaactgtgttattactgggttctaggtgtagccaacaaacctagtcatataataatacattttcaaaataataataattgcttaaacagctcacgtggccaatcttaaggtctgatctggatatgatatgtgcatatatatatatatgcataactagttttacatatattacacccgcaatccactgcacaaatttgaaatgaaaattatgaaactatgatcccttaagcaaaatctaaaatggttttcttccattaactgtttaaacttgataattaatcagcttatccttagtgttatgtagatttattatttaattatatagttcatgaatgtgattctactaaatttatctcttttattagcataattgcatctaattatttatgtataaatataaataaaagtaccaaaaaaagtcttaagtggcatcctaatttttttcattatatttttaaaattttatgagattttcataattt

SEQ ID NO: 47855 - DNA, 1142 bp, Cannabis sativa
ccgccgattccggcggcggcggcggaggtggcggcggctccactgtttgagtactcttcttctcaacagtctctgtcgtgttcggcggcgaaacgggtttagcccccgaactattcagactaacctgaccggaaagtttcaacctttcgccgtatcgtttcgaaacgcgaacgtaaagtggtttcaccatttttaaatacttctgtacgacttctttagcgaaacgtttctcgtctgttgaaacagaaggcgtttcgttttcgttgctctgtttttgagacttgttcgaaactgatcttgagctgaacagagatacaataggaacttcttcgacctttaatttaacagtgaagaactgattcttttgggatttttgttgttgggttttttccggcgtttctttttccttctgtgccgtttcttttgtgatctgctctgttttgtcaactccattgttgtttgctaaagcatttgatttagattttttgagacccaacataaagactcgaaatttagttgctgatttaagcaacgaaactgggaactgagcttgttgttgtgttggcttcatcaagttattattattatcattagccttagcttcttcttctgatgaagaagaagaagaagaagactcaatggggactagcttacctttaaagaataaatcatcagaaggtgaaagagctagattagtgtccgtacgatcattgctcgaaccagatgagagtgtgaacttaaactctctctcttcttcttcttcttcttcatcatcatcaatggcttcttcttcttcttcttcttctctgttttgggtattaatctcttcttcttcagcttcgtcttcttcgttgaccgcgaactccaagtcaaagaaaggaccatcatcatcaccaccaccaccaccaatgtcatcatcatcatcgtcatcgtcgccgtctatttccgccgtgttttcaccgacggcggtaacaatcgtagcaactgtagaaatgggtctgttctgaacaacatcaccgccgttaccaccgccgccggctcctctccaatacttaagtaaactgaaagcttccattgttgggagagccagttatacaaaaatggtgaagaaatttcaaacctttaaaaagcctttctttttt

SEQ ID NO: 47856 - DNA, 1832 bp, Cannabis sativa
tgatgaattataagaataagtatatacatttctagagttaatatttatatatttattgttaataaattgtatttcaagtattttaaagttgtcatttaaattctcgtactgtaactatatttgtacttcctaatcacataagtaaattgttttttttttaaaaaaaaaaaaaaatcatgaacaaaatataagcagggagatatttaaaacgatttgtataattgagggaaaatttttacaacaacaaaatttagggggtgttggatcatagttcaatggaaaaaaaatcatatttatcctatttagtcaaactctttatcattctttattgagataatagttgtaagggtaaaatttgcaaggagatttttcataaatatgaaaaaaaaaaaaaaagtttatttttacatttgttgaccttacttttaaccaacaacactgagtctttaaagcaataaaattatgaataataactaaataaaattaagcaataagaaattaagaatactagaataaatagaggttcgaccccatgattaaggtaataacttactctccttttactttaagctagtttcctataatcttcttcttcttgatgtgtgtcaatcccagtatattaaggattgattgaactataaatgtgaatacatttatagaaaatatcattgaagatcttgctcagtcgcgttatcctactcgaaggatttggcttcactgaatggtgagaacctgcttggacagtcgcatacatactctgttcgaatcttacttgctgaaggtttaaacttaaacagtttcatgtaaaactctatggacagactgttagaggacaacaatccatccaggctttggaaatgctctccacatgtcactcttattaaatgccacattatcctatgcataaattgggataacatttgcccctcaaatctgcatgagaaccatctgctccaacgtggacttactcgaccacaaagtttattggacgggtgataagttgccagagaaggaaaataagagccaggaggaataaggcctgactgagcggcctatattgataaggaaagttattcaggaggttgcacgtcctaccgtgcaggttgttgctgggaaagggaaaggggttatcaaagaagaactgaacgaagattcttcagatgatgatgccctttcattcttagtccgggaaggtgctcctctggagatctagggtagaattttaatagtatttttttctgcttcttattatgtatttttttttaataaatattaaccaagtttttttatctgtacaaccatgtcttctaagctcgaagccatgctaaagagaaaggctagaagctcttctgggcaagaaagtccacccaaagtgtagaggaaggaggagaaaacttcttctaataagaatcttccccaaattctacctccacctccttcaaccaatgaagataacatggtgataattgatgtcactcatcttgtagtaaatactctggtccaagccaagaagaacacctgacctcctcctgcccctccaagcaagaaatcaaaagacaaggcgcttgctccagtttcccctaagatgaaaaaggcaaaggaggcaatcacttattattaccagaaccgtgttcagcccaagttgaacgagaagttgaaagggtcagacataatgcacattgagttcttagttgctgaccttctgaaggatcacaccaaggtaattttttttcctttcttatttttagtttggattatgttgtgttggttttctaacttgtctgttatgctttaaatgaatcttcagctcggatatttgtacttccgcacta

SEQ ID NO: 47857 - DNA, 926 bp, Cannabis sativa
ttaaacaacatacttgtgagtggatctaagatcctggtaaaataaattccaacaattattgcacaagaaaagcttatcaagtgaaccaataagatattaggccagattggttgccaagggattcaaccaaagagagagggtgtagattttttaaatgttttctcaccagttgtgaggcagacattgatgagtgataatggccaaagtgggaaagtaaaatctagaaatggattaaatggatgtcacgcccatcttcttgcatgaaagacttaaggagaaaatctatatggttgaactagaagtgttcaaaagcagccatcctaatcaggtatgcctactgcataaatctttgtatggccttaagtaggcaccatgacagtggaatctaagatttaacgagttcagactcacatacaaagagcatcttttatccatgtgtctactataatagctccctatacttattgttatatgtagatgacattctgatcataagcaaggacagattagagattgacagacttaagaggtagttggggtcagaatttgagatgaaagacctaggtgttgctaagagaattctgggaatggacattataagatcaagaccaaagtacttggtcttaccttagaataattaccttgaaaaagatattgagcaagttcaacatgatagaggttgaaccttttacagcacctctaacacctcacttcaagctatcacagccacatgcacccaagacaaaaaaaaaaagagagaaaagacatagataagataccatgtgcttcatgtgttggaagcttaatgtattttatggtgtgcacaagacctaatttagcctatgcactaagtgtggtttgtaggtttattatagatccagggattgaacattgggaggttatggactctaattatccagggagtt

SEQ ID NO: 47858 - DNA, 1477 bp, Cannabis sativa
aagtaaatctgattatataaaatgagttttatttagggcataaaacccaacataaatcgccatagattccccatggaggattatatacacagggtagaccaaatagttaggagccctagtaacccgagactccttcaaaaattgtcaaagtagaccctttgatggtcatgttcatacctgaatttgagaaatatggtagcttcattagtcataggagcattttagcttttgctcggggacaatcttatagaactttactgaatcgttacacccacgcacaagcttcctcactagattctcttttttgctgtttttattgtttattaggattgtatgacttgccgtgacttttcttttttactcgtactactgttttgttgcacagacacaccaggatatgtgatattgaagtcttggaataaccagatctcatctaccatggatgaggcaaagaaatcctaggagaagggcaagaaaaagaccaagatcagggcttccaagactcgaaaaccacctccccctctgtcttcttcgtcatcagacatatgggagatttctcctacagtcaagattgggcttaccatatctagccattgtgcatcgactggtggggggaagaggtctggcacctcctggaaggtcctgaggtccttgctgctctgggagagaaaccctttcaagttattttccttgtagcagagatagtcccggacactacaccaaacgtgggggttttgatgatagtatggacaaacttgtctttcccccaaaggggattctagctaagtctaagcgcaagggatcaaggattcctcctaatcccagcgtgaagaaggtcaagtctttggtcccaaagttaggggcaactgatatactgtcaactaactctccattgccacaacaacaacaacaaccacaacagcaacaacaacaatcgcaaccacaacaacaacaacaacaacaaaatctaccaccatcatagtctaggtgagtacctttgccacacaacagcggtctctatctcctcatcaactacagattgtggcatctcagcctattccacacccatcttagttttatttctccacaacttcccgagtacaccacttttgggtcagccttcgctgacccatgataactctataccagttattttttatgctttaaaattggaattattgtgaggagagtagtggaaatgtgtttgattgcttaattttaagtagttttagtttaatttctatttagtaagctaacttttgagtcttgtcaaaattattgtgttttcttattaaatgttgcttatttgttgtggaaaagaagaattaacttgctaggaaaaaggaagtgatacaaaggaaaagttcgaacaaaagctaaaaattggatagaaatactgaagcagtttgggaagtgacgtggaaaaaatgactttcacttatccacatcagcaattttttctgagtcactcagagta

SEQ ID NO: 47859 - DNA, 872 bp, Cannabis sativa
actgtgtacacgtagacattctaatctgacatttaacacccaaaaatagatggaaagggctaagtgctatcagaacttaagtttaagaggttttaccaccaaaattttaaaattagaggttagttacaaaaacttaaacacttaaagagattatgccgcaaattacccttattaaaacatagctccaaaggaaaatggaattgtttaatacatatgtctttgtgatttgatgaagacataatagataatatatgtgtggtcctatgtaccgcatatctacacatctcaatcatacaatcaaattatttgatttaatttacagacacatttgtacgtacatcgcaatacaactggatccaatcaattaatggaggggaccagtaaacgtcaatggttgttagttatttaattaattacttgaagagtcctagctagtaataactaaacaaattgagatggaaatatattcatataatgtttcatcaacttcgacgtattcatttgaattaatgttatacgtttttaattgagtcactttcaatttctcttgattttcttttctttctctttttttaagaaacctttatgatttactgtcgtacaatttaacggtattatgttgatatttatgtaaaaaaaattaaataaaagtacgaaagaattaatcatataaaaatattttcaattaaactggataaaattaaactgtgatattcgtgtgggtttggagagtatgtgcacagctgttgttgctaggaatcatctggggagggtggtttctattcacacggctcgattggaattctcggaagctctttgtggagaagcggcagcctgttgcttggcagtgtcggttgccttagatttaaagt

SEQ ID NO: 47860 - DNA, 1108 bp, Cannabis sativa
aatgaatctaagaaacttacccgacctgaccccgaaggaatactttaagggattgagtttcatgttatatttcttgaggattttgaagcattcatccagatcctctatgtgccccccaacctttctgaatttgacgagcatgtcatcaacatatacatccatgttacgcctgatctagtcctagataatcttgttgactaacctttgataggtagacccaatattcttgaggccaaattgcatgaattcttagtcaagtggatgaattcttatctaattataccccaaataggcgtctataaagcttagaatttcatgttcgactgttgcatccacaagctgatctattcttggaagtggaaaacaatcttttagacacgccttgttgaggttggtgaagtcaatacacactcgtcatatttttcttggcttgggtactagtacaggattagccacctagactaagtagaaagcttcaataatgaatctatttatgtagagcctttccacctcatcctttagcgcttgtgcttgttctttgtccagcaatcatcttttctgttggacgggacaaaagtctggatctatgttgagggcatgagacatgatagttggatcaatcccgaccatatcttcatgcgaccggacaaaaatgttgaaattttctcttagaaattttattaaagctaattttattttaagaaacaaacctttgttaattttgagcttcctggttggcatggtgggatcaatctcaacttcttctagttcttctaccaacccaacatttttattttgttccccaaggcgggggtccatatcttcgtccctgccttgggcaaattcctattgggaaaagctattgccctttttagaactttgactagagttttcctcctttttggccttagatagagcaaggttatagcattcacatgcaattttctgatttccttttagacaacccactccattctttgttggaaattttatgcacaggtgaaaaactaaggtgacaacctttaagtcatataggctaggtcggcttaacatgacattgaaggtagaaggtacatcaatcactaggtgctgagccatcatcattatg

SEQ ID NO: 47861 - DNA, 568 bp, Cannabis sativa
  modified_base (44)..(60): a, c, t, g, unknown or other
acagtaaaaaagtttaaaataccgcctaacagtatttttgtaannnnnnnnnnnnnnnnngtataccatgtaaatttccctagttaaaagtggtgtaagctcaaaccaaaggccttggacttaattaggttcgcttaattaggcctagagccttatttggcgtggactccaaatttgagccttatttattttttttttttggatttttacaccacttactgaaatttttaactttttttcttttctattgtggggcgggatttttttttttttaaaaaaatactatgtatattttatactgtgtactgttaagtttcatctgttgttatattgtggttttttagttattcttttattgtttttaattgttttgtttagtaatttacggttgttttgtaaaatagcagtatttttgtaaaatttttcgtatagcagtaaaattataaatttttgcccaaaatctaaaaactcctttttttttttactcaaatactgaaatatatgcaaattttatttataataaggtcttcttcttaattttctctatgacctaatttattttaagaaa

SEQ ID NO: 47862 - DNA, 1412 bp, Cannabis sativa
ctttggatccttcctgcacaagattaccatcataggctgaccagacaatagttttctcgggtattttattgaaccaaatggctagtaggaagccaccttttccaatctgctgaaaaccgaaagcaaaatcaccagatggcgattcccataacaagtttttgtttttggatgcaataagagatgatcctacagatatgtttctttgagtttgagcagtggaggaacatagcaacatcatgagaagaagaaacaagtagataatatatggtggtgttagtgatacagccatggcttttacactcaaagttagttatatgtatgtattgatctaatgaacttgttttataatgtgttatggaaaatgaagagagaccagacttttcttaaacttatgtgaagggtttgagaattgagagaattggacggttttgatggtgcgagtattaagagaattgctaaagggcaccactggtgcctagcaccctcgttagtgtcatgttgctattggtataattaagcagcgggtctcatataatttaagaaaataagttttagggaatatcgctaccaatcgtagggtgatacttatggaaggtactgggcagcactggtgcccaataacaatgctcaagtattaactagtaaactagtgggggaaaaccctggttacccgtaaccattaatagtaattattttctaaaaaacaattataataatttaatttaatttcgattaaatataattaaacaacattctaaatacttttcaaaatcaaaatccaaactatatcatatgtgaagatcttactttccttgtagataagtaaaagtgaaaaatgaaaaatatttatataatcaaatattcaattaaataaggttgttgattggttggtagtgaacctacatatcactaaaatcattaatacgaataagacacacatagacaaactcagttgacttgacccaaagtcttcccaagaaaataataataaatattaatttgactctgggcttctttcaatcaccctctttttcctattaattaaaatatgaataagacacacgtagacaaaatgtttcaagacaacagataaagaattccaagttgaagtgaatgttataggccaaactcaccacaagaatcttgttgggttgaatggatattgtgatgagaataatcataggttgcttgtgtatgagttcatgagtaatgtcactttagcaatcttttttgtttaagggtcttaaaccaagttgaaatcaaaggactctaattgttgttggcattgcatacaacactctgatcaaatccaatttaatactaagactatgattagaggaatcttgttgatttaccaacaaatgttattggcgaatcttgttgggttaattggatattgtgatgagaataat

SEQ ID NO: 47863 - DNA, 2141 bp, Cannabis sativa
atagatagcattaaattatggccatatttagtagattgagaatggaccatataataaaatggtaccattttggtagggtgtctttattttttgatatttttttttaataaattataatttaaattttatcttataatagaaaattttgaataatttatgatattaaatcatttaaatttataatattaaaaataaacttccaatcacaagatacgttagaaggtgggtgtttgattttttattcccgtataattgactattttgaattatgtttttaatattgtaaattatttaaattttttaaaaatatcaagatgtctaactactatgtaactacaatctagtaaagatttaaaatattattttagcaaaatatatgttttttcaaaataatgttctctatatatgtactcactcaacacgatatatgttgttgaatattttaggaagaggaattattgtcaacccgttattatattttcttagctaatttttgtgctaaaaaatacattattgtcaacccctagatccgtgtttcgaggttgagttcgggtctaagtccgggtctaggtttggggttcgagtcccaggttcggatctaggtccgggttcagggtttggggtccggggtccgaggtccagaatttggagtttgaggtctaggtctgggttccatggtccaaattcaaggtttgggtatgtgagcaaaaatataaaatataatatgttagataaaaaaattatttttgaaaattaaaaactatattttgatgctttttattttctagttttttaaaactgtttttaaaaatttagccaaacagccctattagtttttaaaatttatttatagtttttaaaacttaaaaataatttttaagttatgaagttaaacaactcctaactttttcttatttttttgttttttttttaaaaaaaaatcgttaagttatctacaacgggacactaaaaattcaaagttagtgttgtttctcactataattaatccaaccgaacaatgaaatttatcttatatataggattgtatatcctgtagaccacactaaaattattatttttttttttaattttttagtttttaataattaaataatggttaaataattaaattttctcaatatatatgtactgtttttgtttttatataaaataaaaaataataaagaatataccttttcgcttttcgtgtaatgtgtaatttaatataaaaaaaaaaaattagtgttaaaataatatttatttgatgttgatttaacactaaatttaaattttaccattgaaattgcccttagttaaattctaaataaaataaagagcatataataaaaatcatatttttgctctaaaaaaaatcatatatgtttttaatgtttgattaagcctatagttcaacattaatttaagcaaaatgaatttcattattttttataggtagcaataaactacttacttggaaatttgggaaaagaatatggagaaacagttggagtggttgatcttggaggtggatcagttcaaatgtcttatgctatttctgaaaaagcttattcaaatgcaccaactccaaaaaatggagaagaaacatatgtcaaggaaacttatctcaaaggctccaaatattatctctatgtccacaggtttaattctcattcatctattattaatctcattcttaatcatcattaaatatatatatataattatattgacatgttgatgatgtattaattcttatgtatatagttacttaggttatggtttattagctgcaagagcagggcttttaaatgtcactggtgattatggaagcccttgcattttggatggctataatggtaattaaccttaatcactttcactatatatactaattaattagttattattatatccttcttttgctcatctcatgataataatatgttctaaaataaatctacattgagtagcttcattaattagaagttggtattaatcaagctaatctagttctaccaatggcataagacacatatataagagtaattaacgattaaactcccttatattttaattttaatacaattaacccttttttttttttttgtagtcataccggccccttaactttatttctattt

SEQ ID NO: 47864 - DNA, 2383 bp, Cannabis sativa
tcgtcgagtgttcaagatatttatgaagttccgaaacttaaagaggatcataatattcgtgaacaacaaaacaaagcacagagcaagttgattgaagaagctgagattaagcttgggaagctggattttatgtcagaggaaaccagtaacttttgtgttcaagatgaaaaagactgtgtaaagacgatgctgcactgctcaaaagatgggagaaacttgtctataccaaatgatgaaatgagtattaaatgcaatgtgactacggttcatccaacaattggtgtttctgaatctcaggctaagtttcaacagttgtgtagaagggtagaccggattgagggagagaatagtgcaagtcaagaaattacttctgcaggtgaagaagagagaaagttattgagggaaatacatgaaaaaatcaacaccttacaagctgaaatctgcagttggagaaaagataaaactccagtacatgatgaacaagaacaacccttagaaaacaaaactggaaagcaagataatgatcgcgtacattgtctaaaagaggtatgtctttcttgatcttttccttttagagatgtccttttcactttctttatttttatacacaagaagaaacagacatgagatgaggtagcacacttgctatccttgctgaattttcacatgtccttttatgttcatcttgtttgtgattcaactgatactagcaatcttcctcggcaggcactgctacacttttggctttgatcaataaattcaattgaatggtaccatttcgggagatgttgaaaagatctaggcttcaccagtttcagacaggctgtggtatgttcattgagatccccctggtgaatatccaaaaaaatctctaattggatttccttttctaactggattttattccaaaattgatcttacagctcactaacactaagtataccattagtgagggaaaaaaatgaaggtttttcttgtaaggttaggcggggagcctagtttcgaaaacaaaaaacgaaaagaaaaataaaaagcttgcatagttgttcatataagtagctgcacatcataagagagtgtaattttagagtactgtattaggcttgctttcttatctattctttgtttcaaaattttcagatatatattgattgtaagtaataagtataccttgctgtttgagagtttaatttttccttgtttgattgtaaatcagattttgcatacacaataattttcatattacctgtaacaagtaaataatacagtttgtttgattgatgttcttggtgttctctctttttctcttttctccaatccaatttttcatgtggtgtgtaatatgtttctagcattaacaaagtgcatttagctacttgtaacactatactaattcatcaactaaaagtcaaaactttgatcactacaatgactttgagagcattgtaatagcacataaactctttgttgatttcagaaccaagttgcagaaatgtcattaagatgcttcaactctgcatattttgaaaatctcacattagaaaatttcaatttcaagagtaacatttatatttgttgaccaatcatcaagaagggatggccaagtttgataaatgaaagaaaattttagtttgcttaatgctaaaggcaactgaagaaagtttaattcttcattattattattagttcacaaattctttagaataatcaagagatataaaatatatattaatatcatttaaatgaggaaattattaagatgtaataactattcctgatagattagctacaaaacaattgttttcaccatgcaagtcaattgattgtgacccccagccactttggaatggaatggaaacacccacttactactaaataaatctgtctaggcacacttgtcaactaaaaccctctaggttagtgttattgcttatactatttctcaaaatatttaaaggtttataccattttggattttttttttgaataaattggtatttgtttcctaaactttgttattaataacatcatgccacctgaattattagcgatgttaaatatttcttacttttgaacactgtaattttaaagtatgactactatcatgtatttccctccaaacttctgttaaattaaaaggacactcagtgatagaaatttggggagcaaaatatgatagtgatgtagttcaaagagtaaagttgttaattatttaacaaacgtctcgtaataattcagaaggcatgatttttttgggccaaagttcagaggacaaaatagatatagcccaaaagttatttattatttttagtaatattgttttggatccttgattacaaaaaactacaaacattgcctattgttttgcaaatttggttaacaa

SEQ ID NO: 47865 - DNA, 1142 bp, Cannabis sativa
tttctgtttagccaatcttggagatgttctggccctagtaaccggagacgattcacttcctccaccagatttcagtttcgttgcagacccctttagcttcttgcccttggaactcaacttatttacctccttcacaatgtccatcacaatctcagttgcgggggcaacagaatcctccaagatcagtcgccgactcctcaatccatttgacccagaaccaccgtttctcagactccgtgacggagtttcgcaagctttctctttctctgcagccaccttatcaaagtcatcagtgagtttcttcaccagccgcctccttcgaaccttactgctcccaatttcctcatcttcacgattcatatcctcatcgatcaaatccatgaatctacgtcgtttggtcgcgatcggagcgggaggaggggactcatcgtcgtcaccggaagtatcgacaactttcttgcgcttaagcacaccaggatcggatccggttgtaggcgatttggaggcgaacttttcgttcttcttcgcgatcttctcacgctcggcgcggagctttgagacattcccttcgatccggccttggagacgcaggcgcttgtagcttaagccgcccatggaccaatgagcctcgttggcccaggagagaaatgggtccatgaccgaaagcggtgggtcgacccgatggtcgtttagcttgacgtcggtgtaaatgcgagggcggggaaggctggtgccatagaacttgcctggacctagagataccaccattgacgctaggcgttaaagggtaggtagagattttagggtttgttagagatacttttgagggagatgatgatgttgagagaggggtttataggggttggtttcccgctctgtgaaaaggcgggggtttgcttggcgcctttttggagtttggcgccacaactgaaaatggcctccacgctgttaacggacccatttttaggtttgtaatgggccatgctatttttaataatgagatttatagcacatttcaattaaaaaaaatatatatatttgtgtttgttaacatttttttaagggaaatttataaaaatactggaatttgggttaacttttacaaaaatactgccacacggaaattttttcaaaaatactgt

SEQ ID NO: 47866 - DNA, 1372 bp, Cannabis sativa
aaaaactatatgtattaagggcatgtttataaagaaatgagagaattggaattagtttataattgaagctaattatataattttgtgtgtttgtcagtaattaaactataattgtgtaattaaaagtaattaagagattttaattacattttcatattctcataccctataaatattgagtgtaaattacattgtgtaattattaaaaaaaatcattttaaacattaagtaccgaaaaatattattttcctatataaatattaactattttgtcaaataatatattaagaattcataagtagttaccactttatatttaaacaaacatactgtatattttaaaatataatgtaattactatgttgtgtgattactcgtaattttatataattacttctaaataaactctaaatattttgataaaagtaaatcagaagaagaaaatcaaaatgaatggattggtatatttcattaaatatttattaagtgcaaaattagtagatgattgtaatacaaaccaagaaaaaacatatgaacattcacaaatgtacgataacacgaaaaatcagatgtgttgacaagatcaaatttgatagatacacataaaaagtttacagaagtcattcataagagagtcgatattaaaatacataacaaagttgaacaacaaccatatgttgccatgatcttgaaagtaagctaatctacacaagtgtataaagttatttcaattttcaccactccaagttcgtgtgagtagcacagaatactcatgtatgaagtaggattcaacacaatatacagtgatgatgaaaatattcatatatatacccctatgagagcagcatcatagcaatctttaccttaaaactaataaaaaagtataaaataggaactcattgttctgctgaattatagtaccagcttcaggaacaccactgcaggaaccaaactaagcactggatatatgtatattctaatagtggaatagatacagttcaatatagattatgcttccaagtagataagaaattttccacctactgattgctgaattcaagggcttctccaagtttctgctttgaaccttttctaaaggcattattgaaactctacaagacttcacctttcagggacaatgatcagcaaaaacaatttttcagcttctctggcctgtgaatacaaatcaggagttgaagaagacaatcaatatattatatgaagagcgattacaattttttttttttttttgataggagagcgatttcaatttaaatatataaagtcttcacttagctaattttttggttcttaactacgaagcaagttttgtaccttgtttccactttccagatgttgccacagatgaaca

SEQ ID NO: 47867 - DNA, 3203 bp, Cannabis sativa
  modified_base (1201)..(1205): a, c, t, g, unknown or other
agacccctcatttattgatgtaaagtaccataataaaataatggcttaaatagaaaccagttacacatacttataataaccggtggaatattgatttacaagtacaaattaataaatatgagcattgctattgggtaccagtagtgcatagcatccttaagacgtatcgccttacgattggctaacgatacttcctaaaagctattatattaaactatatgagtgcttgacaccactagtactttttagcatttctcaataaatatttatctatagttgataaaaaaacaggtggtacttatgtataattgtctatcgtgttgggtcatgtttttggcagcaaatgtactgtagccaaccccataatataaatttatatatatatggttatgagttgtcattctatttttcaatcaaacgtgtgtccctgaaacatttttgatcattaaaaaaagtttgttataattcctttccaaaataaaaaaaatgattttatttgatacttctataaatatgccttaattagagtacaaacaaacataaccaaaagcataggttcattttaatctataacattcttttttgataaacatgaaacgtagttttgtgttgttttctcttacaacaatttctattgtgttgatcatattatcttctaattctaagccatgttcatgttcatcaattcatgatcaagaccaaatttatcaccatcaccactatcatcatcaatatattattgcaccaaaaaccaaaggttttgttggtttatcatcggaactcgatcatcgaaagcttcgaatttatgtcaaaagaaggggaggaggatcctatggaggatcatcggccgcggccacaattcagaaaccttttcttcatctcttattgtgtttggctttaattggtgtccttttgttttgattataatttgtttttccaattttatacgtgcaatcttttttttttctttattatcaaagttgtttttgttgagtaagtttaataactctataaatataagtatagtaaattgtgttataaatacttaagtttaacttttagttgtaaataaatatctaagtttaatttttgacggtaataactcctaagttattattctgaaacttttgtaggtacctagctcgtgttaagtaaattaccacgtgacaattctttattggtctaagtcattaaatttttnnnnnttttaaaaaaattaatttaaatataccaataaattaaaaaaattacacacagataatgtcttaacatttaatcatcaggtacctatatagttctaaaaatataacttaggtattattactgccaaaaattaaacttatgtatttatttacaactgaaagttaaacttaaatatttatgtcgcaaattacacatataaatataaattatttatgtttgcaaagtgtggggtttgaaaagaatgtgaatttattattttgatgcatttgaaattcgtctaattctctttataaaaaggggtctccctcaaacagttattcgtttaaatagaagctgtcgagagtatttctaaaatgctccatttgtgttttattgcgcaaagcccacccaatttattttgatttggtaggattttattgaattctcctataaccagccatgtagatagaggtgcaacatccttatgtctttccaaaggagtccaagtgtgaattctttgctggacaaaggaaactccataaaaagtaggaagttccatcttgtgttatttgcaaaggtaatataacaataaaaaatatttgcattaaaatttaaaatatatacatgtacatcatcttctaaagcaacatcaacccctctaaacatattctaggaacttcaagtccattattgaaatttaaaatttgacaaaagcgacaaaatttcattaggacctaatttagtttctattaaaaaaagtgcatgtggggatttctctttaacaagcaaacaaagatgaaaaaaaatgcgcttagattccctaaaccacgtgcattccaactaataattttcatggttgattgtggggctgagatttagcctccactgcattatcaagaaaaccaacagaatccataagagcattagaaactttctagtttggatcttcttcaattgacaaggttgattacccctgcacctcttaagaatgtctctaagtgaatctctttctagttgtttctttgggttgcgattatgagaacaattttccttcccttatttctccatacgagtagagacaataagagatggagaggcagtggcattggtaagaggcatactcagagtacatatgtttttgtgccataacgtttttaggtagaggtggataagttgcaattgtgttagagcaattttcatgtcttgatataggcatataaatacctgatagattagtaaatgtatcgggttccaagcttggaaatgtttttggagcagtagttggaggatgatcaaccttcggtgtagtggaactcatggcaaagaactagtgtgaacgtttctctggtttgaatgttgctggtgtgaacataactttctggttttttggtttttcagagacatccatggtattgtccaaaggtgcattgagacatgagctttgaataatagggacacaagtagtcataccggtaggacttttctcattagaaatttgttgcagttccatctggtttgagtttcaactagaaatattaacttgtcttgcctctgtgctgtgatgttgagaagattctttttgaaacaaaagccttggttacagttgagatcttccattgagtaatgatattgccaaagtgagagatgttcttgccaaacgagtgagtatgggctaagcacttccttttgtaaaatcagttctatatcaatcatagttagaggttggaagtgcagaacctttaattgtagacctatattcaagttcgggttcctctccatttcaagttttttaagaaaaattatacacttattgaaaggatgacctaatctcccaaactctataaaatattcaggcagtctctcatatctgaattcgacccaaaaattgtctcagactttagacaatgtgatcattctacctcgcattaaaggtttggtgacatctttttttttttgatgaaatttcaacttcattaaattaacattctgagtacaaaacatccataacagcagctggagca

SEQ ID NO: 47868 - DNA, 1437 bp, Cannabis sativa
  modified_base (1133)..(1139): a, c, t, g, unknown or other
gtacataaacaattactgaaatagtaaaattgaatgaatttagacaaaagtccttaaatccaataatctcaatagttcagatgacatttttaacgacgttaaaagtttaaggaatataatttgatacatgtcaaaattcaataaacaaaaatcctatttagcaatattgtaaaataattacttttaccacttgccgctattttgtcattcatatattttaacataaaactttactaactgttagctcatatcttgaattcataaaatacattaatatatagaattaagatcatgcctcgttgttaatatataaatttactaagcttatttatgtttattgaatgcaaaataaggttagaaacacatatgtattaacacgcttataaatatatactgtactttgtgtagtaaaaattagtgtcacaatcacctatttattttgttgtattgaataccttttatgcatttaaattccacattgatgagtcttgtgtacattctagctacttgccatatataaattataaagggatgataaatttgtaaagacatatattattggtaaaagaaaattataatttttctccagaaaaagaaaatggtttctagtatagcattactaagtggaagggtaggaagtaagcaataaagatgataaaagaagggtagtttggtaaaatgaggggaagcaatgaagggatgaagtaatgaaatatgaggcagaggcatatatctgaaaaagtgtcaggaaattaagaggagaggtgtggtgggaacctgcttgatggaacatgacaggggagaagcaacaacaagtggtgagggttttgttttttcttgtgtcaaattcaattcccattatattttcatcaaaaagaaaataaaatatatatatatatataaattcaattcccattatatacccctaaatatgatatatgcatggtccaacatatctcaactaccattgtttctcatttcatttcattcatttcccccctatcatttcaattattctttttcactatctcaatcaaaacaccctcactcgccaacaactgataataataataataaatatattcaaaaaaaaaaactaattataataataattcaattaaaataataataannnnnnnaataataataataataacatgatatggaaaaattttatattaaagggattattggtgttcaacctttttttttttttttttctttaagtaataatcgcatatatcttatgttagacattttagacactttagttgataactaatttaattattttggcaattagttacttcgattttctttctcctttggtacttatttgtaacgccttaaataattaggcacgctacctaagttatttacgaaaccctaatcccctaaatgggattactaatcaaaatagcacacaatttaaacttt

SEQ ID NO: 47869 - DNA, 2277 bp, Cannabis sativa
caaatctttggtggatttgggtggtctgtcaccggagcagggccacctggcctgagcagaagctccacgggaaggaaaaagaaagatggggaagagaagtgtggtgcggcgctgagaggatgagagattggggcttcgaggactgaggagggagagagaatgagggtgttactggtcgccggagaagaggagcagtagctccgattgagagaaagaaagagagaagcgtgctgctcttctcaagcttcgattgatcgaaagaaggagaaagaggcgagaatgagagagaactgctaatgacaataggcttttttttaatttattcaagtgaaagagagaaaccactgttaaactttccccatgtgcttcttctgtaaaggcactcacttcctgctgtttgtatgggaaagtaattgctcccatgtttgtggatgaggctacgattttggattttgtggcaaagacttggaagaaacagatctctgtggtccctatggtagatgttatgaagactgcaaatttgttcaagtttgggttcgaaacagctgaagataggaactgggcgcttgttaatggcccctggtgcatccgtggttataccttggtcctgcatgcttggtctccgagcgtggatgggccgattactctcaatgtgctccgagtctggattcaaatacataatctgccccatgaatatttttcgcgtgagaatggccatcttctaagggggctggttgggaaggtggtgaaggtagacttggaagatgataaacctgccacttggtctaatttccttaagattctagtggatattgatgttcaaaaaccgctagtttctgggtgttttttcgacttaatctctggggaaaaacaatggttgcaagtgaaatatgttaagatctgtattttttgttacaaatgtggctgtctcggtcatcagagaaggggctgtaagttatcgtctacggttacggtggcgaagaatgatggcgtcctattcccatgttcggcccttggctctccacgtcctcagcttatcacgatgtattctctggaccttcgtatggtggttcttgttttgcagcgccctcaagcatggccaaatatggaggtgcgagctcaccgttgttgaagttcacggctgtcgacggcgatggttcgaaggacgggtctgctctgaaagttcgacgcccgagacatcctgtgaatgtgacttctcgtgcagctgctgcttatgggaagtctcagcgtgcgatgtggttccctaagcagcgaattgcaggtgttgagaggggcatttccattccgagtatgggaggtgagtctggggctctggttaaaaggaaagggtctgatcatctttctgttttgagagtcgatgaagtggaccgatccttggacagggaagacgtgttggaaaatatagctgttggtaagtctgctctggttggtgggccttttgttgggtcgggcttaagtgtgattgggccgtctggccaaaaggtggaagttgagaaaggccttttgcaaaaggataagttcagtgggccttctgttgggttgggcttatgtgtgtctagttataataaagactcagggccttctaatatgaattgtttcattaatactagcgggcctgagttaggggccactaacatcaatgttattttgtctttggaagatattgggggcccgattgtttctaataaggtttctccttgtattgggccggttcttatggagcatacaagtggtgagcaacttggtctctcctcttcagggcccactgttgagcgtgtatcttcgatgctgcccaatgaagatagagccttggctcaatttttcaaagcgcaagaagaattaatgaatgatcttaaacattttgggaagcttgatttgtatgagattcgaaggataggaggtgatattggtgttccggcttcttctgaggttaatgagaggacgactcctttcaaaaaaggaaatttgaatcctcaacttctctttgttctaggcctcacaaaattcaccgcaagtatcctggtgttgtgcgtgattttccttgggactcaaggcgagaagagaatgaggcggaattagtggttgatgagccttctgaagatagttctaactcccctagccgatcgggtatcttgaagaatcccctgattggttcctttgtgatcgatgatgatgtttcaagtgggtctgcttactctcacacccctgtggaggagaatgccgaatctcctccacaggagccatgagaggcttagc

SEQ ID NO: 47870 - DNA, 2154 bp, Cannabis sativa
cctttagcttccctttttataaatggggttgaaaaaactgcctctaaaggctaacattgtagtagtgaaaggttgtggacagccatcttgccaatgtgtgccgtgaggatcgaagcaggtaggggctttgtaaaagcatccgccagttgtaaagtgctgggaacagagatgagtcgaatggaggattggttgattttgtctctgacaaaatgacaatccaattcgatatgtttggtgcgttcgtgaaaaagtaggattgtttgcaatgtgaattgcagattgattgtcacagtaaatgaaagctgggttgggttgcgagatgtgtaggtcattgaggaggtattgcaaccatgtgatttcactagtagttgctgcaagggctctgtattcagcttctgccgagcttcttgaaatggtattttgctttttggttttccaggagacaaggcaatctcctaaaaagatgcagaaaccagttgtcgatcgtcttgtgattggacatgaagcccaatcagagtcggagaaacctctaaggtgaagggaagaggtagctgaatacaaaatgccttgaccaggactccctttgagatatctaattaggtgatgcaaagcttgcaaatgtggtgttcttggtgaagccatgaattggctgagaacattaacagcatatgtaatatctggtctcgataaagttaagtacagcagcttgcctattagttgtctgtaatttgatggattggttaaaagttcgccttgttgatcgtcgagtttgtgtctagggtccataggagctttggcgggtttgcttcctatgtaaccggtttcttcaaggagggtaagagtgtacttcctttgggagagaaataaattgtttttagttctagctatttcaaacccgaggaagtatcttagtttcccaagtgccttgagtttgaatttgtcatgcaaggaatcttgcagttgttgtaaaatggcaatgttcggacccgtgatgactatgtcatcgacatagacgagaagggcaataaacttgtcatcttggcctctagtaaagagtgtgtaatctgcctgtgactgttggaaaccttcttgaaggagggctgctgtaagtttcttgtaccactgtctcgaggattgtcgtaggccatagatagatttttgaagtttgcaaactaaattggtacctgcaggagtagaattagagagagtaagtccaggtggcaatgtcatgtagacctcttcattgaggtcgccgtttaggaaggcattattaaggtctatttgaagcatatgccaatgtttgatagtcgagatagcaagcaataatttgaatgtgaccattttggccacgggagagaaagtgtcaaaaaaatcgaggccttcttgttgtgtgtagccttgtgctaccaaacgagctttaaaacgttccacagatccgtcactgttgagtttgatcttataaacccaacgacatccaatagcacgcttatttggtggaagtggtacaacaatccaagttttgttgtttcgaagagccgttaattcagaattcatagcatcaagccagtgttgaaattggattgcttgttgatatgtctgaggttctttaagagaggtcactgcaaggataaatgctttataagattcagtgagtttgtgataagaaagatatttattaagatggtgaggtgtggaatgattggcctgtgaaactgagtaacactcgaagtctttgaggtaagcagggggcctagttattcggcctgttctgcgaggaatcattgctggtgtagtatgtgatgtttctggtgtgttggaaaggtcaggtgcctcaatattggtggttggaacatcagtgttgttgtcccgcaaagaaatgtcagttctagaaagagtagtttcatcagtaggatagtcattaactggtgtgttagttacatcagcagtaggcaaaatagttggagtaaatggatcaatattaccatcatcagtattcaattttagaaatggaaaaatgtgttcatgaaagaccacatttctggataagaatatctgtttggtgttgatgtcatataatctatacccttttactccttgaggatagccaagaaagacacaagctcttgcacgaggtgcaaatttggtgcggtttgc

SEQ ID NO: 47871 - DNA, 923 bp, Cannabis sativa
ttacaaaactggttatatttcaatcataaccggtttaagttatttatttttattcattatgttataaaaccggttctatttttagttatatctgagacatctacatcaggtgacttttttagtgacttttctggtgacttttttagcgatgatgactttttcggcgacactaacttttccgacaaaacttattattacaaattttattaaatttatttattattttttttctatattttaaactttaattatttttaatctcatattttttttatattatttatttattttataaaaaagtaaactatattcttaattcttatatttataaaaattctattacaagaaattataacattggagcttgtgagttgtgacttttacccttcatcaacaagtatacatttttttttcttagaggaccttagttgacaaccattttaagaattgtgtataagtctcaatttactttttagtggtctttgagattgctattagagctgaaatgtaaaataaccataaatttaaaaattaagttagtaaatgtttattttttaaaaaaattagcaaaatagtcaaatataataaattagctcataaaactttaaaatatatttactacatattatttttaaaaaatatacatataataactaaattaagttatataatttttttagtattgcatatgttgacctcgcttttagctaacgacaatgagtctaataataagtgataagaaatatgattaacgtaaagtataagcgaataaataataaagaacacaaggtttttaaaaaggttcggctccgtttagttcggtaatagcctactcccgttgatttgtattaactcaagaacaaagaacacagtgtttcctctcttgaagctctcacaatgaaatctctgagtatgctctctta

SEQ ID NO: 47872 - DNA, 748 bp, Cannabis sativa
  modified_base (293)..(294): a, c, t, g, unknown or other
aggatagggtctttagttgggtcaggggcttaggtctagggcctgggctagggttcgggtccgaggatgggatccgggggcgggtctgggtccagggtcgaggctagggtcgggatccgggtctagggttgggatcagggtcggggtttgaagcgagggttcggatctagggtctgttggggtccaagtcggggtcccaaggtcgaccttggggttggagtaaaaaatattgataaagagaaaaaacaattgtttaaaaaaaatttagaagtgattttttttgtttttaaaannttaattctcaattaaaaaattgaaaagtgagaacaatgttatataatatgtttttggaaaatatttatacttttctaatgaaaaaaataaagaattggttaaaaagtgttactaaacgcactcttagggtttaattttttaaattattttcttattattttgtaataatttttatttattttttatttttgagttgttttttattttttttaaatatttaaataactagaatgaggcagactaaaaaaaacttgctatgtacggtgtacaccttgacactcaacatatcaaagtagatagaaaaaaaaaaatagtaaaacgaaattaaagtttaggtaatttaacttccaaaaatttaataaaaggggttgagaaagttgaaataattttgtccctaattgcctttattttaatgtctaactttctcttcgtcatcctttcaaaaaaaaaaaaa

SEQ ID NO: 47873 - DNA, 2352 bp, Cannabis sativa
aagccactaaggctagcatagtggtgagggagggatgagaaaaaaggagaggtcatgggttcgaacctaggacctttaagttattgagctaatatatgattcaaaataccattacgctacactcaaaaagaattttttttgagaattctttaatttttttaatgtttcaatctttgtttttttttcttcattatttgaattttaaaaaatataatatcactatttttacaaattgatttatctatttaaatatttttgttattatttcaggttttcataaatttaatctcaattttttacatagaaaaaatcagagaaggaattaaacattttctgtactttaaagatcaatttttttttttgtattttcttataataaatttatgacaaaaatataaaatttaagattgttaataaaattgttaaaatcctaccaaactaactattatttattactacttcaaaattaacacaaaagttaatacattttttttataatacaataaaaagatatttgcaacataacttaatatagtgactgtaaattataaaaaaattataaattaacccaaaaaatatttattaattagtataatgaccgcgcgaagcgcagttatgttgtctagtctaatataaaagaaagaaaaaaaataattttttttttatttattatatagtcattgacatggggaagggggaatttggattttaacttttgatattataaaaaacaaaacaaaacaaaagtggtcataggcacaaagtagtggttccacacttctcctctcaaagaggatgtcccaagttcgaatcctcctccccaatataaaaaaaaaaacataaaaaacaaaaaaaatctaacttttactaattttattttatttctattttttttaaaaagggaaatctattaaatttgcgtcaacaagctacataagaatagtgagatgacgagcagagagaatttttttttttttttttacagagagaaaaacctatgtatccattgatgatgagttaaatgttcaggatacaagctttcttatctaagcctaaagtgtacttagctagttgatgagtggcagtatttatctcttgagcgacatagctaacagtagctcgagaaagtgaagataacaagctattgatgttataaacaaaatcttgtaaatgaagattggtagaggatgattgtttgacactatccactaggactttataattcgattccatgttacaaattgcaagggaattttcaagacaccctttaagagattgttgaagagaaagagcttccatcaatggtggtgagaagactccaattcatggaatgaaagcaacagctgttatgtcaccattgcaatctcttactataaaaccaagtccaattttacaattattttgaatcttgagttgcatcaatgttcaatttcaaataacctacatgtggcagtacccattaggaggtggatgatctagctatatgtaccaaggaggatggagaggccacattatgcaactgataaaaatgtaggtggttcgttgtccattgtagtactatgctatatggaaggaagtgtcgatcacctactcattgggatgaagtcggtgagtggagatatcttggacccgatgcagtccaaagaactagtgaggctattgagaagatttgaactcgtatgcttggctcacaaagtagttaaaaaagctacgctaatccaaatcatggagatattgagtttcaggttggcgactttgtcttccttttagtgtcaccaatgaaggggatttggagatttagatagaaagaaaaactaagtcccaaatttattggtctattcgagatattggaaagtgtaggtgaagtagcctatcagctagctttattccctactttatctggagttcacaacgtattccatattttaatgcttaggaaatatgtgtctgatatgacccaaattcttagttatgagaacattgagctttaaacggacttattttacgaggaacaacatgttcagatcttggataaaaataaaaaagtattgcaaaacaagaccattcggctagttaaagtgttgtggagaaataacaaggttgaagaagcgacttgggaattatagtcgcagaagcgggagcggtatcttgacttgtttaggtaaattttgaggacaaaatttctgtaaggaggggatagttgtgatatcccgaaaattataactatgttaattttggcatattttattaagagatttttacgcttgatgtcactttttactttttttttacatttttatttattctcaattatttaaacctttttatattttttatttttcaattttactt

SEQ ID NO: 47874 - DNA, 776 bp, Cannabis sativa
  modified_base (698)..(709): a, c, t, g, unknown or other
ttgagggttgacgagacgaaatggaaatggttttttttttttttaattaaaattttttattatataggagggtttttaatgaattatgtgctttacgttgatggacgtgattttggcggcggctgctgattcttgctgctactgctgccattgttggcgccgctggtcttacggttagttccatcagagtatcaaatcagcgtcaaaaactgatatgtaatatacatacttttgttttgcggtttttgccatgcacatcttatttatactccggtaactccattgatttcttcttgtatattattattattattattattattgaacacttattctaaaaatataatattaccttatgttatattaattaagggtgttgataaaagaattaatccaattcaatttacatgatttaatctagatatttgtacttatgcggattaaatgttgattgatatatttgtaccgattgaatgttgattgagataaccaattcaatataatctatacattttttataaaataaattaaaaaaatttataacgcaattaatattttaatgtaaaaagaatagtaatttaaaaatttcatacatataaatataatataattatattttaaaacttcatacatcaaatatatattaattcttacatataatatttttttacggattatttaaaataaaattaaatatnnnnnnnnnnnncaatttttttattcttttaaatttattatttgttattttatttattttaatttattgttggagacat

SEQ ID NO: 47875 - DNA, 1328 bp, Cannabis sativa
attgcaaccatgacaactctgaaagtgttagagagatgtgtgggaaaatgcctcccaattacaaaactatatccaagcaccacaacaagtaatgtattcccaaatcaccataccaaaaaccctacatgtactaaacgcatacaaattaagcaaggctgatcaatccacggtttcggaacagtagaaatgaaatttcagaaatcagtacctgatgaaagtcgccagagccagaaccagctgagctaccggaggtgttgctgacgcgaacaggaacattatcgatgattcgacggagcttaatctctatatcttcttcctcttccttgaacactggaggagtatactcgacaatggccgatgatgtagacgatgagggtggcttcggaggaagcataagagatctcttctccggcgccgccatgagctgcaagtccctatctttaggtccacccgtcgtcgacatatggatctttcaaaaccctaaaaattttgaattggatttgagttcagaatattatattttgattctttgaatcgaattgtggtcaatcagtgttcgaaggagatgaatttagcggcacacataaattggaacaagccttttgcttcgacggacccttatttgctgtcttttctataaaaattcaaacgtgtaagagtaaaaaaagtccataaacaagtaaaaaaaaataattaggaactaaatactctcgattataaataaatacttaagtttaatttttggttgtagaattatgtttttaaaattttataaagatttctcagttatatgtcaaaatataatctacgtgtcattttttttaactggtatgttaaaattaaattttttgaacaaaaaataaaaattcatgatatgtaccaatcaaagattatcacgtggcaatttacttaacacacgaagacacactacatttcctggatcatttcctagatgtcaagtgaagatattctaactcattaaagataacatttttagcaatcacaatctttggtctatcctttttggaaatgtagattttatagctcttggttcctaaggaataacttaagaaagttcccttcacggatctaggttctaacttgtcaatagattagtgtatatatgatgtacacctaaatattattaagtgtgttagattgggagttctgctgtaccacatatcataaggtatttttaggtctatcactctattcgggctcctatttataaagtaggttgcagttgctaaggcttccccccaaaatagtttttctaatccgaaactgaacaataaacatctaaatttgttcaatagggttcagttcat

SEQ ID NO: 47876 - DNA, 2840 bp, Cannabis sativa
gagaaaacatgcagttgcaacagattccaacttgatgagttaccgtgtgctcatgcgcttgctgttataaaagagatgaacttgaatgtttacaactactgctcaagttattacacgacaagaatatagcttgaaacatataacgactcaacatatccggtacacaatcacacaacatgggatgtaccacataacataaaagatatccttgttctgccaccaaaccaaaaaataagatctggaagaccaaggaaaagaagatttatagctgattgggatacaaaaaaacagaacaggtgcagcaaatgtggtcaacacggtcacaaccgaaagacatgcaacagtcaagcaataaaatagataatcagagttatttgaattgtttaagtctctatgagaatttacacatgatgatatgttatatttgatagattgttattaattggcaaagtttaaatagtttgctagtagttgcataatagtttcatgatacagttttgacacttattaatgatttattacgaaaagaatttaaattaacaaattttaaaaagtcaaatatgattttatataagttgtataataagaagaagaaagaagtggcataacagtaaggaatacattgaggtaacatgacacaaattaaattacaagtatgttgaacactaaaattagtttgtatacagttgcataatagtttctctatagttggatgactttaaaaaaacataattaattgaaaaaagatatcagtgctgctgtcacaaaacataaaaaaaaggaacatatataatggttaatgtcaaatatcctaaaagtttataaccagttccaaaatataaaacgaatatagtagctaaaaacataaaaaaaaaaaaaaactaataattgtttgaaaataaaatcaaccaagaaaaacaaattttcactaaaaattaaccctactttttcaatttagaagccttgaaagacttgttttgcttctcatcctcgctattaatactttcatcatttttcctttgaccgtacgagaagaagagggcagcaagtcgagtacgataaacttcaatgtcaaaatcagcaggaacatcttttccatggatgaagaactcgacaaatgcaagcataaatgctctacaatcactattaccgagaaaggaaaacagaacagttaaacaactattataaaacataaaataaacttaaaaacaacaactcacttttagtcacaacaaaatgttacttgtgactaaaacatagctttagatacaagttgtcactaattttgttttagccacaacaactatgctgtaaataatattacccacacactaattacttctattactagtaatgttgaatagtgtttgaatatatgcttgttccatgtaatagttaattttaattaatgtaattttttctttaaaaaaataatatataccccataaataattagtaatcttttataattattattaaatttaatatatttaagaattgattttaaatcacacgagtaacgatattataatgataggacttagtaggtaccattacagtcgtttattttcttttgatgacttctcaacgaatatgggggacagatggacgtacaatggaaaagtaagtgttcaatcaatatccccaattttcataatgcctactttgttcagctcgctacatgaagtattggttattaatattaaaaggcagtatataattaagagtattaatgttggacactagtagtatttaacattttttaaacgtattgtcttgtgattggttagtgatactctataaaaattattatgttaaattatataagactcaatacttaattgcacaaataacgaccttgatatataggagggtgctagatacctttaacatttctctataattaaatatcaaatttgatgtaatttaatataataatttttaaaaaatatcgctattaaattataagaagacacgtctaaaaagtagtaagatgttaaatgtcattagtattcaataacaatgttcttattaaaagtacgaaaaatactaaaagacgctagtagtactgcataataccctcttatgctaatatcactatattagtacaattaagtatcagattttatataatttaattaatataataatgtttagagactatcgctaactaatttaaaagtgacatgtataataaacaccaataatatccaataacaatattctatatgtagaagagttaggatagttatattagtaagagaatcgctaaaaagtatcaaatgtctagcaacttcttgatgtcatcatactattattgatatagtattaagttttatataatttaaaaaaacaattttttgagaatatatattgttaacgaattctaagaaaatgcccactacgtacaaaagacagctaccttttgtgataaatttttagtcataacataatttttttgtgactacatgtgacttttagtcacaacaaaaaattacttatgactaaaatataatttttaaatcactaatttacttttagtcacaataagtactgtgtgactaaaaacatatttagtcacagcaaattataatttttgtgattaaaatttttaatgacgaactttttagatcaatagtgctgtgactaaaatataatttttagatctctaatttacttttagtcacaataaatattgtgactaaaagtatatttagtcaaagcaaattataatttttgtgattaaattttttaacgatggactttttaattacagcataaaaatgataatttataattaatcacaacgtttttatttttactcataaattttattgtga

SEQ ID NO: 47877 - DNA, 1950 bp, Cannabis sativa
ataaagaagttttacggtggtgttccagaactagagtagggtcatagatcacatcgatctatcgaacttgaacctacataattcttggtattgtttttttataattttcttgctttgtttaatttccctgtgatactctgttttctcctcaattcttttattgtgttttgttgatattttcattattaattgtttcttgatttgaatttaagttaatttgaatgcacattagtttaaatttttccacatcctaaaatactcttgacaaacatttttcttcaaagcattactattttgtaattataaattttttattaaaaaagaatatatataagattttattatatgcttgggcctttttagcacaactttgaaaaaaaaattaaaagttgctttttcaaaaatttctatgttataaaggtatttggtataaaattaaaaattaacatattaaagaatttatgaagaaactagaactaaaagttaaaatttgtagaactcaacctttagaaaaaattgtatttaactttaattaattagacaactttataataaatttatttatatttaaaataaataatatttaagtctaattagtttattttgtttaaaaacattttatatttattagatattttttattttcaatattttattttaacaaactacgtaaaataagttttttttaacaaccttgagttttttatatactcatatttatttttttacatgtgataaaaaaataatttaaaaaatactaaatacatgtaaattcatattttggaagacaaataataacaaataacaacataaaaaataaaattgtgcataagttttatatatttataattataatacattaatttataaaatacttattattatcattataattaaaatattaataattcattgtaattataataaattaatatactaatttataatatattttataatttattaaatactcaatctaatttttttccacactatttttcctcacaatacaggtacaactctattttcttacagtaccaaactggccctaaatagattgatgagctagtttatatatttaaggatcaacattagaaatttccttagcagcctaaggagattttattataagctaaatgggttgatgagctggtctattgcctcttccttttctatgttccttagctcagtgttgactgcaacgtgcattgatttcctatagattctaatgtagcccatattattgccagagtctatctaatgtttgttctagtttttttaagttttgggaggtgaatccaatgtgatcatcactattttatctgtttaatgaagtttctctgagattttttttttttttttgaaaaaaaaacacagtagggtaaaatttttatcaatatttatttatacattttccaaacatgtggagcaaagtgccttttcattaaaataaaagaaaaaaaatgtaagagcatgtagggaaagaaatccctctttgcagcagattgactatatattatacattatttggttccagtcgtacgtgcgcgctttgaaattgcatcagtaatagactaagacacaatataaattgcattattgtacctaccaaactagaagaaaaacatgtttcaatttcactatatgtatatatcgttttagaagattaaatattttttaatataaataagcccacaaagtaaaaattttggatcggtcacgatattaacgacaaaaaaacaattgacacctcctaattataagccggtgccgatttaaggttaatcattatttatcacatatcttgcattgtaaaatatcctatctcaaacttatattattaaaagttaaaaccaacagtgacatatatgacatatatatgccatgtctgggagttaatttatataaatatatttatatatatatatatatgccatgaagattgaagag

SEQ ID NO: 47878 - DNA, 1755 bp, Cannabis sativa
atgtatggtcaaacctcctactcttttcatcaaaaatgaagaataacattatgcatatatgtatgtatatatatttatatatttattcattttttttacgtaggacctccattcttctggcatcattcttctcttcgttgtgaacttcacttcctccaatggcttttactattcgacgcgatcacgcctccgtccatttgccagtaaccaccctcctccattcctcgtctacactctgtgtttgttcagcgagctccacttttctctgtttggatagtccctccatgtatttgccatttttgttcaaaattgtagataataactcgacctgatccgtgccaagtctggttcgaatcacgaacggagaaggtaatgcagatgctattatcgaccgatagaacaagttgaacaagtcatattttctccaacgctatatactttgatcttgagcaaaggatccatgtatcgtataaaatcattctagtagcagcaccttgtatgtacaggcaagaggatcgaattgctcgatcaagagttggtaagactgtctgatccaaaatctctaatggagtagaaagtttctcctctggctctaacaaactttgattaaagtttggtggtactttgctgccatctcggatgagatacatcgacagtgatgtttaaagcttcctcacggtcacccaaatccatctcgcttctcactgattcaacaggggcatcagtgtagtcatcgacctctggagaattgggttgagacgaggaatccagtaatgcctctgtcgatgggcagtaaggctcaaacatggcatgaatttgcttcttctgagcatcaaagaattgatttatacgtaattctatggatttcaatgtgaatatcacgaattcatgaagctctttgtcagtcattttttcaaaattttcaatgaaatctctcgctgagattctctcaatgaaatcaccaatgatacaataccaattatatcgggttgcactctttgagtcagtaccaaactctaataggaataatcctaagttgcattcaatatttcattaattgattctctccatttatgtaatagtattacatatttatactaacgagacaatactaacaattactacttagttcctataccttttcatgtaacaatgatcatgttgaatgcacttcattcatctacaccataaagaaaaacaagaattcatgggattttatgaacactactcatttcactctttatcttgatgcacacacatcccatacacatctttagtcactaataaggggcgtgacccatttatatataaggatttaatgggtctattgggcctacagctcaaatagagagactttattgtctaggctaaatgagctgaccaaaaattattttagagtgtgttcataggccatgagtatgttagtacgttatgtcgatcctattatggcctgatggtaatatcacgcattactaattatgtagttataattatatgttaataccgatattgagtgaacaatacttaattatgttagttcacataaaatattctaacattattatgaatcgaaatacttataaactattaaatgtatttgtgtatacatatcataactcattattttattatagtataagaatttggtgtaactacaaaatattatcgtttttagctaattagtaatattaaattatgtaattagcaactcacttgccaaacataaaataagaattcataagccattattatttg

SEQ ID NO: 47879 - DNA, 2052 bp, Cannabis sativa
atattttaaataaaaatttgttttaaacaattaacacatgaaatggaatgtgaacatttattccatcaataaatagctttttttttttttttgtaggacatcaatatatagataggatggctagaagaaaaatcaaacctagttataaagttgttgtcatagagagaaaaaaaaaaaagaagagaaaaaaacttaggtataaagtttattaaagccgtgtgattttatctagccgaacaccttaaaaaaagtcccatgtccccatgtgtaatcaaactcaaacttattccacctactaaaaaatgtcacgcattttatttttagttatcaatatatgattaatgtagtattttttttatatatctaaatttaattatattaaaaataatatttattaccaaaattttattattgctttttagaagaaaactctaaaacaccacccaatagagtatgagcgctaaaaaatgaggaagaggggataatatcaattaatgataaattacccataataatattgtgtgcacaatcaggaaatccacaaaaactttgctaacagctatacacaaggcatatttaacaagtgtgagcaatagcattagcagttgtagaataatgaaaaagactcatcctatctaaaagagcaaaactacaaccaacatcccgaagaactaagcctaaaaaaaagtctagagagacattattattattagtcttactcaatactcactacaataagacaatcaaacttaaattgaatattaaccaaccaagtaaacgacattgggttcctgcaatactcaaggcaagagctacaagcctacaacgacttcaggttgaaagtgtccaattgtgcgcccaataccggtggccaaaacaacacattgagtatcacgaaccaccgtaccaattccacaaaacccaccatgatcaatatctaatgtcccatcaacaattaccttaacaaaattcataacaggaggcacccaactaggatcagcaaaaggagaagaagagggaaaagactgccccatcaccccatatgaaccccaacctgagaccgagaaggactttgataatttctgaaaaactcacgggtccaaacaacaacaaccttgaatcaactgattgttattcaccattttattttcctataccaaatcctacataatatcaagaactaatttcacttgagaaataggtaaaggattcaaaaattgatatgtaaaactataaaaatcagagcaacaaatcaaaggattagtagttgaaactcatacagctctcagtattaattcttgagttaaaattggtagctatataagtgatacttaatgtagtatttgttatttatttattattacaaagtgcttggtatttttaattcctaataatttgggggtgcgatacatagtccagcatattaactttccaagtaaaaattattaaactttgtgaatcagggaacaatggcacaattgatggtcaaggagagttgtggtggaaaaagtaccgtggtggagaattaaaatacactcgaccgtacctgattgaaataatgtattcagagaatgttcaaatttctaacctcactttgctcaattctccatcttggaacattcaccctgtttacaccaggttttctttattccttcattcttcatttacaaaaactgtttattaatttatgtatcaattattaaatatatatatatatattaaaattatgaaattttgcagcaatattattgttcaaggcattacaatccttgctcctgtgacgtctcccaacacagatgggattaacccaggttaactttctttctctctttctttctgtttcttcttttttgagtatgtgaaaagcagattaactttctaatcccaggccctttatattaagtgccacacaattttcttattaggagtaaacacattttcacaaaatgactataaatgaaggaaacgcctaaaactggtacattaaattatgtatttctataaacgtaaataaatagttattttattattttatatcaggttatttgttgt

SEQ ID NO: 47880 - DNA, 877 bp, Cannabis sativa
taaatgtcaatttcgaattaggtgggtgttttcacaacctttagcttcccttattataaaatgggttaaaaaaaaaagaaactaaaagcctatattgtaatagtgcaatcactaccattctcatagatcatgacaacaattccaaacgcaaccctctatgccatatattgtttcaattaatcaattactacctttcaattaataataatgccatgacagcaatattgtttcaacttaaaatcggcagaagcacatgactcgatcccatcactacaaaattcaattatcctcgtagagagttctaccaaaataaacaggagcaggtgattccttcaatctttttttcatacgattttttttttcttaaatgattctttgatatacgataaaataactaattccacattataccatataaatggttattgatatttttattctttatttttgaaatatataacagagacgttaatttcagagaaaaaatataaaatgttaaaataaagagttaaatcaaaaattctgttacataacttataaagatggttattgatatttttattctttatttttgaaatagataactgagacgttaatctcctaaaaataaggtgtaaaaccaagaattctgttatataggtacaatttatataaagaagatatagaaagaggtttcaatgaggtttcaatggttacatttttatgtaactatcatggttatatttttttaagccattgtaatactattaaatagttgggattaatttggaaactaaataaaaataaataataaataacttgtaacctgaaagtaaactaataatttattttcttattaaattttaattaagattaattatattttaaaattaaatta

SEQ ID NO: 47881 - DNA, 727 bp, Cannabis sativa
  modified_base (85)..(88): a, c, t, g, unknown or other
tgaatgaggttccatcccaaaaccaattggcaatgggaggagtagcccttttatcttatatatcataatttatttccacacattnnnnatgtgggactaactcttaataataacacacttaatttgacaattaagttggattctaacagcagagatgcacaagagaaaagaacctcacaaatagaaatatataatttttatattaggaaaaagttgctcatacattcctgtagaattgagtgagattgtatgtgatgagagagagagagagatcgatgagtacaaaaatagtaatttacattacgttacaaactcttgcttcatgtgatgtaataccattaaaatcacttaaaatgaaactgcaaactgtgaagatttgcaagtgaaataaataatggaacaaaacaaatatccaattatgtatttttagtatcatagaaaaatagacaaattcatgtttagaatttctattaatgttgaaggatgggtcacggtgatggttgagacgggaaatcacgacaagaaatcaggttgagagatttgggtacagagtccttgggtttcaaagattaatgtggtaccaactaatatccttaggtttaaaaaaaatgagtaagaaacatagacaaggttactttcatcatcgaatctacagggcgtcgagcctcggtgaaatcgacatcaaaagatctctttgaatcagaagcaaaatatccacaaaatcttt

SEQ ID NO: 47882 - DNA, 1306 bp, Cannabis sativa
tggtaaaatatatccaacacttatgtagtgttgtttatttcttttatacattatcatacaatttgggctgtaacaatttaatttttaatttttttcctttgttctttataatcattttcaagtttcagatgttttagcaatttagtgtgattgattattttcatgtcttctgtgaaatagttagtggagaaactatttgccaagacacctgatggtccaaccacgctcaaagttttgaatgccatcgcagagcaacataatgtcaaatggaatcctgactcatttggagggcatgattctaatcccccacaggacttattggtaagattaattaacatggtactttttgtccctgactagttcttcaattgctgatggatgatatacatttaaccaattgttggtgacaaaagaagggtcaatagagatactttgtctagtgtaagttatttagccccataccctaggatcctctttatgctttcatcatatgctcctgttatctctgcagagaaggcttaccatgagcaactctctgttgcagagatcaccaacaacgcctttgagccttctatggtgtctgactttgttacaatattttaaatttaaactctgtaaaactgctttgtgtttgctgtttcactttcttgtgtagcaacttatgtgattttcttccagttctaaacttcttaatgatatatggttgtggcttgtttaaaaaaaattgatattatgcatatttttccttgattgtcttctcccttgtatttttaatagatttattgttcaatgaaaatattatgtgaaatgtgcaagttagttttgaatttcatgattctacattatacaagcagtgctgagaaaagattattctttcattattgaatattttaatgagtcttacgtaattacattcatgatttagaaatttttagtgaatattcaaggatttttagctttattgtgctcattatcgctgtttggatattgttttcagtacttgatgaagggggaataattcaagtggattatcatgttggattcaaccgtttctacctctgcataatcacagtagcagaacaggtacaatgagtccatcaatgtgggccacgctgatgttagtgatgcaagttggtggccaacctggagactcttctataagtaatttcatttttaacacatgtattaaataattgggttaatataccaataattagattttatcaaatagtaattacattagatttcatttgtgacaattcaaacaaagaaaatacaaaagttaacattaacaaagtgttatcat

SEQ ID NO: 47883 - DNA, 5596 bp, Cannabis sativa
gtttagagtaatttataaaccacccaatatattcattgggcggtttggattttcattgtattatttcaggttgtattttttatcggtttattcggtctagtttggacggtttgtaaattttgttgaacactcctaccgaaaatagctatttttccaatgtttgtggaatttttagcatagaaataacgagatttttatttatttattatttgttattcattattaaggatgatatacatgatttgttagtgggacaccccgacatgtgggggatcactaacaaaccctaaagcctatataatgagagtaagaggctgaggtaaaggggagatcgtttttgactcattgaatgactgcctagaacaccacattcctttcttcacatttttcctaagtcctccatactttgttgatacaaaatctccttgatccaaacaccattgatctacacaatcaccaagaacaaggaccattttcttttcttactcgtattggttatttgttcccaagaaccttctaccaccaactttgatcagatttgagaattttgagcgagtctcccatgagtcttgtcataagtctcgattgagattttacctagaaattctttgttgtattattgtctacacactcttgagaacataactctggtgtgttagatttaattaataaaatcaaaagtagatgtagccccattaccatcgcgacatgggggtgaactaatataaatccctggtgtccattttattattgcagttttatttagttacattaattcatcgcaatcctctttatttttatgatcttcttagatcagttgacgaaaaatcgcgtcaacgtctacatttaataattccttggatttttttagtaacaagagtaattgtatgactaaagccattgtatacacaattgttctaatttaactagatgttatagatagttgctgcaagtgttgcagcaataatatcttctgtcattctcatagtcttggcagttatctcactcagccagttgtcaaatgggagggccgaagctttgtagctgagccacttgaacacaacattcacgacttgagtcaagaaggagcatttaaaaaagagatgattgtgactttctgggtagagaccacaaacagtttagctaaaatcagtcactaaaatgcaaaatttgggcagtagatccccggttaacagatgcctattgactacttgacaaaatatgaatcgatgcttaggcaagcttaatttgcaccaaacaactttagtatttagaaccagatcacacttcagcatactattagacaaaagagtggctttgtacttacctaaactacctacaaccttcagcttattctcattaaaagtctatctaagattgcatagcttccttcagtactagctagtgtcttgcgtaaggttgtatgtccacaaatcatccctttttagatagatcattttaacccatttcacccacaagacatcatgcttttctataattgcccacaaatatttagtaaatattgctttataagccaaggcctccaaacttcttagaacaatagactttttccaaggcagctgaatgaattttacttatgttccagcccgctttgaccccataaaaggaatctgcaatacttttgtatttccttgactacgctttaaggaaggatgaagatttaaatccagtaattccttaatcttaacaatacaaaatgaatcaactgcatgctcactgcataggacaaatgtctagaggccttagaatgaattcgttatttgattttgtccacaataaatgcacaatcttccattctccatttagtgggtctcaaaggcactcctagatacttaagaggaaaatatccctctttaagcccaaattattgagctattttctttctgtcctctgtctggacaccaccaaagattatctaagacttagacctatttactgagagccgagtttgaagacaaaattttttctaatgtaactttgatgtgtcggactactatgaatgagcctttattgaaaaagatcaagtcatccacaaagctgagattgattaacttcaggcttttgcacatatgatggaacctgaaggttgcagcttcaacttctttaattagtcttctagtaaggaactccataacaagaacaaataagagaggggacatcggatccccttccctcaaacctttcttccctttaaaactgccatgtaatatattgaccttgaaaagtggccagctgatagtaggttcgtactaatctgatgtttgccacgtgttacacaattagaactcgaaagtaaagaacacaatgatttttatagagtttcggccccttaattagtgggtaatgacctactccatttttagttgtattgatatcgaaagaacactattcaaatcacgataggtggaatctgatatagctctcttaaggttacaaagtatgaataagtaggcaaatctcttattgacagagagatgaatccttggaggtgtgtgtgtgtgagaaggagagaggtagagagccatttgggtgtgtataagagagagagaagactagggtttcaaacttagagctttatggcctaaatgagaattagagtgacttagccttgtagggttgagttaaggctcttaatataggagagcataaaccctaattaggagataaaataatagatatttacattttaaattaataaataaaaatgatcaaattgccccttgaaagtagatattttcgtagcatcttagtgggctgtcaacgctcaacttgtagcttggcttgcaatacacgaataaaggctacacttccatatcctgtcagggagaagctggttggccatacatctacaaaatgaggtctggctggccatgctatgtgtgcaggttgaggtctggctgaccatgcatgtcatgttcctattagccctaccaagaggagaccagcctttggatgtggatgctagcctttggcaagtggatactagctttgtacacattttccttgcaaaggtcaggctttcttagtcgaacgaaagctccctcattctgaaagtcaccttttgaccggccatcttgtgcccagatcctggccggccatacaaactcaccctggctgatcaatagactttttttggccagccacgcatgttggtataactctttgatggctcgtttcactccttttgcttgctgcttaacgattttgccataccttgtaaggagaccttgtcttgctattggcaaggctatgttccacatgtactctgtcttggcttacgcagacatgcaacgttaggtggacaaaatttgggataacatttgccccccaagtccctatttgaatatttggtcggatagggactttctagctccaatcttatttgtagtagtctctgtcaagcagccttgtctagccaagtgtttgcatttttgcatggcatgcttttcaatctttgatcttgtctctatgtacgcctcatcttctcctcttggatatctcttctttgcacatgtcattaataagtttcaagctttttaaacttttagaaactgttttattctcatgtttgattgtaatctgtttggtattttgatccacatgacagttttagaatgtataatgtgtgatttcgtgatggaaaagattcaatttcggcctttgttgtgattcttaactctttgagtcataaagaacatgaggcacacattcgagtttaaaaaaaacacacatttggattcagaactacccttcgccggtcttagaggtcgtgcttgagacctggtcagtcctaagacttaatcatgggagttttccagctctagggtttcaccctataaagctagccagttcatgcctaggtttgatgaccccacccggctcttggctgagtcatgagaccctagcctaccctctctaggcttaggaaacctgcctgacataggctttagttccaagcgggtggccagctttctgtcttcttttgacttaggcaagaatctttttatggccttgtaggcatatacaaccttagtctcatacatggtttccttagatactctgtatgaaacttaatggtgagtttattatagtcaaatgctcaacttaagactcaacatttgtctaagttattacacttgagactgtactttgctaatacccagccttgtacaatgacattatcttgtaagtactcttgggtacggttaccgagaattttgtctatggcttggaacttgcaaggaactctaccttttggcttggaacttgccaggaactctgccttagccttagcctagtacgtggttcctataggaactctaaccggtacgtctctggctataaggttcttgcagggccttggtcttacatatgcatgggaactaattttttattcatatttggcctcaaggctttcatgttcttattttttttcctataggaactctattttcgatcacttctattatttagccttaaacccttttatcatggacatatgattgtccttgctatcttcttatggccttcacatgcaagtatatggatttacttttctttatgtcaagctgaagtatgcctgcacttgacttagagccaggtttagtagcttattctaagcattaaaatttctctatataagttctacgtgctagttcaatgcattgtacagtgtagctgcccccaagtgagcgtgcacacttacggtctcttggtcacttgcaattcaccatgtttcatagacctttcctaggaattttcttggggtgctactgggtgtaagcatgtggaactagaaaataataactttaagaagttatctttgttaggaagttgtttaaacatagtttgtcttacgtgtaacaaaagcttacaacttagtgtctgcttttgaaatcacgttgtcgttacccttgcgcgggttactgcgtaacagccatcactgaagagtgatgggatgccatcgctgaagaacgatgggtactaggtcttttatgggtctctgcacgtagaggaactaattgacaagttgtctagtgagagtacttaccgagatgttctctattccagtattttggcagaagagccacctccgagttctcattgtacttgccaaacttgtatgcacctttattgttatctcgtaacttggtgcgaaccttttcattttggtccaaacatgcatgctacaggatctttgttgtcaagaaatattctttcctcgatttgtttgttgaagggcctggtaactctttgtgagaagccatgctgctttcagttggcttggtctcttttttttttctctttcgtcaagggatcctgctagtaagatgtaatttacttcttggtcagtgtaaaccagaagtaggagagcagactattggtggatcgagctagtcagggtaaggaccaagtggcaagccatgttgaaggggcattgcctggctggttgaatgaagctatggctggccaacctgtagaggtagtgtccaaccacattgttaattctatggtaggccagcctttcagaggctaggtcgatgctgctattcgatcccatctacactcagttggc

SEQ ID NO: 47884 - DNA, 637 bp, Cannabis sativa
tggcaaaacccagaagagttcttccctgaaagatttagtgatagttccattgattacaaaggtcaacactttgagcttttgccatttggggcaggtaggagaggttgtcctgggatttatacagcaatgactatggtggaactcacacttgccaatctcttgaattgctttgactggaaattgcctaatggaatgagagagtcagatattgatatggaagaggcagctggccttactacacataagaactctgctctcaaacttattccagttacttatcactgcccatcaaacaatgaaatttagtgaaatagtgttggcatttgtctcaataaataggtgtcacatcagcaccagtctttgtcctagctgattggagggtttgtttcctaaataatatactaataaataaaactcaatacaccaaagaaagttaagaatcgactgagattatttttgaatcaaagccaatcgaaatgcaactctctctctagcagtttatgtttaagttttttcagggttgtacataggatccatgtgtatttgatcgaggttttctcagtgtgagttttgattgtaattggtgttaaccaacttagtcttccttttgtgttgtaatttaggattggattggtgt

SEQ ID NO: 47885 - DNA, 1933 bp, Cannabis sativa
ctaaaatttcaatatcaataccaaaaatataattgagcaaaaatgcatctcaagaaaactcgttaatgctctaaaaaaataacaaaataatgaattttgaatcaataccttcaccattccagttccattatcacagacaagaggttgaatatcctcgctttctgccattttatattaccttttgtagaaataaactatgtttaatgatcctttctgtaatcaaaatgtcttcttcaaaataattttataaaaagttatcatataataataaagaacaaggaagagatcaagcattataaacccattttaagttatattgaaggaagaaaagtatgttatcattatcaaaaacactaagtaatgatgtaatggctcgtttgatttagtttccaaaactgaccaagtaaactcaaaaacttttgctcttaaattttaatgtaattttataaaacaggagaagcaagcatatcttggatgtaaatgagtttttcatacattatttaactaactacacaaaattcatattatttcatttcatctaaagaaattatgaaaaaatcaaatgggtaatgatgaatcataaaactgaatcaaaacaactacttgagaacaaaatgaaagaaaagaaaatacctttctactgagaataagagaattttaatttcttaaaatatgttcattataaattttgatgtttatactcaatgataatttttaagagcatatgtataaactataaaaggaaaagctgataaaggaaataattgtaaattaagagtatcgatttactcccaaaaacgaccatgagattgtcaattataaatagtgttaacaattttcttagaggcttaacaaattttttggaagacttagcaaatattgtaggatgaccaagtaaaatcgattaatgtttgttactttagaagccaaatatagattaataaaatctaatgattgagaatgcaaaggtaaaagtcaactaatattttataacacttaaataaatatgaaatgatgtgaaataagaaagtaatatatatacgtacatttagaaaataaaaatttatagcaatatatatatattatataactttattatattatatatacttatttaaaattaagtgttcattttttttttgaaaatacttgttattaaaaattaatatagatagtcatttacaataacagagtaaataagtagaagaatatttttcaaccaaaaacaagcctcgtccatccctaatgcaaattttgccaaactgtgagcaaccatattagttgtacgtttgacatgagaaacaattacattaggaaaaaaaagataaaatataagaaatatctacaaccaaatcatgaaaagaagagattacattgaagggagctctcaaagaattagaaactatcattgttctatctctacaagtgaaatcagcagctgctgttgtaaggcccagtttaagctatggaaaatcgctttggcctccatttcatgagatgaaaagtttccaattctcgacatggagagagcagcagtaacacatctgtttaagtcccgaactatagctccaataccaataacattcttctttacatccactgcagcatcaatgtttagttttaatgcaccagcaagtggcagcttccatggtagtggaccgggaacatgggatgttagttgtgattgatcaacagtggcagtagcgtggtacttgagatttgttggtcgatagttttggaggtagatagtcacataaaaagcaagatccttagctggtttagcactttgaccatgaacaactttattcctttcactccaaatcgaccatagtgtgtaaaagatttatttcatctcaaatttagaatacattgagtttagatggaataagtaatcagcttttcgcattgaaagaacatgcttgccaattgaact

SEQ ID NO: 47886 - DNA, 1256 bp, Cannabis sativa
ttttaaaaaatagcattataaatacttaaatagcattatgtctagtctagcaacattaataagttaggatctaactttcatgttcatcttaacctgttaagtaaccattgagacaaaattacaaaaggtctcaaaaatgcacctattctgattgcaccaaacaaaatacactattgctgtcaaagcaaccgagacatcttggcagcaatgcctttcaaggagctgatccaattattaacccaatcagctaaatggtttggcaatgttgtcaaaccgaaccacttgacaacaacctataagattgttctagagaaaatgcagtcaaaaaatagatgattatgagtttctgaagctgcttcacagacagggcagagagaagagtctatagtgatgaatctgtcaataagatcacgagttaataagtacatatttaatgcttcccaaaaaataaacctatgtttcggaacattaaatctataccaaacaattttgtaataattcaccttatcttcacaaattagagaataatagaattttttaaccttgtattttcctaatcgacccgcctcaatcaaagcctctttgtcgatacaaagtctaagtttgacaaatttcttaaagtaccagcttacatcatgtagttatagtccaaaatttatcatccttcagataaagtgcattgatctaccgaccccataagcaatcttgcttagtcgagatggctcaaatatatttagacatcaaagttaaagttatgttccacttcttctcctcacggaagctaagaccatcatagttcttaggtaaacaaacatgttcgtaagaactaaaatacaatttgctacaatttttattgctgccctaaaggaaatcacgacaaagtttatcgatggaaaaagtcactttttgaaacataatgaagatactcatctaaaaattctaaatgtccaataaaatagaatgaataagttaagattgactaacaaaagataatttttttatatatatttttaattgagcaagttacaattaaatagggatgtgcataaatcgatctaatctaatgacagatccaattacaattaaccgccaaacattagatatctaattgtgattgcatcagattggatgttattttttaatatctaattgaattagattgaatattggatggtctcaaaaaaatctaatacatttaatatctaattttttcatttaatttggatgagtaattaaaagggcattttacaaaaata

SEQ ID NO: 47887 - DNA, 2061 bp, Cannabis sativa
  modified_base (1933)..(1946): a, c, t, g, unknown or other
  modified_base (2030)..(2036): a, c, t, g, unknown or other
cacctaacttgccaaaaaaggactttacaagtcttatacgtgtttaagtttattttgtgtggtactgttatacttctttagatgtgttttcaaatttaaatgaatttggggtgacttggagtggaaaacagtgcgaaaatctcaaagaggtggtgaaaatgaggaaaattgaaaaatgttgtttctatgttgtgtgatcgtgtagtatttgggaggaaattacattgtatattcattttattttatttgttttaatttctactttcattttcatattcattagtatatacatacttttatatatatatgatgtctctattaaactccttaagttaatgtaaattagtgctaaacataagtggagggtgatggtatattaagcaactcactcacaaaattaagtatattttaatgaaatataatagaggatatttttagttaatgaatacaaaaaaaaaatatttatcaacttatccctagtatttgatgtgaccgcgcacatgtgttagaaatgtgtaacgagagaagaatttaatgattatttttgttatttaacatgaggaaaaacgatgaaattaattaggttttaaaaatgatgagacttcttgggccttctgaatcagaaaagagtgcatgggttgcttttagagtttttcttccttttatttttagtttagtggatgttttcaccgtgatgatgaactaaattacttttctagaatttcaatgaagtattttgaaactctaatatagattaatgcaatttctttaattttcttcttcattattgtaatatatgacatttatgtttaatgtttgtgaatgtttgagcactaattttgtgaagacatatagtcaattgtcagctaattaagtgttagttgcgtttgtttagaattagttgggggttagttacaagctacttgagtataacaatttctaactcaagttgttagcttcttgagcttacatatatagctgtacatttttcattaataaactagatgattctttttactcacaaccttttcaatctttctctacctttctctctatcttcttctctctttctttctttctctctcttctgttactctgatcttattactttgtaaaaatggcgaggaatcctcacaactctaatatagtatcagaatcattcactcccttaacggttgctaacatatgtattcgctaacattgctaacatagtgttatttgacttttcagacaccaaccagtgttaaactgacattacaataagataagtggagaaatatattgtaagatgaaatgggagcactaaggagaaatgtaacttggacctatgttcctctaccagaaggaagaacacctattggctacaagtgggtgtacaaaattaacttaatcctgacactattacaaagttcaaagctaagaattagttgcaaaaaggatttcatcaaaaatctggctttgactttactgagacctttagtccagcggtaaagcatgtgattatcaggattgtgctatctttattatctctagcaaatggatggtgcattcaacaacttgatgttaattatactacttttttgaatggggacttaaaagaggaggtctacatgactcaacctccaagttgagttgcctaatgtgttgagttttgtgtcctaaataaaattcatttcaatataatcaaatttactaattaataaaagattaaaaattattttatgttgcatggtttacataatttatttcatgattatatatgcttaatgtataaatttcttaagtccagaacatatatttcatcatgattatagtgttgtctacacagtggaatgtaatcatgattatatgttcaaaagtttaagtctcataatgtcagtacacttgatttagactgacatgataatcagcgataagatatacttacaccttnnnnnnnnnnnnnntcctttccaagacattgaaaaagtatgccagtataggatgtatggagtatacattggattgaaccgatattgaacttggataannnnnnntaaacttactgttatatctttctaa

SEQ ID NO: 47888 - DNA, 670 bp, Cannabis sativa
tttttcctgaaaaaagaaaagaaaaagttatgaaaaactagaaagaaaatttaacaaaattactaaattattttataaatcaaagcatgcatagattactttctttttattaaataaacatatatattaattttgtaagtaaaaaaaatacgtaaaacaaaataaaatctcgacgcaattgaaatttgatgctacttattaggttatttagcaaagctaaatagaacgccaaaatacatatattaagttacttttctacctaattaaactactttatatagcataacaacatatcatgttatttttttttttctatcaaattcttaagattatgtagtgaacaatatttatttagaacatgtaaactaaccactttataatttgagttgctgttatttttattcaactctacttcataataaattaatgctttaataaaatcatttcttcaagaaaattacaggtctcgagttgcttcctgaaaaagtaaaaagaaagaatataatcatttaacaagtaacttttagaaagaaaaaaaaaatagcaatgtttctttgttaaaaattgatgtcacaactcatcacactcaatgataagagcactttaggttataaaattgttaattcttttcatatttaaagtgtgttgtttcttaacatctttagtgttt

SEQ ID NO: 47889 - DNA, 1879 bp, Cannabis sativa
  modified_base (1807)..(1815): a, c, t, g, unknown or other
ttgtctaattatctctatggccaactggaatcctttaaattttaatcatataattaatcaaggaaatattaaaaacctttttagtgtgttaaataattcttgtgtttattgaactatatgaacaaattaatagcatatataggaaagtttgtctccaaaagaaaataggcataatattcttgattcaaaatgaagcaaaacacaaataattggatattttatatgtacacatcttgtttgtttcccaaaaatagaatattacaaaatttaacacataaacacattagaaatatggggcaccattaccaacatgaacaaatatctttattgacttcaaatatttccactctccccatataataattttgtgaaaaattaaatttaaattaacaaaagagtgtctcccacctctttaaagttaataatttttttcatttaaaattaaaaaatctttctcccccttatcatcagctgacagttttgttctctcttttaacttttgaatgacatcaatttcgtcatatacatcccacagaataaattctttttttaaaaataaacaaatgaaagaaaaagaagaacaaatattatggtttgtataattaaaattaaatacttatcattaaaggctgtaacatagtgaataatagtattaagatatattattcatactgtgtggggaaagatgaacagaacaataaacaggagagttgtcctttgttattaggggaaaaagtactcgagattttcttaaggaaaatgttaaaacatagtgacacctataactataacaaccaccttcatttttatattttaaagttttttttgtttttttttttgcattttttaaaaataatacatagaaacctatttatcaatagacattgcaatttaaattgtaattaaaattcacgtaacaactcatataaaaactaccgaagtaatcgatacaacttaaactgtaaattaaaaaaaaaaaagagttaaaaataatatataaaatactttcccaatagtaaacactttaatatataaaaaatctttgctgtttctcttcactaatttacatctatcaacgatataataaatgtaaaccttttcagtttagtttagtttgtattttttattttatttttttgaaaaaaaaattagaattttcattaataggtaagttgaacataatctattacatgtagattatgctcacccactagaatcaacaaaaatagattaatcaagccatttatataaagaaagacaaaaattgtataacatcttcgtgacttattaagcaaccaattatgaaatatcaaaacaatgtgaaaaatactagatttttattccgaatgagcatgtgacaaattacaaattattctagctaagataaaagagaataacaaatacaacccataccaaaaacaaacctactgaaatataaaaccattgaccatagaaaccttacatagaattaaaactaattctgaatgaccccagtatcaaaaactggtgataacagcaaaagaatgttttcttgtgcttctatttatgaatattttgtttttttttagaaaaaaaagggggcataactatatatgtccataatataaataaagagagttattatttggataatgtttcacatgaacagtactggctatatatatatagtagtaatctatacttccaacagctttttttttttaatcccattttaatcagctgtgataactaataatcattagacccctatgaaaaaataaacaactaaggactcgtttggaacgctgtattaggtcgtattgtattnnnnnnnnntatattaaattggattatatatcatatttttatataattctatcttaaactttaatttatacta

SEQ ID NO: 47890 - DNA, 2601 bp, Cannabis sativa
  modified_base (2561)..(2576): a, c, t, g, unknown or other
attattggacaatagtttatttttcctctgtgaccaaaatgacaaaagtttcacttttaagatttaaataacaatattcacccaaaaaagaaagataatggaagttaataatttatcaactaagaatataaaatggaaataatattaaacattttgctcgtgtcgtttataatttcaaccaagattcaaggctacagtaggccttaataacttgctgaactatttttttttctcacctataagatggtaccttgtaaatggttataataacattttataataattgttaaattaaattatatagtatttaatattaattaattactcaatagcactatataacattattggtatttttagtatttctcaaatctaaatttatatcggtgaattttttttttttttttttttgaaaatatcggtgaactttttcaatggtttggttctagcaaaaaaaaaaatctagtttcaagaagaaaaaaaaaatgcatatttaatattttttgaagtttttttttttaaaattgaacgtaggattggtctagaacaatgttatgtgcagtgtcgtatatattatcttttataagtttctctttgagttggtgagatattagtctaaaatataattttaaaactaacaataatatatttatcaatcgtaagaaaaataattaaaattaatatatattatcttaagtttcaactgataatatataactccaaaaatttgctaattttaagctttattcttttaataaaacaaattaaattatacataattatttgttatatcattcaaaaataaattatataatacttaaaataaaacaaaatatacgtatttacacataatttgatctagtatatatatatatagaaactatataaatatataggattatttttattattagtggcaaaatgacagatctttcttgtttggatatataaacaaaatctaaattgaaaaagaaatgcttattatattgatattaaataacattaaaaagatataattagatcacataataaatcgtagctgtagccatctgatttagctgagaacgctatcaataatcaaataataaaaccaagcatttaaatataatgtttttaagttcatgattcactaataagatacttccacgcaagtgacgtacaatattattattattattcgttttttgaaagctactttaattaattacaggtcacaaattattaatacttattatatattataattatagtatagattatatatgtctattttcaaaaattccaaagtaataaagagtacttactacttataaattttctacctcctatctcgtacaagattatagttatagtttatttatatttatatggcatatgctatatataaatttatcactaagactatgttacaaaattataaagctataattaataatttttttcctttgaattttaatgtgtatcaaattatatttctttttttgacgtaattcaaattatgttccttaactatttaagttattaaatttttttttcaaactatttgttagatttaagaatttttatcgaattttactaataaaaatttaatgtggatgaaagttcacagaacataatttagtatatgtcaaagttcggaaatcacgaaatggtagacatcaaaagtttagaatacacaatttgatagatggacaatcgtcgtttaataaaattgaatggaacttgatagaataacttgaatccaacaggttcaatgattcagaaattttttttcattctataataatataaagtatcatatatatagatatatatataggtctaaagtgcagttcgtcacttagttttataataatttttaaattaaattatatagtatttaatatttataattactcaatagtactattggtgtttttagtatttctcaaatataaatttacgtctggactttttcaatggtttggttctagcaaaaaaaaaaaaattctagtttcaagaagaaaaaaaataatgtaatatgaagagtaaaaaaaaatgcatatttaatattttttgagattttgttatatatatatatactgactcataatgtaatatgatattttgtttttaggttattatccactagccagtgctacttttcgatctatttggttggaaattttttctttcaccattaaatttattttattctaatgttatatttatcattagtgtgataaatgatttttttttttcattttttatcttggtgttattttttttctttggtttgtcttcttccaatactcatgagttttagaaagagagctggagacaactctaacttgtttttgactagcataaactttcttcaacagttgaacatatatatatttttagatcaaatgctgacagaaagatttcaaaaataagttttttattatcaaatattaggcatattttattttaatattttttttaataatatcataattatttggtgtgctaatatattttctttacctttacattctatacgtagtttttgatcaaattaaaaaaagggtaaataccannnnnnnnnnnnnnnnttgcaaaagttacagattggaccct

SEQ ID NO: 47891 - DNA, 5547 bp, Cannabis sativa
aacgattcaaaatgtttgtaatggatcccacagctagggagatgagaagtctcgtatgatcggggcccaccaaaatgtcaaggtccctttctgaatgtcactgagtcgccagtatcactccaccttttttgctaagcatgccttgctatacacaaaaaggggcaagaaataccttctgacatgtcgcgtggttaccacgcaagaggaaaaaatgtcataaataccctcagtagaatacaactcatttggggtgtgtccgcgacctaaacctgcaacacgtgtcaacgatcaacgtaagagacaatagcaagcttccgtgatccagaggatctcgaaagcctgggggtaaatgttatccaagttttcattaattagacacgtggcgtgatcaaagagaaggatatggtcacaacacaagtcatactaggtaatcaagaaaatgaatgactcccggacctgaaaggcaaggagaggtaatggccttcgggagaacttcccttagtaaggaacttggaaggcgataaaggtcttagagacattggccatatcaacaccttgcaaaatatcaccttgtagacggttacacctttttctgatacatgatcagattttgtcccccatgccaattcatggtagtgcgcgtacgcaccctcaagtacgctctttgcccaaggttaaagactatttggcaaaggagaaacctttgcacgacacgtgtctaggatcgtacaaaattcctcacaagtggctatacaccacacaatgaagaaggtttctatcagccaatggttagaccgtcctctcacagtacataccttagtagcgtgtggaatacaaaatcctaggtaagtaaagggtattccctttaccccatgtgtgccgataaatagtcttatttttctcgaactctcttttgagagaaccagagtgatttttattgcaatatctaataatcttgaaaacattcatcctaagaggctaatattatagactcatggactaaggatcattaacgtctaaaccacgtaaaaaatctatctatttattatttgttatctgttatcttttctaagatctcaaaatatttggtttctgaaaaactcggtaaataccttttaatttaaatattatattataaattcaagatttattgaaagggtatcaaacgaagaatatctctcctagatgcctattaaagggggacttgagcaaggcctatgatacaattaactaaggattctaggaaaatttgttaaaggctttcaagtatccctcattattcattggttggatcatgacttatgtgagaggtacttcctattcgttggtgttgaatggtagagttcaaggtagacttctaagggctaaagggctaagacaaggtgatcccatgtgtcccttactttttactctggttatggagtacttcactcgactccttattgtccaatccaattctaaagatttcagatttcatccgctttgcaaggatcttaaattggtgagtctttgctttgcggatgatctcattgtgttttgcaaggtgagggtggattctgtgcaatgtatcataagagcttttaagcaattcagtggatgttttggtctgaatgctaataaaggaaaatcaagtgtttacttggctggagttgatgacacaaacaagagaaagatcatggtagtgcaatttggagagggatccttccctttgaaatatatgggagtcacctcgaggccaaccaaatggaaatatgcagattgtgagattattattactaaaataagaaggaagatgtccaattggacaagtagatatctcacatatgaaggcagaatttaacttataaatactgttttgatcgacattagaagctatttgatgaatatttttatgcttccccagagtgtgattaaggaagtgaatagactttagaggaactttctttgggggaaggaggaaactctaacaagcttcatctgtccttttaggagttggtttgcaaaccgaaaagattttgggggtcttgacttcagagaggggacaaaatggaataaagcggctatggttaaatacttatgggctctagttttgaaacaggatagtctttaagtggatcaatatgatttacttaaagagtcaaagtgtttggattcatgaactcaagctagatgtaagctggtattaaagaaagcttatgaatttaagacattgcttctctccaagggatatatatgaggcatgctgcacaagtaaattcaaaatcagttctctttatgatagttttatatttgacttgactagagttacatttgatcgggttgtttggtatcgtatggctgcaccaaaacctagattcattttgtggcaagctgtgcactctcatcttcttaccaaagatcagcttgctagtagaaatattaatatggattcagatctctatactgtttgtgaaattgctaaggaggatcatgggcactctctacaagggtaattagtcgagttgagtagtggcaggatttgaactcctggtcaaaggagcttgggagctgggttcggtggacagaatcacagagagctctctctaatttagcagagctaaaatatgcggccttagctggtgtggtctataacattttgattaataggaacttttgtgttattgaacataagtgtttgtcgatggattgtattgataaaatgattagagagagtatcaaagtgtgtttatcacttttagatagggggaggaattctaagggtcaaaagctcgctaggatgtatataagtcacctttaggtgtctttggagtcaattttatttggctttggtttggttgtaatttgccttattgattaatgaagttcttctttgataaaaaaaaatattaataatttaacattcatggatatattaaaatgttcaactctttattaaaataatcagggtataaaccttaacacaaacaccaacttttagtgtagttttcttaaaagatggtcgtttttcttatactgttgtcgtttgctttaatcatctaaaaccctttcgtctgcagtagaagagtagaaacaggttttatccatttcatttcatttcatcacagaacgaagatttgatcaaccaggaaaaatgattcgaaccatggccaagctatcaagggcagtggctcgaaccactaagctccgacccaactcatttgggtttagctcctctttcttgcagcggcctccggtgtttacgagattaatccatggtcaattcaacgcctcaaaccccaacccagttgctattcagatgatcgactacgctctctctcatgccaggtcccaaaaatcaggtttccaacagattgattgagcttcttaaaattcgtactttctttttttttttcttctttttgaaagtaaatgttttgtgggttggattggggtacgtgaaaatatagatgattcgtatggacaaggtctgcttgtgcttgaacagtgcctttcgactcaaccaagtgaagggcaagcatctgatgtagatgatacgaaggggatgatcttcatggccatgtctacgttgctgtctgaaaggttcaattgttattcatattggattattatttgcaaatcccaattgatattttcttttttagttttttgtttcttaactcagataaatgggatatttttcttagaggaaactttgatgaggcaatagaaaaactccaaggaattcaagatttgcaatcctcttcaattggtcttagaggtaaacaaaataaagttattgtagcatttatatatttattttgttgggttcgctatttttgactaatgaaactatctgaattttgtaaagttgctgcattggaagctcttgttggactacacttagagttgggccaggtgcatatccacattatttaaacctttcgagtgtatatgtaattttgattcatggagatgattctccctatataggatgatacttcatcaatggtcgcagataaatgtttagatattttgggagaaaatggtactcagtttagcaggggagttaatgaggtcttaattgctcgtgctaaagctgctaaagggctgaatgagctcgtctgtggaaatattcagtcaggtacagcttacgctggaatgaatgtttttcagttaatatcatgtcattcataattgttgtatacataatacataactgttttatatttggttcttttcagccgagtctttcttccatgtacctgaggatagcaaaggattagctggtgaggttcatttccatggtcattgtttactgttagaatacgtaatgaagtccatttcaattattgcacatatgctcaacataagtgtatcataaaagaaaaaacaatacactctttaacaacataagagcttaaatcttggaaatttaatttcctcaaacccatttgaaaatatatacatatacataaatataaatagacatcatgatttactttctctatatgaattttcttaaactagctaatacaactttctgtttcaagaaggttctgtttgcttgattgggatagggcataggctcagacctatgagaatagattgccaatggcttattaccttttttgtctacgttatatgctccatgaaggctattgatacatacgaggtgctagaaatgtgtagatttcataagctttacaccaatgatgacacttccatttcactcattttagcaattttacattttttttattcccatatctccttttgtgtctgtttatttctactatacatatgttgtgattttgtcttactttggcgtttgatcttcgattgtttggtaaatatagtcagtgctaaactatcctgtggagaattcttgcatacaatacagaatttttctttggcaaaggaattataccagaatgtaattcaacaattgtctgaaaataaatactgcatcaactcaaattcactggcagcttgtaatatgtccatggaggaggttttgttgtcagctacatgtgctctgggacaggttgaggcacagcttgggtaattctctacattagtagctatcttctttctaacacggaacacttgtgccacaagtcttactcatatactttcaggaattttggtcatgcagaggagatattgaccaaggctctaactaatgcagaggaacatttcggtaaactacatttacgattatgattgacagtgatattactttctagaatatataaattacttgatgggttcttaacacaaatttacggatcatttgtgctcatgttgcactttataaaggttctcatcatccaaaggttggggttgtcttaacctgcatagctctcatgtttcggcggaaagcagttcaggagcattcgagttctcttttgattcaagaggttagattcttacttattggtaggcaggttgtttaaaataactactcatcaagttactttcaaggatttggtttcctcaatttcccttttaagttaatgaaactttaagtattttttcagttgaattagcatcaacagattaatctag

SEQ ID NO: 47892 - DNA, 1040 bp, Cannabis sativa
tcacatattttgtagcctttttaattaccactatcatttcaagactaaatgtttaaaattaaaataaattcctacttcctatttcttctctctctcacttctcaatcgattctcatatctccctctggttggccaatcattcaaagaagaccttttgttcatggagattggagagaagtcttgccatgctagcttcagttaaacagtgccgccacttggctagtaaattctagggagtagctccgaatctttgttgtaactaaaaaaatattagttacaattttttgttgtcttaatatgtattagtgataataaaaattatggctaaaaatatttaggttgtggttaaaaaaatattagtgacaacaaaatttgtcactaaataaatattagtgataataaatgttgtcaccaaagataaataatttgtggctaaaggttatttagttgtgactaattatgttaacatcttaacaactattacttacaacgattattagtcacaatgttatttttatagtaacttataaaacttttaactacttattttttagtcacaatctcgtcataaaaaaaaaaatcataacaaatttttggtcacaatattttttacttttagttgtaatttttgttgtaattaaaaatcaaattttgtgggatggttagtgctttttcaattatgatctgatccaatatatatatataaaagcataatccagtcaaaggactaaataatattcccaaccagaaaagaatcaatttatggcataatttcttgaatttattcgaaagggagacatgaatgcatgtatatataaatgagaaatgctaattataaccttctattataattttttagtcaatttctatgtctgaaatcacataccgaaatatgttttttcaaaaaaaatttcataacagtattcgttagttacaatatcatttctacaaatttttgaaaaattttgaattatttacattaccgaattagttacagtaagagaattgtaacattagatatttttgcctccaaaaataaa

SEQ ID NO: 47893 - DNA, 2124 bp, Cannabis sativa
ggagcttcatcgcaagctttcatgtaatccatacagcccttattgtaactatgccccattctcccacagaaaaagcaaatgtcggggagattttcgtatttcagctccagccacacgactttgttagtaccagagaagtgaatgggaatgcctcgaggcaggggttgcgccacatcaaacatgacacgaagtctaaagtagggaccccatgtctcacgaagagacggcttgtacaattccaacatgtggccgagcgacgatgaaacaagagtcgccaattcttcagatcttttgagaaacggggtattgaacacttgaacccaaagagggattttgagtaaactatccccattgagaacatccaaggagttggggatatccataaggatagcttggttgagataggtccatggctgttgcaacaaaacccgacgtctatctccgtcacaaccaaactccacaagaaaagccatgagggcgctcggtgataattacggggcttcgggaaatatgattccaattcttggtcgtcattttttcgttcgatgaagttttttcggttaaaagactgacttgactgtgtgcactttggcaacgagaaaaaggggggcttgttgtatctcggtttcaggtgtggttgcaggggtgatttcatgcagagtttggatagtacattcggtctctgtgagattgagagcaacagagagagagtttgttagatcatccatagggaaggaaattaaaatgtaatgagaaaccttagacagtgaaggtcccggccccgagtaaggaatatagaaagaaattgaataaatattaaaagacacagaaacttgtatgggcaaaggactatgacagctcggttagtcagggaagggaattttctgtgtatagaaccgctttgagagatagacacagcttcaggaataataataataataagccaagaaacaatttcaaaggtaacacaagcacagagaaggggattgtccggattggtattctgaaagtgaaacaatttatgaagaaaaggaagaactagactatgattatgagtccacgggtggggaaggtgacgaggaaatgccagaaaatttttcaaaggggacaaacggttgaaactcctactagaacataacttaataatcaaagagttttgcagagagagtaagtttgatattactaaatcgcacacatcaaagtttttcctgagattaactatatataggcaaatacccacggtagaagagtaatgcaaggcagtaacagtcaaatcgatggcattaaatactgggaaaattgtctgcaccaaaaattgggatagagcaatggacagaacatctttgcaggccacattaaatgataaattcaaactcaaaatggcaaaagggaataagggcctgttgtcgacagatttagggaagttcccatggccccaaatcctttgtaaggtacagaaatcagggtataatttaatgggcaaaccaaacaaatatttatattgttctatcaaaaaccattttttctgagatgatttgacaatgaatagggataaatgtagaagaagatcagtacctgtaagaggttcattaatcacggtacgattcaactgaaatgggagaaggccggagttaatggtgacgcgactggagtggttgggcacctgcagaggggaacggcttgctcggcttggtcgagtcgagctgcgttgtgtctcagcagaggaggagtcagcagaggaggagccaccatgatcaagcgatctggagctgggcatgggtttcaccttgtggaaacgttcagaagatctgtgtgaacatgcaggggaagaggatgaaactgtgttcatactgagaagtcgagagagagagagtctggaaagagagagattagaagaaagaaactcaaagattgaaaaaagatgtttaataataactaatattttccctaaaaaaaagattgaaaaaagatatatattttcaattaattatcaaattatatataaaaaaaatatatacattaataatatagtgaccttatttacagagcgaaagactattttagatgataattaaactaatgcataatatatatatatatatgtgggtgactattcaatggtta

SEQ ID NO: 47894 - DNA, 1793 bp, Cannabis sativa
agatatcaaagtccggggagcatggtttagtacataaacaatcactgaaacaataaaattgaataaaattacacaaaggtccttaaatgtaataattttaatagttcagggagaatttttaacggcgaaaaaagttcaggatgcatgatttagtacatgtcaaagttcgggaaaaaaaattactaattagccataaataaataaccaaatcaaaaagaaaactaccatttaacacgagacttatccaccaaggatcagctacaaagcaagtataacttcttttaaaacacttccttttttttcacacgaaaaagaaaaagaaagaaagaaaaataaaaacaaataaaagaggaaacaagaaataaaaccaactttttccaccaataaaagacacattcaattaaaattaattataccatatataaattatttaatcaaacttttcataaaagagaattccttctctcttatgcaaaatttcctaaaagacatatgacagccataaaaacgaatttacacacaagaaattaatatttaattttcattaaatatatactacaaaaaattttatttttagtcagaataaagcttgtgactaaaagtaaaaattgtgattaattataaattattattcctacgttgtgactaaaaagttcgtgcctaaaagtattagtcacaaaaatcacaatttattgtaactaaatgtgtttttaatcataatacttgttgtgactaaacttaaattagtaacaatttgtgtgtatgtaatatatatagtcacaaatagcttttttattgcgactaaaaattacattttaattacaaatttttttcgttgtgactaaaaattatcactaaaagtaatctttttttatagtgatatgaaataaattataagaactttacatttttgttcctagattttatttccttccaaccaaaccaacccttatagtgctcttgaatattgttgaagcttgtttatgagtgttcttctttctttttatttcttatgttgcaaattaagccttgtaatatttcttttccacttctcttattattatattattccctcaaagtttaatataattaaatttcccaacacaaacaaacatttatttatattacgtgaccaactccaaaatcccaatatttaataatttttttgcttattcctatatcaacaaaactaagtgcttgactggttttaaatttaattaattcccacaaatctttaatatatagatataaatatgctatgtaaaaatggatccaaagcttactagaattactctttatatgatctatttttatgttaactaataaataccccaaaaaaaaaattgctttttctattattatgggttagatcagttgatcagtccactttttcaagctacttttgtttgattttcttttggttgttatattggagtttatttttataaaaatgagatagtggctttttagatcaacatatatataataatgtaaagaaatgcattacttttctttactttcttttaaataaataaataaataaataaaatcatttttattttgctttattgatctttttgactgagagagaatgattgacttaagctttatattaataaaataaaatatttattacctttcttttctcctaatcatcctttttttctttcttccggctacatatttgattaattcttaattaatatatatttctagtatatatgtagtacttcttttgtttagttaataataataagggttttttttttttttttatactttaaatatttttt

SEQ ID NO: 47895 - DNA, 1020 bp, Cannabis sativa
  modified_base (533)..(542): a, c, t, g, unknown or other
aagatcccactactattttcaaaatttgattaatgctgtcatttctaaattacatattatatttaacactgctaatctattttcaaatatgtaatactatatatacttatatttgtacatttggaaattatccagcttgtaataatacttttaagtacatcttttacattttaatttgtataatttttccttaaaaaaaaaatcttataattttaaatattaacgtgagtgtgtaaattgagtaactcacattttatgtttatgtattttaataggttattgttaccctatattatttgaatgtatacttagttatatttttaatttatatgtgttttttatgtatcttttaaaattttgtaaattattaaaagaaaattatttattaatttttttaaaacatatttaatgttttaagttttgaagaaaataactataaagtttaaaatattaaaattgaacaaactcctaatatttaaaataaaagtaaaaaaaataataatactacatattaatatttatatatatttaannnnnnnnnnaataaataatatttatatttatatatttataaaactaaccttagtaatactattaaatttaacagaatatatatatttttttttaaaatatattctgttaaaccaacaaaaataattagatagtctatgtataaataaagatgtccaatataaacttttggtgagagatatcttcacttttttttttgaacaattctaaaaataatgtaatacttggaatatctttatattttaatttgtataattataattaataacgtacatatatagtgtatacactgagacattacatagtgttattccccattttatgctcatggttttcactacaagaattttggttattagcagcggagcaaattcgccgctactaataggattaatgtcagcagacttttgctattaaatgttatttatttatttttttctgtatgaaaatgtattaacggcggacccatgtgctattagcggcgggggg

SEQ ID NO: 47896 - DNA, 2497 bp, Cannabis sativa
tgctttgacctctcatgaaacattggatttttaatgagatgcaaagcactttgattgtcacagaaaacaatgatgtcctcagattttatctccatttcatttgacattctcttgagccaaatagcttctctaatggcttttgtagcagccatattttcagcttcagtggatgacagagcaaccactttctgcaagtttgatttccagctaacacatcctccatagacagtaaaaacataactagttagagaccttctggtgtcaatatttcttgcataatctgaatcaacatagccagttacatatccatgtaattggtttctgcaatcaaatatcagaccagtgtttaatgttcctttaatgtatctcattgtccacttgagtgcagaccagtgtttctctctagggttggctaaatatcttcttgtaacactcatggcatgagcaatatttggtcttgtgcacaccactgagtacattaaacttcccacacagcttgcataggtatttgactcatgtacttcctttcagcatctgttgttggagcttgagaaatggacaatttgaaatgttgtgctaatggtgttgataaagctttagagttgatcattccaaacttgtcaagtacttttttgagatagtttctttgagacaaaataaccttatgaggcctttctcttctgatgtaaatacctagtattctctttgttgtccctaggtccttcatttcaaattccttgcacatgagctacttgagcttgtcaatcttagatctttccttttcaacaaccagtatgtcatcaacatacagtagcaggtagaacttgttgcaaaatacattcaggggtcatatttactcttaatgtagccaatcttgttcatgtattcatcaaacttcaagttccattgtcttggagcttgtttaagaccatatagggattttttcaagagacaaacctcatctttgtctttgctttcaaaatctttagataactgcatgtagatctcttcttctagattaccatgtaggaaggttgttcttacatctatttgatccacctcaagatcaaatttggcatccttacacaaaatcattcttattgaggcttgtttaactactggtgagaaaatttcattgaaatctacacccttttgctgagggaaacccttagctaccaatcttcccttaaacctctttgtaccatccttggaatcaccttccttttctctgaaaatccatttacagccaataaccctttttccagcaagcttcttaaccacaatccaagtattgttcttcttaagtgaattcatttcttcctaaattgcttgtaaccaagctttaccattcttaccatttacagcttcaaaataacttgaagggactgagctgtcaatctcatctgcaacagtgagtgcaaaggctataaacttagcatgtcctagtctatcgggtggccttatttctcttctatctctatctcttgccagctgataattgttgagatcatcttgatcatcatcagatttgtcttgactttcttcaacctgcttttcttgtgtctgatctgagtcattacttggctccacctgcttgaattagtgtcttttgtagagatagttttagtttgatttgttgtcactttcatggccatctcatcttccctgaacaacacatccctacttatgatacatttcttaaaactaggttcgagacaccataacttatacccattgatcccatcggggtaatctaggaatagacacttaatggctctaggttagagttgtcttgtcttatgtgagcataggttgtgcatccaaatacctcgagatgttcatgcttaggaatttgacaagtctacatttcttgaggggttttaaagttaatggttgttgagggacatctgttaattagataacaagctatttttagtgcttctccccaaaataatctctccaaaccagcactatttaacatgcatcttactctttcaagaagagttctattcattctttcagccaaaccattttgttgtggattcttgataattgtgttgtgtcttctaattccctctcttatgcaatagctcttgaactcatctgaacaaaattcaaggccattatttgtcctcaaaactttgatgcagcatcctgtttatttttctatcatgaatctccaattgacaaatgtttgaaatgctagattcttactttttaacaagaatacccagacctttcttgagtaatcatctatgatactcaagaaatagcttgcaccccctagtgtttgaattttggagggaccctagagattagaacgaatgtagctcagtttctctgtagttgtatgcataccttttggaaaattcactttgcaactctttcccaatacacaagtcaaagaattcaagtcaatagtacccaagggtatcgtacaagtaaaacaaaatgtacaagatcaatcaacgaccaagtaccgtcttaagtacactta

SEQ ID NO: 47897 - DNA, 1019 bp, Cannabis sativa
aattattaatttttttgtcatcatgtattgcaatagtttgtctattcatttcaaaatgaaatagacattccactaaaatagtgaaaagattattccattagaatgacattctattttattgaaataatattctaatactttaatatacaactaaacaaagtaataaaataaacattatttttttttctattccattctattttattaattcgaaccaaacaccccaaaaaaggagagaaaatatggttaatacattttccgcaccgcccagtcccacttctgaattcaatcgggaagatacagaaaaagttttaagatttcaaaattttccgacactcttgtcggatgatgtgctatgtgggtcatccactaaaaaataacaattaataaaatagcagcattgtttttttaagataagaataatttaccgcaaaaacccttaaactattaatttctttgtaaaaaatcatccaatcttatattgtactgttccgtttatatttttaaaatgtcgtctgtccagcctgattaagtgctaattttatctacgttgcataaaaaattatcatcctaagcgaatatattttacaaaataatagctttgttgtttcacaaattaagccacacacaatatggtcatttcaaacacagttggagtcaatgtggaaaacaggttaagtattatataagctttaatataattcccaagagaataattgatcgtcacaacagaagaagaaaaattaagatgatattataataatcaatggtacaaaaagataatattaatatagttaagaaaaaaagaagctaacttgaactagtttagagacatataggaattaggatcaataatggagaacataaacattgtactcaacaacagcattcccagttttgagatcaaacttatgagtcttggcttgagcatagcctctagcgaacctaaaaagcccacttcctccaacgataggcatctctctcacctccgaaaaaacagcgtttcgtcccaaaatact

SEQ ID NO: 47898 - DNA, 1705 bp, Cannabis sativa
  modified_base (1550)..(1553): a, c, t, g, unknown or other
  modified_base (1581)..(1582): a, c, t, g, unknown or other
gtgatatttaattgaatagatattacagtaagtttatcatatctagttcaagttcaatatcagtgtctttcaatgcatactccatgcatccacccaagcttaatttaaccaataccttggaaaggacgtagcacttatccaaagtgcaagtaaactacattgtagattatcctatcagttaaatcctgcgaactaataattcataggaatagattgaatcacataattttgattactttccactctgctgacgacacaatagagaagaatatcaatgtgataaggatttggatgaattcatcaatcaaataaatatataaatgatcacataaaccaaataacacactaaataaataataaaaataaacctgtttctttattgataattgcatagaaaagattacattgaaatagagttttatttagggcataaagcccaatagaggtgcactagaagattgatggatttctccaccatccttggtgaccatgaagaagatgacaaattggctcgatcgtggtctcctcggggatgtcaaatgcttccttccctcccccgacttgctagctactgatccaggagaaggttactgtgcttggttgggaggtcacaccaagcagggtgcgatgttgcccttgctcccatattttaagaatattgcagactactatcacataagtctgacctagttctccctcaagggtctcaagcatttatctgccctgttcatactctatgcctcgcaaggatggggtgaactgtccccccatgataccaattggctttttgatctaaagtcaagccctaaaaagaatgatcgagaagtcatggttgacgggcgcgacggccactaaggtgataaatattggaggctttgttgatgggtattattttgttaaggggatggacaccgaccacacaagctttcagtaggtgccatcctactggcgccctctgttcacactagagctcaggaagagggctcagaagattcttcaactttcttctgctgaacgaaacatctctctcttggccaccgaggctaattttatcaagtataagttgttttcgaccaatttcgtaccaaaagttgtggcatcaaaagagaaagtatccgactaggaggccccgagcaagaggaagaagaaaaggatggcccctccaaaaagccaagtacttgttgagcgatctatcaggatcagggaagaccatgatcaaggaagtataaaaggaatgcccctttttggagggaaggcccctccaaaaagccaagtatttgttgccccttaaaaagttatttttcaataaaaagagctttttaataattacagaggccattttcgccaaaattctttcttggaaaaaatgcatcctttgattctggcggttgtacagtttggaggatcattatgaatcatctctttatattctgcccgaatcccaaccgttagatttcccaatccttagctttcttatcactggactttgtgtataaaagggcggctgaagcttgtgatttttcacaaacctctggctttttagtgagatnnnntttcagaatggatcatctctttcctgcnngaatgtcccttctgagttcagaagctcatactctcgaacttataataccaagatgcaccaaccattttctatttgtttccaaagacttcaagcctcaattggagccagaaacgatggattcca

SEQ ID NO: 47899 - DNA, 1162 bp, Cannabis sativa
  modified_base (1124)..(1128): a, c, t, g, unknown or other
gaacactatctcgaatgtgcacacatacgcttgtgtagtatgtgagccattggaattttctcctcactccacaaaagtgggtgactcgaaaagtgggtgcctctcgaggcacacccaaagaatctatatatttatataaacatgtaagaagtgtttaaaaactatatgaaatactgaaaacactgataatgaaagtatactttcctaagtttttaataattcacataataaacttcttaattttgtcaaaatgaaagctggtatggttttgtaaacagttattatagggtaacataatgtatgtaagtgacgcaaaatgtgttatttatttttcttttgtgagtatgtaatatatcatgttttgcatcatttcgttttttattattttatatatgttaaaaatttattcaaaaaaaaaaaaaaacaaaaacaaaaaaaaatgagggttaaatattatatatactctttttctttttcattattttgttcattaaaaaaaaaaaaagacactatatagatgttacttgtaatattgggaaactagggaatttattattattattataatgaggaatttattatttggagccttctggaattgcacctttgagagtgtagaaaataataatcatactttggtcaaaattcaaacagaaaatgtaattagtcagaattggaattgagtagctaattgaagttaaatatctgaattgagaagttgagacacttcaagataaacactaactgctatattggtcacatgcatgcatatattaaaattagcatattttataatttatatatgttttatatataagatatagttatataatagaatttttagtttaacggtatttttttttaatttttttattaattttaatagaatatattattacacaactgaatatttttttattaatgttattataatattattatgtatatttaaaaataaaaattatgtaaatatttatataaaaaagttagaggagtgttaccgtcaacttcctgttacaatttcgtagtcaatctccatgcccgaaaagacatgtcgaaatattttttttcacgggatcttcgttatgcttacaacatcatccttataaatttttgaaaaattnnnnntagtttacagtgccgaaaatacatttgaagtttt

SEQ ID NO: 47900 - DNA, 2120 bp, Cannabis sativa
tataaattatagtatttagatacatataataataacttcacctaataactaattatattttttctttaatttttaattgtattacttttaaataacgtagaaaaaacctaacatagaatttagtatacgtgcctcccatcgcaattttttgctagtatatatataatgaaaatgtaaaagacaaaaacaaaagaaaaaacatttatttaatagtttaattctctgcaattttaaaaaaaaaatgaaaaagtaagcaaaaaaaaaaaaagcatttaaagtattgttcaaaaaatatgtaaagtaaaaaaagaaaattgtaaaactatatttataataataacaattattgctttcttttcactaaaagggcaaaataaattaaccaaaatttagatacaccagtgcttcttctatacgagaaatgttggtgccaagcagcacatgtctattagtgcattttaatacacattttaatttaatatgctaactaattggcaattatagaatgtcgggcaatgctccttttatatatgtcatagatatataatgagcaattataaaagaagtgttacgtttgcatctaccaatatctttttcttatttcaaaaagatattagcttattttgataccaaaaaaataaaaatgaaaataattaaaataatattaaacatgtttaaaaagataaagtacaaatacaactaattatttgaaatcatgatgttgcaagtgccaagtggtgtcgctgctaatataattttctttgtccccctcaattatataaaaatgaaatcatgttcagactacaagttcgtaactaggaatatgataataataaattgactgcggactgaatatggaaaaaacgtgaacacgaggctctttcttttctagtctttctctctattccacccaccgtgttttttcatcatatatataaaggacatcaatcaaacacttctataaatatattcaatcacactcatctatattatataacttccaagacctgccatttcaaaaaaaaataaacttccaagagctgataaaggtatatatactcataactcgatcacaaattgcatgatcttctcattaattaatatctgtaatagttttttatttttctttcttttcttttaactttttcatcttgttaacacaaagatttgagaatatgtagagagtgtacttggaatgcattgtagtaataaattaaatacaacatcatacttttactttctttatagaaaaatttagataaaactaaaaatttaaataattgtattatagtgtttggtatgttatttttagttattttataatttatttgtagttgattttttattattttagagtattttaaaaaaattatccttcattaaatgctttcacagacattacccgtttcacttttgcttgcctctatgtttcaagcaaattataacactccactactcacttaaagccgagtccgtacgctttcaaaaaaagaaaaaaaaaacagagagttcgtataaactcatatataaagtctgtaaagtgagcagggtgtcattttaatcgaggttactttcggacagtgacacaagtaattaagtgggatccatcgaaaattactttcggaccataaatttcagtgagcgaaaaacgtgaacacgcgccatttcttttaagcaaccatcatctttgcatgtctacatatttaatataaatatatataactgaaattagattattatataattaatagggtttgttgaagagaagaagatcgatatagaacatatatatatatataatataagaatatgtggaagctgaagatagctgatgggggaaaagacccatatatattcagcacaaacaattttgtgggaaggcagacatgggaatttgaccccaacgccggcacagcggaggaccgagccgccgtggaagacgcccgccgtaacttcttcaacaatcgccataaggtcaagcctagcagtgatcttctatggcgtgcccaggtatatataatatcagatatattttagttacatcacaggaacggagttgaaatttaaaaggaaaataaataataaataatttatcgcatgtagagagtctttactaggga

SEQ ID NO: 47901 - DNA, 698 bp, Cannabis sativa
ttttttatttttattaattaataattaatggtgagagccatctaattaaaattagtatgaacctgtagattcttgccacatggaagaaaagagtcggtgattgtgtttattagtgctgattctagaacatatgccgtttttgtgaaatacaaaactttaggttgccttgtacgacttgggtcccacaattattttattttgttataataataataataataattgaaataattctgtggctgcaaaactttttttttcttttttaagaataattctatcatatctaattatctaatattgaaaatcttgtttctttttttctacattatttggatttcacaatccaaaattaatcaaggttggataatatattctctagtaattaaactaataatgataactttcgataaaaatacataaataataatatatacacacataattgacgcataaattcatacatatttatgtaataaataacttcaatcaatcatttttatttaatatgaatttcacttatcacataggtattattgtgtttgtgtgtaacataatattattcaaaatacacttttaaataaagaattttctatctttgctgttaaaaataagttattcatatcttgtattaaaatgcaaacaaagaaaatagttattaatttttttttatgaattccaaaataattttttaattttta

SEQ ID NO: 47902 - DNA, 1422 bp, Cannabis sativa
aaaaaatcgttgcgtttaaaatatttagccttaaggatctgggcaacaagggagtcagggttggtgagaatgcgccatgcttgcttggccagcatggcttgattgtgatgaacaatatttctgaaacccaaacccccgtagaatttggaggtgcaaagatggtcccattttttccaatgtattttatggttgtggcccagggacccccaccaaaatttagacattatctggctgtagtgcttgcaaagagacaccggaaggcggaagcaggacatggcgtatgaaggaatggcttgaatgactgcttttaaaaggacttcttttcccgctctagagaagagagattggttccagactgagagcttggaactagcttttttgagaaggaacaggaaagaagaggatttagacctagagaaacattggggaacacccaaatatttgtcaataaaaggtttgtcatcaaggtggagagtgtccctgaaagaacgacagtcgactaagggggtattgggagagaaaaggatggaggatttgttgaaattgacagattggccagtagctaggttataaaggttaagtatatccttgatttccatggccgtggaaggagttaccttcgtgaaaagaagactgtcgtcagcaaaaaggaggtgggagatagtaggagcagagcgggagatggaaatcccatggaaagcgttggagtgggctctagcgtttatggtcccagagagaccttcagcaacaaggaggaaaagatagggagagagagggtcgccctgacgaattccacgagaaggaaaaatttggtgagagagacagttgttaatgcggagacggaaagaaactgaggagaggcagttgagaatgagagagatgaaagggtcggggaagccaaaatggtgaaggatgtggtcaatgtaggcccattccactttatcaaaagctttttccatatcaagcttcagagcagcccatcccacctttccatgcttacgattattgatcgcgtggatgacttcattggcaataatgatgttatcaaaaatgatacgatcagagagaaaagcgccttgattatgggaaattaagtcggaaagagtagttttgaggcgatttgcaatggttttagaaactaccttgtagagagtggagcagaggctgatgggacggaagtccttaactcgagaagcatttttaattttgggaatgaggaccaaaatagtttcattgacctgtctcaggtcagcattggtagcaagagcatgtaaggcagcatggcagaggtccttgccagaggagtcccagtttttttggaaaaaactaggattgaagccatcaggacccggggctttgtcacccgccagctgaaaaagggcttttttgacttcctcaaaggtataaggagatgaaaggaat

SEQ ID NO: 47903 - DNA, 2388 bp, Cannabis sativa
tttggaagacagcttgggagaatcattgcttgatcgatacaaaggtcagttaatccattgttagaatttcagcatttgcttcgtctaaattcttatgtttgctcatgcttaaggttttatacaatatgtcataagtgttgctttcttgtgcatttctttaatgttgcaaaggctgctcctgcctggtcaaatactcaccacttttctttccaaaaaagaaaagaaatttatgaattaattttatatttatgcagattttgcagagcagatggagctagccaagtatgatgatcttaaaacactaaatctactaaggggattcttttactggttgaaggcaagttttccatttactttattaattttatgaaaggttgtgttccttatttatacatacttggtaccctgagtccaaatttggtaaacagattttattaatatgactaatctgccttaatttatatgtaatttagttattaaactttaatttgacactcacataaatagtaaagttcactcatatttataaatttttgattaaatttgggtacaaagtactaagtttgtatttgtgatcaaacttaaaaatatagggtattaagtcagtattttgataaaacccagagtactaaatgagcatttgcttgatcttagacactataccagtcatttgccccaatgaatgctaagtcaaaacaatttgcaaaatttttgtttcatgataaaagtcatcatttcgttttgataaataaagttccaatataaataattgcgattcgtgattaatgtaattcaatatcattcaattttctcacgggtatcgtgttcgtgtaaatgctttcagaatttgtcgcatggagtgttacccccttggaaagatccatcattattggaagtgataccacgaaactgaccggaagatcttccaacacagttcttactcgggttcaagctttaattaatgcagtagaagtaggctgtgattaacatatagcttttttttagtgacaaaattatgctagtttcatataatagcatggcttagaacagattgatctaaatttggctagtttcctcttgtcaatcttttttgggcaatatgaaaaagaaaattgtaaatttgtaattctgtggaggtaaaatcctatgtagctggaatatatataatgtttacactgtttctgacaagaaaattttgactgcaagaaacagcattagattcaagctcaggttttggatccaaaccactatatatcagctcctgctgctccagcttcatctgcaagttctccttcagcaaaaacaggcaacccttacaacctgcaatttgaaaattttaaggtaatcagttgcaaccaaagtggctaacaaatgttacaacaaatgattcttcaagatttttaagtaataccttcccactaccatgagacccctcaaatcaaacaagctatgtgtaggtgtataaaaccatatgataaaaaaaagaaaacatgattatgaagattattaagtattaacaactcatttatttcagtccaaatttgacaaccctatagaaagattattgtaacgtgataaatgccccaactatgaggccagttcacagctaaagagcacaatagtttatacaatatatggaaaaatggaacttgattagaaatttgtcttttgtgatataagagtctctttgtatcaatacccaatttcacataaaattgcatttgggaaaggagtcactaattttctttctacaaatcggtttattgtcatctatttttccttacattcattttgttcgtttacaatcttattagataaagttaacgaaaaacaacatcaacactaatcactttgttatgtttattaaaaatcacactaaacgtaaactttaggtttacattctaataacccaaatcccgtaatgacttcccttgaacctaaaaaagactttcagcagagatttctactcttacacttggaacatttcaaatccgtaaaaaaatcataatcttttttcttaacaatattgattgtatagcatctatatagatcactaatcacttgttatgttatttcccactttcaaagacaagttttgcaagaacaaaaaaaatataaagaaaacaaactaaaaccatatattaaaagagtaagagcaattatggtcataaacataatttagtaattccacacttttcttcacaataaataagtggtcctaagttcgattctcccctccccaatatatatatatatagagagagagagagagtaagggcaatttgatgtgtaattgtgggcatgaaaattgcaaagcgagtcgacatcaagggtcttgccgtgaagggtattctctatttcaccatgcagtaaaggtatttttttttt

SEQ ID NO: 47904 - DNA, 1479 bp, Cannabis sativa
cgaggccttacgacgggggttctgggtctgtgtgttcgacggtaggggttctgggtcggggttagtgctatagagtaagatagttagagagagaagctttttttgaaatggaaggatatttttgggaggaaatatatatatatttatatactatttctaattgggtggtatattaaaacaacatgttttacatttaaacatattagaaaaatgaatgtcgttgctacagtgccacggcatgtatgtcgtgctgtgcactgtagtcacacaacatatttgatgaggtaattgaaatctccttggagacaaatccaacttcaaaccacctaattgcaatctccttggagctactctaagtgcatgtcggtctgatccaacttgcattttgaaaaattcataaaaatatgtatcatgttgtatcagataataaaaaaatatatgtcgcaacaatttatagttggctggcccgacacagttttatcatttttcttaaacacaccgattcattttttatacgggctagaattcgtattctatatttttattatatttaataagcgaattactaaactatatgtatctttatttcataaataattttaattattttatacaaattttcaaccataattataatcgtataaaaaaataattatacttattaatctatatatttactatcaatttaattgatttataattaataaaaaatatttataattatcagattttttcatgggccatgctttcgggttagtgtattcatgcttacttgttatgctttcgggcttatcgtgccgtgttgtacttaaattcatattttcgtgtcgtatcctgtcaattcttaatatcatgtcaaaatatatattttttcatgttgcatcgcattcataccttccaaatttatgccaatttatgttgtgtcaaaaagctcaatctgtatttacaattctactcgtgactaatgatatactgtaaaattaaatcactcgaaaactatttttttttctttgaaaggtaaaaataaatctatcaagataaataaataggagtaaatatgtaatatctcaaaaacttaattataaaaaattagggtttattatatattatggataattagagagtacaaatgggattatgatgctactagtctaattcagcgtgaattatgaattttgtcataagtggataaataagtgtaatttattaattatagagatttatttagaatatgtgggtataatgtgagttatttgtgtaattaaaatatttttcaagtttggcgactttggagacccgattggaggccaataatgtcacaacaggttttgttggcagttttaattgttattgaggtaagttggttttggattaacggggtatttcagggtactcggggttgaccaaataccctagggacagaaatttcttagtagctaaaaatggtaaaatatcttttgttaaattcttttattatta

SEQ ID NO: 47905 - DNA, 626 bp, Cannabis sativa
aaactagcacgagctcagaagatacaagcatgaaacggcatgaaaaatacgggtttgggcaagacataacacaaaaaaaaaaatatgtccttaagcacgacaatacataagaagcaggaatagactggcctaaaaggcacgacacacgacatgcccgaaaaacatgacacaacatattaaaatcttataatttattaatagtagtaataataaaatatgcatttatcagttataaataagttagaataataaaaaaaaaacatatatataatactgaatattataatattataatgaaaactattaaaacatgaaaaactatgattatatattaatttatttatagggtgtgataaaaatttgagtatttataagtaaatattcaaattctaatgatgctaataattttttatatatttatttgtaaaatattgttaaataaatatataaatataactaaagttataaaatatacatatactttagtagttgtgaaagaaaaatatgaaaaagtaaagaacgaatatgaaaacggattagcatgtttaagaaatacgggttggcatgaatccgagcataacacgaaaaatactgagcctacgctaccctttaaaaatattggcacg

SEQ ID NO: 47906 - DNA, 2657 bp, Cannabis sativa
  modified_base (2120)..(2122): a, c, t, g, unknown or other
ctcacggtttactgtagaaaacatatgagctttcaaagtcttttacagctaagtaaagtaagtactaactaattaagcattaattaatccactttcacctgcattgacaaagacttttattattttttaatttatataaaaatatcacaactttaactttttatgtctgtctttttgtattatgaaatattaaaatatgtaaaataaaaaataaaataattaaagaaaatataaactatcttgtataaaaataaaatataactactggttttttttagaaaattttcattgattattaattagacaaagtttattacatgaaatatagctgataatgcaaaattaacaacaacaataaacatatcaagtcgaaaaaaaaactcaatctcaatgaaatatctaataaactaactataatacacctataatcaaaaccaatggctattgaaaattaagtaatatttattttctaactaaaaaattatttaaatcatacaaaatttaataaatttatctatctttaattaaatagtttaatttgccgtccctttaaatagtttagaattaaattttatatttttaaatatactaaattgaattatccagcaaaaaaaaaaaattactaaattgaattggttatacataatctcataaaagaataaaaaaaaaattatttaatatttttgcaaataacattcctaagtctctctataactaacacaatgttaatatttaaatccttaatgtgtaattatttcatcatcaattagtatttattcacgtattaatcaaattaaattatatatatgaattagtttagtagaattattatgtataataaaaattagttcaaaataaataaatatgtaattttgtttattatacttatacattatttttctctcttattttagttccttaataaaattaattagaggcaaagtctatatacacccaatatctttgtacgtggtatatataactcataatcattaaccaatttctatatttatttaatgtgtataaatttgtataacaccacctcacatataacctaatcatacaattgacttttattaagagcagaggtatacatgatgcttagtatatattatatcacatctaaataaaatcattgggttctttcaaaaaaaaaaaaaaaaatcattggctaattacttaatatatatgagaatggaaattaatagtggtgcacacacacataccccactaattttttttttttttttttttgaaagaaggcatgttattcaactcaaatcagctgcataccccactaattttaaaactacatactcaacacatatatacttgttcagttgttctaatatattcaatatcttacctatatattatttatttatttatttttgattattttttattttttattttttgaaaagattttttttttgtttttttttttgattatttaattatttattttgccttgtttgagtagttatttaatatttttcttcttttagtagggacttacaaacaagcttagtttcatgtccttcttactaatctaaactatacatatgtattaggaaaaatatgtaggtataccttttcagaaaaattgttttggtatagtctctatatgtttcagcgtctaagaaactttttaaactaataactttttttatgattgtatatattgtaatattttaggacctcttgtaaatttttaaaaaattccgaataatttatagtattaaaataaaagtttaagtaataggagtaggtaacatctaacccaaaccgatttaatctaatccaattacaaaaaattagatatctaattacaataaaataattaaactggatattcaattgtaaaacttacaaaaatactaaaattttgtttcttttacaaaaatactaaaattttatttcttttacaaaaatactgtcacacggattttttcaaaaataccgtgtttttataaaacaacagtaaaacacaaaacacaataactaaaaaacaaccataaaacaacagtaaaaacttaatacagtacacagtataaatttgcacaatttttttgaaaaaaattccaccctacagtaaaaaagtaaaaaaattagaaatnnnagtatgtggtgtaaataatcctattaaaaattggattataatttgattggatcgattattgaatgtcaatctcataatctaattaaaaattgatctaatccaaatacatatatatatactaaaataattgacatctaataatctcaatagtcgaaaaaattaaatcgataattggatgatatctttatatatactaaaaaaattgacatctaaccttagttgcttatcactcttgtaagaaaaaataatcacgtctgcaataaaatatataaatttttttactataaattattcaaaattcttaaaaaatttacaaataaatttatataattatagtatatacttttattaaaaaaatctaaaatattattataaataccaaaacacataaaaacatatcaaaatagtgtgagatttttaattttaagtgtagcgtaatgatatgagcattgctattaggcaccagtggtgcctagtaccttctcgacatgtcgcgttgcgattggctagggatactccctaaaagctattatat

SEQ ID NO: 47907 - DNA, 1273 bp, Cannabis sativa
tagctggctcacaattttaaacaagctttttcacccaaatatttgaggtccaagccacacagttgcactcatgttggtataaatttgacatcttccctcttgaaatcatccttgggattccaagttttcataatcaagttcttcttgtcaaagaagatgaggccatcatccattgcactatctttgtcctcaatattattaaagccaatgataaaagttccatgagctagtgctcccaccttatttatccccttatccctctaaattctcctcacaaaaccttcaagaatgtgcagaagccgacaagcccctaagaaatagcgcacaatggatattcgccaaaaattaatttcattttcattatgctcaagctcaattttgactcttttaccctcttattttttttccctgtttatcaccacccccttctaatatatgaggatcgaaacttaactctagatttttcacaattttaccatatcgtaagatataaagggaaggaattttaccttgagaaattgcatgtgccaccttattacttgcttccatccaaattgataaatcttgcctaatctcactttacagttcaacaacagctctgtggaactagggcgagataatcgatcccatgccctcatcatcactctcctctgttgtaacttccaatgcaagtcacccctaaaattgcatccatcgacctcgttttaattaccggatctcaagattttggccttcgtttcttcttcttctttttcgttgttctcttgctcttccctatattcagtttactaaacactatatagtagaccttgttttacatgttttgcaagtagttggcttccattcataatgaatagacgataaaaccaaatcacatgttcataataaaactctatattatgtagaatttcttgaaataagcttaccgccaccattaccaagcatattgaattcgttctatctctattctgagtcattgaatcttccttgattgacctttcgatatgccttaaacatgaataaggatctttggccctattatttaaattctaaatccttgatttgaatccaattagggattgttccaatattctcttccaaaatattcaaatttagatcccaagccttcatgaaaaaggatttcgtatcgcattgatgcctccaactaataccttatctcggtcttccatcgaagaaaatttaacagttaaaatgctctacttgtatccaaggattagcccccaataccagatgacaatggattagctctaga

SEQ ID NO: 47908 - DNA, 1281 bp, Cannabis sativa
tcactagcgacctattggctccaaaggaaatttcatccaactaaccaaataaaatatgataaagaaaacgtaactattcgtatataatgccatatataatcattaaacttatcttacaatcatattgagcttctatccataatctcacgtttatattttttagtatctgtaatatatattagtgaatttaaatctttttcatatgtttaaataagcattaaatatatattttaaaggatggtaattattctccacatttaaataagcatgtagtatatattttaattatttgatagcagttcattagtatttcatagtttcttgcaaagtgctgttctatttcttctaatcaaattttgaagtgtcgacatcttgaactcccttcaattcgtagcacttgtacacttcatttcgaagagtgtctcacatgcaattttcttcccgaagagtgtctaacttgcaatcctccttctgaaaaatgacttacttgcaatcttcctcccgaaaagtgactcacttgcaatctccctctcgaagaatgactaacttgcaatctttctcctgaagagggactcacatgcactttttcctctaaaaaaggtgactcacgaacaagacttctcccgaagcttgattaacaatatccaaggtgttcaacctgcacaatttcaacaagaaataatacagagtaacacaataataaaatactaagaacttgttggactcaagttcttcacacaacaaagaaaacactctctaactttgaaatataatttagaaatgatacaccaagagagctaaccaataccagccacttaagggtgtatttatatactttagaaagtctctaggtcgtgctcaaacaaccaagaaacgatcaagtcattaaatgaaaatcttcccaaaaagaaaagtcaaaatctgtttgaacagactgtcagtctgtttaaacaaatacaatgaacctggacagtttttcaacaaagtttccataaacaaataagacaactttaattgacaacattaatacccgtagttgtacacggtttcttgggcaagaaatcagatcaaaagaaataaaatatgaataagaattttcttaaaaagcaaaggataaaattatatattctataaaaggaaaactcatatttaattcggtaaaaaaaaaaaataggatctgatcttgaaaaaccttttcttacaagaaaaggaaattatatttttgaatttaatgaataaacaattagacacaatttcaaaaataccacaagtattattttt

SEQ ID NO: 47909 - DNA, 1257 bp, Cannabis sativa
  modified_base (34)..(37): a, c, t, g, unknown or other
ataattaatcataaacaactgctaatttccaaannnnctaagcgggctttacatttaagctacgcaaaagaccaggccatctctttaatttcaatagcatctggggctctcaaaatatttgagttctcctcgaaagaaatagacggctgaatcagagtataaaggtatacatatatagagtgtgttttcaagaaataaaaatatttttaaagtgggataataagtactacccactgtcctcacgatctttcacccaataaagaccattatcaacgatagatctaacataattttgcttgtgactaacaatggccgaatcatgaaagaaataatcattaagatcctcgtccttataccataactcaagggatttttgatgccaaatctcacattgtctgaaagagatttcctccacttccaattcgatatccacttcaatattgaggttttcttgggaatggattcttggatataattaaatgagaagattacttagaagcaccagtttctccttgtagtacccgaaatgagccttgttccatcaagctaatcatcttctagtactattgagtttcccaactaattgaaagcattgtatcattatccatgagactatggagtcatttataaagaagcaaggattggaaggtttttctgggcttaaacttgatatgtccaaagcctatgatttgttggagtggagttttttggagagcaatcttaaagccttagacttctgtgatggttttataaagctcattatgaaatgtgtgaccacggttccctcatttttgcacaatagtggcccacttaagcaattcttcccatccatatggattgggcaagcaaatccgctatctctctaccaattaattctttttaccgaagtgctttctcaacttcttttgaggaaagagaggcttggtaatatttatggattcaagctcggctcaagaggtccttcgttgtcccaccttatatatgttgacaacgcctttcttattagcaaggttaccaaagaggttgaggtttattagtagtgtatttactcctattgtgagtgttctagctaataactcaatgttagcaaattagttgttgttttctgacagaacacaaatattttgatcaaatttttctctcttggagtttttaagatttaatgaaatgacaaaacaagatagatttttgagaaatttgaacctattttctaaaagcaatgctatagattttggttcctccaagacaagatagcct

SEQ ID NO: 47910 - DNA, 1933 bp, Cannabis sativa
  modified_base (1506)..(1508): a, c, t, g, unknown or other
atcaataggttgattgttttgctcatgtatcttacaataggaaaaataatcactgagagttgtttcctagatccaaaagagagtacttgggttctcccaataactaaaaagtgtatcatgcctgaatctaactggggctcgcgatcgtggaagaactggcttggaaaaaagagcaattttagttgtaagatatttaatgaaaccgtcattggaattgagatctcattcaaagagaaagatatcaaatatctagagtttctttttgtatattatatggatgacccgatctgcaaggaccatgatttagaattatttgatcatctttctccgaggaagaggtgaaatataatcaacttgaatttgacacaactaattgaaatcttagtgaaagactgaatttgttatctcatgtttgcttttcgtgaaaaaaataccaattgacgtgaagggtttctttaaacaacaaggagttgggtcaactattcaatcaaatgatattgagcatgtttcccatctattcttgagaatcgagtgggctatttctttgtaaaattgtgctcaatttcatatgtggaaattctgccaagatctcttctttggttggggaaagaatctatacgaatcaaattttttgaggaacatatcgagagaaaattaaatttggttagacaatgtgtggttggaaaataaggatagattttttagtaaggtacggaatgtatcgttaaatattcaatatgattccataagatctagtttcgttcaagtaacataatatagccgattgaaaggatctttttatcaatccatacatcattttgattccaatagtaatgagaattcaaaatatcacacattgatcaattaaagagagattcaacaacgaaaagaaagatcgattctttgggatccttcctttctttaaacagaacgaaaagagatagaatcagactaattccctaaatgtctttttggatatttgtcaatgtcctgactattcatagaacgtgagaagcagatgattattcatctgcttctagaagaaattgaagaattttttggggatcctgcaagatccattcattctggatttgaatcctattgagaggtccattagagattagaaatttttgaagaaagaacaagatgtttcttttgtcccttccaggcgatcgaaaaaataaaaaaatagttaatatattcaagataattacgtatttacaaaatacaatctcaattcattctatttcatcagatccaggatttgctatggttccaaagagtgaacttgatatggacagttccaataagatttaattcttgaaaaaaaaaattctattttttgatttagttcatctattccatgaccagaacagggggggggatacacgttacactataattttgaatcaaaagagagatgtcaagaaatggcagatctattcactctatcaataaccgagtcatatttggtgtatcataaggaatttgccctttctattgatnnntacagattggatcaaaaacaattcttgaatgaggtatttaactcaagggatgaatcaaaaaagaagtatttattggttctacctcctattttttatgaagaaaatgaatctttttatcgaaggatcagaaaaaaaaatgggtccgaacctcccgcagaatgattttgaagatccaaaaccaaaaattatggtattttctagcaacaacataatcgaggtagttaatcaatatagattgattcgaaatttgattcaaatccaatatagcacctatgggtacataagaaatgtattgaatcaattatttttaatgaatagatacgattgcaacttcatatatgtaattcaaagggatcaaataggaaacgatactttgaataatagaactataatgaaatatatgatcaaccaacatttctcaaatt

SEQ ID NO: 47911 - DNA, 1933 bp, Cannabis sativa
atttttttatcacccaaagaattatcatatgagagaaatcaagtttacgagtcagttatattaatgtttagaactttgcaaagtttgaattgtttcataaatattttcaattatagttattggctttaccatcataatcatgagtaattttgaggagaatggtcttctactcttctcctctccgtgtccttcttttttctacggtgtaatgttgtgtgctgattctcgtgctagtttgttgtctgccttttcagtgtcctgttttttatcattttatagtgtcgtgtgttggttttttgtgatgtttagtcctttagtagtgtttttctgtttcttcgcaactttcgtttggctcttttcttgttttttgtcgttggttcccttaccttttcttcttcgctctttcttccttttggctcattcttcctgttctctgtgtttgtgttgagttttgttgtcattttgtttttttttttttgtttctcagggctgttgtgttgggtcttttgtttgtttgttgtggttgctggagaggttgtttgatggtttatttgtttgttgttgggtcattatggtgttggttagctctaccaaccttggtattaagggtaaatgtatttcttatgatgatgctactgtgtcattgaatccttgtgccacgcctgtttaagctcttaccaccttttgcctttatgggaaactggtggctcctatgtttgtggaggaatccatagtgcatgattttgtgtctaaagcctggaagacacctgtcacaatgggagcttttgttgagggcaataattatgagaactattttgtgtttggttttgagaatacttatgacagaagctggactctggagaatggcccttagtgcgtaaagggccattctccaagagctgatggtgtcatttcgatctcctctctgcgattgtgggtgtaaatacaccttctccctcatgaatataacattgagagctctagctagaaaagtgcttttagttgatttgaatgaggaaaagccagcgtcctagactaattagcttagaattcagattgaaatccagattgaggaccctctattctcggggtgtttttttgagttgagaaaaggtgttaaacgttggatagagttcaaatatgagaaaataggaattttctatgttcattgtggttgtttggggcatcaaaggcgtggatgctcgttatcttcacctgatattgtgttgagcaccaatggaactccattccctctctatggaccttggttattctcgttctcaacctatgtcgatgtgttttctggtgctaagtcatttgtttcaagcagtcgcactatcaatgccatgtagtaattggtatcgttggtctcttcttcggctgcagctgtggctccgtcgaatagttttattccagtcttcccgtcgtcggttttgaagatctcgaggaagaagtcaagtgtgacaagagggcctcgggcagtcaagagtaccagtaagcaggcagtttgggtccccaaaatctcatcagttaggtgtgagaaatatgtttccgtttatggtaatggtgtcgatgttgtttcttctgttggaagaaaggagactgagaatttacctggtttcaggggtgatactttgaaccgttgagagataaagacaaaccatttgaatgtgttggatgaggtggcagctagcaatgttgaaagtcaaactagtgggtttattgggccgaccccatcctctcttagggtcgatatcattaagcctagtggtggggaggttgaagctattgaagttaatgaggttgcaagaaggtgagaccgagacatgatctagtcgcacattatgaacatcatcgtgcctacaaataagcaggaccgagagaagctagtacttattgcgtatatatcgattagtatatctctcatgcgaca

SEQ ID NO: 47912 - DNA, 1620 bp, Cannabis sativa
atcaagtccatcatcttctgatgaacaacaaagcttccccatcttcttctaaaccacttctttcaatacaacaacacaaagtcaatacaaacttttttgtgtttggttaatgaagtaaagatatgaccaagtgttttgcataatttctaggtaccaccatactaaaccaaagtcaacttgacttgataatgtttctttttttaatctattttgtcattaaaaaaaaacttccaattccaaatgttgaactgtactatatgctacattttcaagtgtttaactaaaccaccaccaccacaccgcccctcctagttgacacttgaaagtttctaaaagtggttgtttgagcaaattgaccttttttaactaatcaacaacatgtcttctacatatgacaatgacatcaaattatcaataactaatttgtttacatgggaatcttgtaacttctccttaaatataattttcagtcgaatattatagttggggtggccctagcagtggttgagacttcaaaatgatccaatcagttgagtactactatgtttttatatgcttattaagtatgcacttgcctatttttttgtttagtttatctattatgaaagatacccaaatcttatccccttaaaaagttaacatcttgggctgttgcaattaaaacattctaaacccaatttttttttatatattattttttctgttctttctttctaaagaaagacagaaatttctcaatgggatataaattattacaagtaaaaaatttctcgtaaagcgaaataagccaatactgtttacaataatacaatggagatcttaatccagaacacagactaaaactttaagatttcttagtgtctttacaaagactccaccaagttattgggtaactatcaattataatcctacagtgctatgattcatctacatcagtaaatcttagaagcaatatcattaacttaaatcatgcttgttaagtaaatcccaagtatgtctgtataagagaggaatcccacttctttactttaaagtctgaagctgttgttcattccctgtttttactaactacaaaaccaaatcattccatctatgattatgaaaggaacataaccatacatggtaattgagtaagagattataaaaaaaaaaaaaaagaaacttatttacatgtatgagaatacctcaagatttaaagacttttgaaacaagagatgttagtttcatttcatgtacacatagacacagaaagatgttcacataagtaactcaatttttagtataacaattgttgaagtcatttgtgagagcactgaaacaagtattaacagaaggtcaatcaatgtaagagatttcgcagctccatcattacctactaggccaactatgtttaaaagtatccaacttgaccgaatatcgggcttaagtgtttcaaagggtctccaggaactgagcgaaactggggtattttggctcccagcctatttccagacgagttttcgagttgtttaatttcttacccaaaggatcacttgttcctgcattaaaaccaaaaaatatggtaatagagagaaaataaaattggcccctatacgaagaacagggaaaaataacaaagaa

SEQ ID NO: 47913 - DNA, 2324 bp, Cannabis sativa
gtatactaataaaataataaaagtcaataataaaattgtgcatttacggtgatgcaaattttacatcatagtaagcgttgtgctaaatttgccatgataatatttgttatatgccaaatttagtacaatatttattataagccaaatttacataatattttgatactattatttttttaagtgagctatattttagttttatatcacttatttatatcattagagatcctcataggataatagaataatatgctgactaaattaaagtatatacaaatcttttaaaattagttttgttatattaaatattaatttgattcatttaaaaaaaaattagcataccgcatgcacgttttgttttctatatatagttgggttgggtgtacgttcgtttgataaacaagaaaaataacatttttattgtaaataaaagttggaaatcgagaaggtcctgctttgaaaattgttggctcagagaaccaatgtgcgcataagttattaaagatatctgatccaactgcccttctaatgctattaatgataagatagcattttgtggaaacattttgcaggaatggggaaagagttacacaggcaatttcaaggacagaataaatatctcaaaaaagaggtccattattggaaaagagggagagatgatttatctataagaaagcacaaagaagctgaacataatctttttgaggtttacactcaaagagaggtgttttggaggcaaagatcaaaacaaatatggttgagggaaggagatcaaaatagtaagtttttccatgcttatgcctctactcaaaaaagaattaactctctctctcaaagcatcaaaattcggcttgttattgggtggattggcaaaatggactgtctgatgttattaagaattattttgcagaattattttcttcttctcctagtgcagctactgttataactgatagcattcccacaaccattactactgatcagaacatgagtttacttgctctggttattgaggaagaagttagacaagctgtaaagcagatgcaacccgacaagtcacctggactagatggaatgacaccaggattttaccagcgcaattggaacactgttggatcggatgtagtgaagctggtgagaaatttcttttgtactagattgttgcctttaggtttaaatcacacaaatatggtcttaattcctaagaagaagaatccaatgactatgggtgatctaagaccaatctccttatgcaatgtcttgtacaaaatcatttctaaagtgatggctaatcgacttaaagagctattgccgcaacttaatttagaatatcaaagtgcttttatactagggcgactaatctcagataatagcatgatctcgtatgaggttatgcattatttaaaacggaaaagaaatggtaaggaaggttttatggctttgaagctcgattttagcaaagcttacgaccgtgtagaatggacgtttatcgaagtaatgatgaagaagatgggctttcatgaacactttgtgcaactggttttacaatgtgtatccaccgtgcaatatacaaaatagtggtaaagaaattggctctatcgttccttgtcgaggcatctgccaaggagatcctctgtcctcgtatttattcttaatttgtgcagagggattctcttctctcatcaggtggttcgaatcaaataagcttttaagatgctgtagagtggctaatggggctcctactacctcctaaatgctctttgtcgatgacagctacgtctattgtagagccaattacagagaagcctctaatgtcctcaacatgctccataatacttttcaacttgcttcaggcggccaaatggttaatttcacaaaatcttctgtcttttttagttctaatactacaaggactgttagagatagaatttgtcaacaattgggcatcaatgaagtttacgcaagcagcttttatgggcatctttttgaaatagatcgagttctaattatgggcatcctggttgtttgaaaagtctggcatatactctgtaaagagtgcttatagatttcttcaacaatccaaggaagatgtccaacatggtactaatttgtggagagtcttttggaaaattcagattccccctaaggtttcgcacttcggttggaaggcaatcacaggttgtttacctacaaaagttcagctacaatcgaaacatgtggcagtcgatcttcttagccctcactactacaaatatcagaattcgcgacggttctaaaaatgatttttttcgggaaccgttgctaaaaaaattaagtaactattt

SEQ ID NO: 47914 - DNA, 2855 bp, Cannabis sativa
gtcgtcaatggctgcttgctgagctttcaatgtttccacctctttatccctccattcagcgacagacgcctttgctcttcaaatgcaaggttcaatgcagcatggagctcttcctggtcatgatgcaaggtattagtatggccttgcatgagtccaagagtagcacagaggttctggatctcagtgtcatctccaacgattgtttaaacatttgttgctggcggaactccagtattgggaatacccagattgactgctgaactgatatttcaagtaacttgcacaccgggtgcgattccattcagaggagacgtcacaccatgacctacggtcggaggttgttcatgattcatggctggtggaacccctgcatttcttggattctgcagtgcgggatccactaccggtggatttgctggatcgatcacgcctctatgagtgtgtaccaccattgtgtttatgattaaatttgaggagaagagcgaatttaagattctcgctctcaatgaaagcactaaaatgttgacctcacttttagccaacgataatgagtcttaattgtaagcgataagtaatataatatatataatatgataaataaagaacacaatttttaaagaggttcgaccccaagcagttcggtaatagcctactctccttgatttgtattgacttaagaacaaagaatacagtgattcttctcttagagctcttacaatgatatctctgagtatactctcttagataattcgctctaccccttgcccagtgagaatagatcactatttataagattatgagcttgagggaaagtttcccttctgtttacaatgtctataattgataagattacacattaaatatagaatacactgattgagatttggatagcttgccatatctctttgatatgatcccagagttatagggattgcttccgtgactcacgatgcaagtgctgaagttgctaagtgttggtaagttgttcgaattgcccactgctcagctaggaggacttaatccgtgcaggtgtatgcggtgttctgttcggcatacctccttcgggcagatatgtggagttgattccacgagtcaccagcatgtgatgccacatcagagtgtcaaaattgagataacaaaaccgaagtaaaaccttttttttttcttcggtacataactgaagcaaaataacatttagcatcattcaaaattgaagcaaaaaaatcaatatttacgcctacggctataacatcagttacacaaaccgaagcaaattgtttatgtgtcattttaaaaccgaaacaaaagactcttttttgtagtagtgcaccttgtgtagaaatttagataacacgttacatatcaacattttatataaaatatattatatataaataaatggtcaagccacaatgaccgacttttgattagatatacatatttattgagaaacgctagagacaatttaagttgtcaaacactacaaaaggtatcctattgtaatttggtgcaatgtaatattagatcctatacatttaaattaataaataacattaaggcccgtttgacacaacttagcttttagagaagctaaaatctgctttgtgataaaaatgtatttggtaagcagacaaaaaataattttttgaagaatttatggagaaactacaactaaaagctaaagctggtatatatatataacccaacttttagataaagctctattaattaaaagactatgataaatttatttgtacaaaaactatatttatttatttattatatattaaaattaaaaatatttaatataaaataattataataaaataaataataattaaattaatattaacgaatcacatcaacttataagttttttatatacttgagtttctaatttttttttacgttagataaaatattttataaaaatactataaatcaaatgcatataaatttatattttgaaaaaaaaaataaaaatatataaaaaatataaatattatataaaataagtttttatatacttgtaattataacaaactagattataatattatcattatcattataataaatcttaacaactcaaaatattttaaaatttataatttatcaaacacttaattctgtttttttctagagttttgctacaattaatttttcttacagcacaactacaactacttttctcactactcaactgtgccaaacttgccttaagaaccactaaccattcactacacgctacatcagtgcaacatttaacactttaaaatacttaataacaatacttataattatatattacttcactataggctcgttacaaataaacaaaaatgttatgtttaatataacatacaaaacagatatatcaaatacaaaaattaatattgtagataaaaaaaataaaaaaaattataaaaatatattaatatggaaaatttattattttactctttgaatttttttatttacaaaatacatttttagtgaaataatgaactatttttgtagttgttttttagtacatttatagttgtattttttatgagatttttttttagttattttatagttaatttataattgtgattgattaatttcaccttgttttttagttttagtttttctttttttttttttataactttttacaaaataaagtatttttttttgtaattttaaaactttataagagtatttttataatttaaatttttaaacataagaataaaataatgatatttttgaaaatttctcaaaaataaaaataaaaataaataacacataaataaatgtgaacgcaaggaaaaaaagtgaagaaaaaaagaaaagcttgcatggaatgc

SEQ ID NO: 47915 - DNA, 1311 bp, Cannabis sativa
ttttttgaaaacaaaaaacagaaagcaataccaaacatgctcttaattttttttagatacaaagtataatatgtatgaaacataaattaaaattttcatgaactattacattggtgttcatttatttattattatatatcacatttatattatcaaaaaaatattatgttctttctaaaattttaataccatgtagacttttttattatttaattcaaaataatgaagaaatatgacattttataatattaattattttttattatatggttaaaaataaaaatctagcaaaatagttccttatattattaaagaatttaaataattttttttaaaaaaaattcaacacaattttataacttaattatatttaaataaaaaatcatatacaatttaaagttttcaaaaataattgcaaagtttctaataaataaataagtggaaccaaatttcagcaagctccgctccactcggtttcactttgaaaatcactggctcaaagacccttcctttgctaccattgttaattcctcttgggtcaattcccagaacctttctttaccaccattgcaatctttcctggacaagcaatctcactgtatttcggatattaggacttggagtaaatctcaacatcctattaagctccaaatatcccgtactcaggcggatcttcacaacctgttgaatgattcccaaccgaccccccattttatctctcaagttgctactctccaatctagattggatggccttctcgttaaggaggaagtttattggaaacagcgttctcgagtcgactggctgcgtgctagggataaaaatacaaaattttttcatcaccgtgcctctgctcgaaaaaagaacaatctcattcgccaaatcactctccctgatggatccacttcccacgattctactactataacttcccaattccttcacttctatacttctctttttacttctcaaggtgtgtgtgatatggctgtaaactctcttcttcaagggatttctaacaggctttcccctcatcaagttgcttttcttgctgaacctttcactgagactgaggttaaacaagccttatttagcctttcgagtgacaaggctcctggccctgatggtctcaactcatttttctataaaagtaattggtccactcttgggaaagatttcaccagagctatgctccaaattcttaaccatcaggaacacatctcccaaatcaatgaagctatagttgttctcatcccaaaaaagaaaaaccccaagcttgtgcgtgattttagaccgattagtctatgcaat

SEQ ID NO: 47916 - DNA, 794 bp, Cannabis sativa
aatactgctatgtgaagtttattatttagttccttcttctccatactttttgatttgtaggataaagatgtgctctcatataaatatatagagaaatgtaagggacacgagaacaggtggtaaatcattatgggtcccaaatattttggtttaatataataactaggttgaatattaattctaataatgaaggagggtgaagaccacaagctagctgtaatgaagggtacaaataattaaggaaaccccaacagatcagtaaacaaaagatgttcattttcacatgtattgacattaaaagagcaatatatttgataacaatctttattcttgcacgttatttattgacccttttaactctttttttttttttaattaagggtttatatattacaatgtataatctcggactcgaacccaaggcctccaacacacacgtacccttttatggccacttgagctagccttaagttgaccttttttaactctatacatgttttatcgactcattgcattgcattgcattttttttcttcttcccatgactcaatgcatgtttttagtgacgtatggattgtaaaatagctatttattttgatattttaacgattttagttaaaaattattaaaaaaaaaagtagaatgtatatatatgatcttacaactaccaccctattttaagattaaatataaagtgttcaatactataccgatataatatttttttaattaatatatgattcttcatattatttattaaattaaaatatataaaatctgatattaaaatacac

SEQ ID NO: 47917 - DNA, 1287 bp, Cannabis sativa
tttatgtgttttacttgtatgcgctcatgcatcacgtttatagtaattctgaaatgaatttttttttcaaatataattatgtcattttagttattttaaaaacatatactatgctaaatatccttaatgctttactagcaattgaaaaactaaatggtgaatatttccttaaatgaaaatttaatctaaatatggtattggtttgtgagaaccataaaatttttccttgctcagtagtatctctctaagaactcatgcattgcacatgattttggtaatacatgaggcggagacacgtatgtctatcgtacacaagacgactcaagtatgcattattcttgaatcgctcactcattgcttcaaaatgttcaccacaagcaatgtgatgaacaagatacagttcaatatgactcaatagttgaacgagttgactatgtttgaaaaccttgataatgataagtccaaggaaggtgagttaaataggttgaagcaatgtcaaactttccgtattatttggataagaaaaggaaatgggaaggtaaggaaaacagcaatggcaagcacaagtcgaaaggcaagaaggcacctaaagccaagaagaacaaagtcagccctaagtccaaggacaagaaaggcaagataagaaagttttccattatggcatgatggaacactggaagagaaactgtctcaagtatctctccgagcttaagaaaaataaattcgatttatttgttcttgaagctaattagtggaagaggatcaatccttatgaattgttgattcatgagccattagtaattttagttcttcaaagttaatacttgatttgttaagaaaactggctaatagaaaggtgaccataagaatgggtaatagagcacaagtgtctgccaagtgttttagaaaagtccgtatgagtttattaataatgagattactaattccaagtttagaacaccaaatttgatatgaaaaacaaagcaacagactttatgtgctcaagccaagtaagcaattaatgaattatttagggatgaatgtattatggaatcaacaaacatggctcattaacactacggtgaagaaatcctagcaaatgagtaagctaagaattaaggggctgcttcccaagaaggccaaggaagaagataaagcatggattctaatggtttgatttgtaaaaaattctaagttgtaagtgtaaattttttagcaaaatgtaaagattagtgatgtaaaggttggtttggagtaataaaatttcttattcatcaaaaaaaaaaa

SEQ ID NO: 47918 - DNA, 1546 bp, Cannabis sativa
atgagtgatgttgtttaatgtgaaaggttgtgtcaagggtgaaacacaatcctcaatatggcactcaaatatgcatcacaattcgatttggttaatccaaataaagtcattgtagccacaatgcatctttcttatcgagaaattattaatcgtttttgggtcaataatgtagtaattatattgataatatatttaatttttcacgatggagacatatatttataaatataacatattcacttatgaatatttatttataaagatattatgatcttatcttagaaaattgttcagaattatccatatatattaattaagaaatgtctaattcttttctgcaaaaaaaaaaaataataaataaataaattaatgtctaattctttaatatatatattgtaaatttttaattctatcctattttactatgcatttacactattacaatatgagtctttagaagttattttttcaacccatttaaaaaaaaaaaaaaaaaaaaaaaaagagtgtgataatacgtaccggcttaaaattgacaattgacatatagaggcagtttatgtagtaaaaaccgtaagtatagatatcaactataccctttagattcgattggaaatttgaaaattttcaagattttttatatataggtgcactcctttattgacacgtgtgcacctatggagtcgattattccctaataatcaacgacatagggttatatagaaaaccctaatcttcatcttccccacatcaccttcttcttcagcaagaacacgatagcagaacccacaacccaaaaaaccctcgccacccacctataaaaatctatatatctccctcatttctataccatttcaccccatttttttcttaaaatcttctattttcaatacctaaatctatacactaaaaaaatttgggtttttcccctatttcaccgtaaccgaccccattaaaaaaaggtggtggtataactccgaccactaattttagttgagaaaacgttaaatttatacattcattaaggtataaatatgatttatattcattttattaatgtacattgcgtaattttcgtttttgtaatatcttttgggattttcccattttattaacattatgctgctgtgtgtgcatggtggccggattttcccaccaaaatttattgcacattgtctcaatttgattaatggaagatttagaaagccgaaagcaactcatcgcatatgttgaaatagattgtgctactgctttgaggataatctctttgccaccaactgaaaaaaagctttcttgacaagcaaaaaggagattctataatttttcctttatttcaccaagcaatatttttttttatctctgctcgagtatatagtactatatatacaaatgaataattactaattttaccttctgaactttcaataatactaattttgttctccaaaatatacgacttgttaaaaattcccccttaacgtttacatttatagaaatttatgttagacatttatatgaataaactgaaacatatatgattatgtat

SEQ ID NO: 47919 - DNA, 1859 bp, Cannabis sativa
tttgtacaaatagatacaatacaaaaaagtaaccaattgatatctaacaaaacaattaacaactaactaactatataaccaatatattattggtttacatcccccctcaaatgaaatgacgaagaagccatgtaaagtttgcttttcggataattgaatctgtctatagtgagttgtttggttagaatatcagcagcttggtccaaagaaggaacaaatcgaactgagagcaattgtgctaagatttggtctcaaacgaaatgaagatcaatttcaatgtgcttgtacctcgtatggaacacaggattagcatcaagtgcagtggaactttgattgtcaacccaaagcacaggagtgtgtgtgacagggacttgtaattcagacaacagatagataagccaccttatttctgcagctgcattagcaagtaccctgaattcactttcagtatttgatcgagcaacaacttattgcttctttactgatcgagatacccagttctgtcctaaaaacattagatactctcatggtgatcttctttcatctatgcagcttgcccagtcagcatcccctgaaaacttagatcaatggtcggtttaagccataaaccttatgttaatatgcctttgagatacctgagtaaccttttacaagctttccagtgtttgaaagtaggagcatgcagaaattgacttagtttgttgctattaaaagctacatcagatctattaaaatacctctaacccagccaacctaacctatgtgcacccgaaatgctaataacaattcttttcttaatttctacatctaaaggcacttattattttttttttcacgatagttgttatagttataacatcatttttgtaaattttcttaaaatgtttcgaaatagtatacaatgttaaaaataaatttgtaattttgtgaacaagcacgataaactaaattataagaactctattttcgatattataaaatattcaaatttttttaaaaaattacagtgataataataaaattataacgaacaatattattaaaaaaaagttgagaaaactattctaaaagaagattacttattatagaatagtaaaaattgcccttaaatataaaacttaaaatagaagattataataataatggtaatttacagcataaatattaatgtttaactttcggttacgaataaatatttaagtttcatttttagcagtaataatatttaagttatatttctagaattctgtaagtactgaacatcaaatattaagtcattatcgaggtgtcacttttaattagtatatttaaactattttttttttttaaaaaaatttaataacttgaactaatcacagatcgccacataacaatttactttttttttttggatatggcataccataacaatttacttaacacatgcaactcaaaattaaacttaagtatataccaaaaattactcaaataataataaaacccctaaacaattaatcattattattattattattattattagaactctctcaagtctcaaccctcttctctcttcccgacaacgcatcacgctaccggcctctcccgacgacgacggcgacgacgctgacggcggcaacgcaggtggactcatcagtcccttcacctccaaactccgacgacgcctgatccacctccactccgatccgaggtcagttcatctatgctcacctttttttggttttgtttaaaatctgatattttgaactctgtaaatgttgtttctcgttgtttttgaatctatattcataaaaatttgcctgaaaatggagtggtcttgattgaacaatcaccaaatacaagtgtttggaaaaaacaga

SEQ ID NO: 47920 - DNA, 1172 bp, Cannabis sativa
ttaatcgcgaggaacaagctgaagttcgtcaatggcaaacttccagagctcgatgaagacgatgatgactttgagctatggcatcgatgtaacagtacagtgatctcttggatccttcatgccgtgtcgaatgaaatagctgagagcatcatgtatatggagaatgccactacaatttgaaaaaatcttgaagaacgatttaatcagaagaatgctcatcgtgtttttgaagctattagatctaagcaatccctggctcagggaactgatactgttactagttactttactcgtctcaaaactctatgagatctcattcaagaatatcgacctcccccagcctgcacttgtggagctatgaaaacatatcaagatcatcaagaggaggatcgcgttcttgagtttctggttggtctgaatgagtcgcacagtgctgctcgatctcagattttaatgcaggagccacttccaaacatcaataaagcttatgcatctatcattcaggaggaaagacaaagatctctgagtaacatttctcaatccctgcctaattcttctgatcatgataagtccacatctgaatctaattctggtcagtttgctggtagtgtccaaccttttaagcctaagacgattcatcatcattggggtgtggttggccacattatgtcaaaatgttacaggttgcacggctatccccctggacacaagctgtatggtaaatttcctaatagaaatgttgaatctgttgggaatggaaatgttaaaccatctgttgcaaacattgagactaattctgaaggaaacgagaacaacggtggtgatgttgttaaaggagatcaagacctggtttcaagtctaagtgttatgcagtgtcaaaggttgatggcattattgtctcaaagagcagtagattagtctcccactccctcaaaggaagcacctctggtttctcatttttctggtgagaatctatttctttctaagtctaagtggattattgatattggtgctacgcaccatgtttgctttgacaaaaatttgtttcatgatattcacattgacaatttagtcactcatgttaaactaccacgtggtggtaatgctagagttgaaggtattggaactgtgaatgtttttccaaatctgcctctgtacaatgtattgtatgt

SEQ ID NO: 47921 - DNA, 864 bp, Cannabis sativa
gatattgcccacctgcaaatacatttctcactcattcgatgcttttgacaaccctaaggaccacacgtgctagttataggtacctgttatatatgactattcttatcatcggtattatatctcacaagggtctccatcccaaaagatgtcccaccacattaaattagttttaaaggataactataatcccttataattaaggaaagtcgaactcttgacctaaataagaaaaaagactaataaaattttttatatcactacaccacacaatttgtggtgccaattgagtaaaattgtatatagatattatatgatctgcactttataatttataagtgacaatttttttttgataattaataatgtcacttatgttgggagttagaggatcaatcaatgatatcatattgaatttaactagatatgtgccaacatttttatagaatatgctttaaatttttcattattataatatctttgtttttcagagttgaaacatatatattttgtggcataactatttaaaattttgtattaatttaatgaattttttaataatattttttatattagtaaaattataattttcatctaattttattaatagacttatcttaaatttattaacatatagttagtaagtgatattacatgttttcgctagatccaataaagtaaaatctgacccttaagttagatgcgtcttgttaagtaaggttaagacactaattaaagtttatactacaaatgataaatacgtatcaatttaattaatgtttaatgcttatgttactaaaaaatcattaaatatatgccagttaaatttaaaactttaggtaacgaaatatctcaataagtaataaa

SEQ ID NO: 47922 - DNA, 1928 bp, Cannabis sativa
atatttccaagaagatcatgtaatgttccactaaggttgttataagataaatccaaatgatatagtttagcactagaatttagtaaccaagtaattgttgtaggatgtataaaactgtcatcaatgtcaattttttgaagagaagtgaatgaatagtttgaatgggaaagagatgatgatgaaatatgattaggtaccttgagaagttggcaattacttaagaggagttccttgagagaagtgagttgagagagccatctagggttgtcaataatcatttgagaagtgctttgaagaaaaagattttccaatttggtgagatttccaagctgtggaggaatgattccaatgatgggattcccacaaatataaagatctgtaagctctttgaaagagccgataaaaattggaatatgactaatgttcatgttgatcaggtacaattccttcaaatgatgcaattcggccaacgaagaatcaatgtcgccatcgagtgtagtgacaatttcaccaataacaatggaaacaacatggttggtttggtcatcacaagtgatgaacaaccatttgcaacagttttgagtggtgctactattagaccaagaggagagataacctttaggactatttaaagtggtcttaaactttaggagagcctctctctctttgggtatgcattggggtctattactactcacatttgtagctatggaaagcaacagcaaaaatcccaatacattaatgctaatactcatcattctcacacatcacacactataagataatatttaaaatttgtgggtttgccttaactgatagctagtattctatttatagcataacatgatgagttatttaatatttttaataacaagaggaaactttgatgattcttttcacatgaaaaaaatttccagctatttgattgacacataaaatgaccaataatataacttatattttgggttggataattcttctcaaccatctacgtacgtatacatctacttatttagatttttgaattatattatggtttcataggagaattattccatatacgtatacgtctacaaataaaaaagcaccttaatattaatagtaggaaatgtatataaaataattttaatattcgaaatttggttttattattgctcgatgtgtaccacaaaattaataattttgaatcttctgatcttatatgttatttcacatcaaaatatgtttattgacaaataattgaataaatgaattttcctatcattattgatttactaaaaaacaaaaaagttgtacccattaaatggactttgtgttgtaaagataaaactagctaattataaaacaagtaataattagtaattaatatttttttattcttttataaatctattaattaattattggcataagtcaccataacaaaatcggctagtttggaaagaattatcctcaatttttttgttaattgattatttccaagaacacataagaaacgaggacaagcatctttttaaatttctccccctaaaaaattagtaataaactatgttagtgcgtgagctacgccattcgtacgtaaatttttttaagtcaagtaaattttttcaaaattttggttaaatttttcatatataaactcaactcaagtcaagtcaacctctcattataaattcaaagtcttttaagtagaacaaattacaactcaattttatataacttatattttggggttggagaacaattattctgtaaacattaataattttatataaatttaagtaaaattggtatttttctagtatagatcagtttagatttttgaattattatggctaaaaacaaaaaagtctagagtagagactgagagcttgacttgacttgacactacaaaaaatagctatttttactgataattttttagtctt

SEQ ID NO: 47923 - DNA, 1039 bp, Cannabis sativa
gggttgtgcgatgtgggttcgggcgaaggggaagaggcagagagagtttgagtgaaggagagagaaagggtttgagttcttgagagagatattttttggagttttggaaaagtggtcatatattttcaatgttgtaaagtattagtttaagtataaatataaaggcattttatgcatatttttttcaaattttcctaattgagatggtttaacggtaaaaaactctaatatatttacatatatccgaaacttaaatattctaaatatgtttatacattttttgtttcaactttgatctttaaatttatttgccctaaaaaagaatgggaaattagtcaaaactaatttgtaaacaaaaactaagagatttgcagaatataagaagtaaaattacaccaaatcaactaaggaattttataattttggcccatttaaagtaatatacaaatccatacatactgcacttttgcatctctatttaaaaagactttaggaacagcattatgggaatatgaacctaacaacacatccacacaaaactttaagcttagcttttagcctatttcattttttttttcctttctttttttgaagacacaatgtcaaaattgctctaaaatattccatatcaaatattcagtcatgaattcttgtatgatttggctgttctattgatctccttttcaagctcttcaagacctccaacttgttcaagttcctacaccacaccacacccgattcagtcccttactcaacgacaaaactcactgcaccttccattaaaaagaataatgaaaataaaaagtaataaataaaacaaaaacaaacctttggtcctaaaaataacccataaggcacaccatcgaatttgtccgagtggtggagctacagtccgaaacaaacacaaaaattttacatcagattaaatcttgaccgttcattttctttatttaaaataaaaaaatgaaaattttatgtaataatctagtgcgggcgggtgtatataattaccttgtgagcggcagccacttttctaaaa

SEQ ID NO: 47924 - DNA, 2096 bp, Cannabis sativa
tttttttttttcaattttaaaagaaaatatgacaatcccaattaatctcacctatttggccaggattgtttaaaatatacaaaaaaaaaaaaaataaaaacattaaataagtgggatccgcggtataaattaataacaatctcctacactacaccacattgtagtggccatgtaccctcttttatattaacaaaaatgtagtgagaccattttataataaatcctcacagatacggcattttcaaaattttccaccttagaaaaatcctatatatataaacgtcaaatgaaaaaattggaatatgatttttttaggtgtcgaaaataaaaaacactcctagtgcagtaaaaacaaaaataatgttctgaggtaaaaactaacctgtgtatataaatcgaactatcgatcaactttctaaaaatctgtggaaaaaaaagggataccttagagtttttagactaaaaatatggtctaaattttggcttaaagctcaatatatattaggagtgacaaaaagtgttatcatattatgtcaatatcatgtcgtgttcatattaacacactttgacatgtttttctattactgattgatgctagagttgtaaagacgataaatttagaattctattagaaaatttatatattttatttatatatataataaaaaatatattttttaatttttaatttatttttaaataaaataaaattttaaattttaactcaacattgaatcactaaatatacatttttatatagttattttattattaataattatttattttattttattttgaaaaaatcgtgtcaaacgtgtcaaattcgtattaatcgagtcgtgtctattggttttatggtactaaattagatacattttgtattgccgattaacattgcaccatagctcaaaggatctccggatgtgtgtacattaaatcaaagcataaaataataagtttagaatatgttgaagactatcaggatacctcgaaacttctcgtatgttgtatcccttaatccagatgattaggatgatgcaattgaactcacagcagtatcttctgaattgatccaacgcacacaaggaatagtgtggtctagtaggataaagtgtatagtgttgttcttgttgagttctcaacacatgagcaagaacaattaagagagaaaactattttctttttctctgcctatttcaaaaatagctatgttaaaaagtatttttgatttttcaaatcaaacttgtatttatagtagttaaaactcttttaattaaattatatttaattatttaaataaatatctataactgaatttggttattgatatttatgaagaaatctctcaactacttgagagaatatgagagaatatctcaataactttaaaatatctttaactactttttaaatttaaatatttatctgatcgaattagttaattaaccaaaaaaaaaaaaaacaaactccctacatcgcctacccttgtcttatttagaataatgatgatgtcttttgtccagacaatttttgtctcaacaaatcttgacttgacaaattttatcttaatattttttgtcattttcctatttaattaatttgagaaattatttatttattataaaaataaataattactattttgccaattcaaaataattttttccgaatgatattatactactctttatctctacccttgacaaagttttaaggtggcgattcggggactatgaacctataattctaagctccaataaactagattatttattgagtctcatcaactaaataatctttgtttattaattccatgattactccactataaatatagaaatgaactcttagtaattatagaattatatttactgttttactacaatgtctattaatataatcaattccagtgattagtcttccatgtactggttcaaaattagtttaattggtcaattaccgttttactcttctaattacttctttatcttttggtaccattaatttaatagtggaagtataatttagatccattgaaattcgggcacaacattccagttctagaattaacttaaaggaaaccagcatttgat

SEQ ID NO: 47925 - DNA, 1630 bp, Cannabis sativa
gggcctctttgttatggatttttttgctttacaaatgaaatatcaattttattgcttttctttttggctaactaaaaaaaaagaaaaaaaaaataagaacaaaaaaagaagttaattagtaacaaaaaaagaagtttattactttcatgtttgaaggtcttctccttggggcatttaccctgtttgtgattccggtattcgcatgtgggactggtcaaattcatttgggaccttaaacataagggcattcctgctgatgaggttttcatttatgcttcgattgttataaacacaatttggcgactgtgcaatgaaaatgtacataataatgctactgttgatgtgaagaagtgtattgattccatttgtacttcttttgtagatctacatgcttctattttccctacccttgcttcttacctgaaggaggattggtctcctccctccaagattggataaagttgaactgcgatgttaaagtggggtttgaaagcatgtgtgctgcagttgtggccagaaaccatccaggtcaagtgatttggattgaaacgtctcggttagatttctcggatgtgttatgtggcgaagcagcggcttgttgtctggctctgtcgactgcgagagacattggcttcgactttgttattgtggagagcgactcgaggatagttattaatgctcgtatcgggaaggagtcccactaggcaattgaaaactatgtctcattttgtaataattattctcctttatttagttgttttattttctctaatattagtaaaacttgtaattttatcgtccataatgtggcaaagtggcatttttcccaaaacaggtttggtttgattccgttatctaccattcctaggaacattttatataatgaccgggaggtttaattattatctaattatatatcaatcacgcttttttttttaaaaaaaaaaaggaaaataacttcttgaggttacaaccttcatgataccatgccacatatagttcatatagatagatttgaaataggctatttattagtatttgcatctcttggcacgatgaatctcttaaattcaaataattaaggttgaactctaacttttacaattgttttgcttggtactttttctgtcaattttgatttgttaagtgctaaaataaattactactgtgtacacatggtaaaattttattagttcacataatattaatattaatataaataaattaaaaattttaaaaattagaaaaataaaaaatcttttcttttcttctgcctctaaaaacccttttgcatctatctctctctctctctatttatgcttctttctttcttgcgaccatggatgccctgccctaatcctctatgagtgttttgtaaaaatagtttttatgaaattttttattagcaagataactttacaaaaaattttattaacaaaataactttacaaaaaattttattaacaaaataactttacaaaaaattttattagcaaaataacctcttatggtcgaaaaatgaccatgagttacactgtgcgaccataaacaattattatggtcgcaaaatgactataaatttgcactgtgcgactatcatggttgtatatagtaaattaagtgaagttat

SEQ ID NO: 47926 - DNA, 1209 bp, Cannabis sativa
tttagggcataaaatcccaatagctcagggtttaacgactctgcgtctggaaatcaggttaaacagaagtttaagaaatattgaatcagacaatcaataacttcttgcattcatcactataaatgattgcaaggttgaagtttttttttagaaaatagggctctggtttgaagtatgaaggaaaaggattcgaaaagtccaaagttgtgaaaaaagtaaaaatgggtttgataaacctatatatacttcggccaaatccttacaatttgaaatgattggtctagatcctctctccaaaaagcacgatttgatccgacagatgggaagttgaaaagatggcatttaaaacttattcaaggcattcatttttcatcattgcccactttaggtaccgcacgcttaaagatgggtcacttcaatcaacctgccatcattacaaatttttctgaaagacatgcccctgcacgggtatgttatcaacgaacgcattacatgtgcagcatgcgtgccacgacgtggcaccatcagttcttggtcccttaattgatgaaaacttaaggaatacatccgtgttcccagcaatcaccacgtgtcataaggatgtctacgatatccaaaaataaaagactacaagctcccgtaactccataagtcctgaaagcttgggggtaaatattatctgtgtttttgagtaggtgacatgtggcataaaagggaagagataatttttttgaactcactaattaaaaccccttaataaaacccagtcacagagaagcttcactaatttgggaacatctcaatactaaaaggtacgcagaggcttacctcaccttacttcaacttctcggatacgggtgacatattactactctgaagcctagagtggtccaagctcacagactgcccaagtgatacccaggcgggtgctcgaagtgcttatcgcggatgttgaccacccaaaagagtacaaacatctaccttggatacaaacctggatcgcccagcgacggttatgctttttttgacacataatcaaatcttgccctatgtccaggcatggtagtgcatgcacctcatacacctttttgccatacgattattccaagcatttacttttaaaggttaaaccttttggcgactacattcactacgtacagtggtcccctattgtccagctacttcaacgcacgagcacaattccttcca

SEQ ID NO: 47927 - DNA, 1367 bp, Cannabis sativa
cattacaccagagtcaattaaaaacactcatcaatgtaccatcaataaaaaactaacttatcacggtagaagaaccagcatcagcctctgcttgggtcaaagcaaacacccaagcaggaactaaagtgtccttttttttccttctattacggtcgctgtaaccgagagtaatttctttttagatggcccacccacgctcaagtttaacatttttcccttatagcatctcttacacctcgtgcactctgtataggtttgcaaatttttgtttccaccttgtcagaaaccttggtgaccttggaatctcttatttggtttcgtagttgacggatcattaggttgtttcttaagattgttagggtcaacacccttaccgaaaccaacactagatgtttgcttccatgaatctcttctcatactgtttctctttcgaatttgatcttcagtacactcagcaacaaggggtaggtcaactacttgagcataaatgtggacaacccttggttgtttggcaactagaattaaatctcaagcaatatgttcttataatcctcgaataaacttggcctctctagcagcatcagtggccatttcatctaaaccaatctttgctaaccaatcaaattcggtggcatactctatctctgccacattaccctaggttagccgtataaattcttttgctttagcagctcgaataaatttgttgtagtacttctcatagaacaaagtttgaaaagcctcacattcatgttattcaaatcatgaccctctgattcaatttccaaccaaatgtgggcatcctcacgcagcatgtaaatagcgcatctgacccgatcattattctcgacccgcatgaaatcaaagtcggatgttatcttgctcatccattgctccaccataagtggatcagcaccatcctcaaacactgggggattctgcttcctgaaccgctcgtacaacaactctagatgatttcctatatgtaatggcactatcaaaggtgccagagaatcaagattaggatttaaagtaggctgagcttgctactccctcaactctaaaatttaatcaccttgctactggatggtctcttgcatcgcggcctacatctcttcccaattttgtggtggtggaggattcacacctcccatcaaccacgagccctaaaacctcacgattacctctattagattgcctcgagtgcatattctaatacactcgtgaccataactttcataattagaatcttcctaacaaaaactaaatgctaataagcattgccaaacatgcgcatacatatataacaatctttatgagaacttctcatacttttctaataacttacaaatttaaaataagcaggt

SEQ ID NO: 47928 - DNA, 1260 bp, Cannabis sativa
tacttggtaattagtcatgaaattaacctcattgtgtttacttttttacacttaaccctgttttttttttaaggcaatactcacttaaatttactttttgtttgcaaatttaaaaggtcagcaaaattctacgttgaatatcaacttagattgcaaatgtgcacaggtaatctaatcaaaacctatcacataggtacaagtgtacacactgacaattcatggaatttattaatgaaatttaactataacctcaaatttgcaaacaaaaataaaattaagagtattgcccaaaaatatcaattagtataacaattaaaacataacaaatttggagaccaatattatcttacaacttcatgagtagatgactaacttttctttatcttttaagaaaatatcgaaaagagttgctaaagaacacaaggagctaggcacacctcggttccattgaaattaagataataattaataaaacataacatatctagtcaattgagactaatatacttattaattattaattattaattatctttttaaatgtaagaatatgatgtatatatgtatacttacatatttgccacatttgacgtctgagtagatgacaataaaatccccctcttgaagtccattggctctcacaaaatcccctatgaatattttttaacaatcaaaatgataagcataaatctttattattaatataaagtcaaaacactattctttaattatattgaaattataagagtactctttttctcacctgtgttttcaagtaaatacatcctgcttttgttgttaggccaatacctgtaactccattgagaaccaaacaataaacagagcaaagaaattaacaaaaacattcatcaaatcaaaaaatgaatcaatacacacatatataattgattaatgtacataagtaatacctataacgcatgttccaaacacgagaagtcccaatatcttccatgggaatagaaattccatctcttgcctctaattcaggcaaatgtgtttctgcttctttctgttttattattatttttttaattaaaaaataaaacaaaaaacgtctaattaattacttatatcctaatatataatttaactgagttttagcattaaataaaaatcataagaacaaaaaaaaaaattaattactttaggtaatactattctcccaagactacccacgtcgctttgtttcaacactttttgaagtaaaaacctcaagttcttctccggtttccaacccta

SEQ ID NO: 47929 - DNA, 2469 bp, Cannabis sativa
aaactccccaattttgtcgatattccaccttgttgaaatgataaaatataaaagtataaatttgacatgtcataagtagctctcgtttactacaaaaaaaatagtagaatgctcaaaacagaatcgaattctgataagtagttaccaacgcaccaagtcaggtgtcaacttgggcgttggttgcttcccaagctcccttcctgaggctcgttttgatactcttatggtattcgagattgcgaacgaggtctcttaccccctttttgaccattttaagaaaaatttctagagcagaatttgtgtttaaggagcggagacatgcgaaccaagttgcatgtcaacctgggtgcagggcccaatgtcatgtcaacttgggcgttgggaccctgtttaggctccctggaaatctcgttttctcctcgacatcacttgtatattcgctattcctaatgatgaaaaaatgtccaaaacacttttttagaagattgactggaaataatccaggttgacaaaatgtcaactgggcgttgggtccagtttctgggtactagatgactctgtttgattctcagaaatacttgtatcttaatctttgatgaaaatagagaatatgcccagaaaaattctcagaaaaacttcttggaaatgacccaagttgaaaaagtgccaacctgggcgttgagtctcagttctgacccccaaacaactccgtttgttcgcggaagcagacaaatcttaattgtttacgaaaatagagaatattcctagaagaattcatctgaactgctgatggaagtggctcaagttgacaaagtgtcaacctaggtgttgggtcccgttttggcctccaggtcaaactgtttctcccttgaaagcacttgtttccttattttggatgaagacaaaaaaattctcaagatagttttgttagaattattttgtcaggatctagatttactaacatgtatgttggattatgattccatgttggattatgattccataatctaacatactaaatatgaattttctaaaataataaaataaacacataagagttatagaaaactttacattgatggcagcggaattatataactccttccgttcaaatctctagacccttgatcctttatgctgcagagtatgatcaagatttgaacctggattatcctttagttgacagtatgaactacacaatcttcctcactatgatgagtattactttgaattgtgtgggaaatctctcaaaccaagaaccacgatttctttgaataaaaactctaagaatttcaaaattaataaattaaaaatattaggttttcttttttattcaatttgtcagacaagagagagtctagaggtcatcatctgaattaaaagccattatgttctatttatagagattcattaagtttagggttagagctaaatgggttgatttgaaatatccaatgtcttaaaacaaacccttatggttaaaccccttataaggcccataagttatattttttccattattttgcttccttaatgaagcaagcttatctttcttcagtgatgtcatttttttgctctagttatttaaatactaattctatttatttaataattataattgtgggatgtagttacgtctccttctggtgacaatgctagccataaagaattttgaggaacgacccccatccttcagccaggcaattctcgacttttgacgccagaaaattttttccctgttcagcgcctcatcaagcaccgctctagcttccgtgtgaaccttctcatcaaaaactaagactccttctatctccttaagtttggcacgggcctcttcaatttggacagataactttttaaaatgcattttgttccatttcatgagttgctcttttgtagatttcagttttcgatacatattaaccattggattatcatggctggtaacactccaagccttcttaacaacccagaacacatggggatccctttcccacatgagttcatatttgaactgagccttagtgcagaaccgtccaccaggtcgtggccgtaaggtgatttaggattgcattaggtcgtaagttgatttaggattgcattaggccaggcgatatttattaatatatttatgatatataattttatagtatatatcaactataaatatttaaataattcaatctatttttatattatttactctattttgtactaattttaaatattctcatgaccaaaaattaaattaaatattcttagtaaattagatattttaaattttcaaatttaaatttttatgtatcattttaaatttataatattttactcattaacaatgactcaataaatatataaaacaaatacaaccctaataattctcacaattctcacatcaacgtcttcttttgtgaggggttcaagagcattcgtctgagagtagttcggttcagctcaacgacatcctcc

SEQ ID NO: 47930 - DNA, 1883 bp, Cannabis sativa
  modified_base (899)..(903): a, c, t, g, unknown or other
aagttcagaggatatgatttagtacatgtcaaagttcagggaaaaaaattgctaattagccataaaagaaataaaatgtcggtttttggtatattgacattgttagtatacatatatcagtcgaattatatatatacatactttttttaatgattgacatatatgttacatacgtttcataacaatgttgtttgtttttttttttttttatatacaagtaaagtgaattttttatgcctaaaatcataagtatctaaatatgcgtatgtatttatgtggtacatgtgtatatatttatgtgacacgtactacttaggagttcattaaaactgatgtgttgccaacattgtgataaaattgtgtagcttcaattcaacttggcaaattttgtcatttacaaagttttggttgaagaaacaatgacttgaaaaatatattgataatattgtgattacaagtctagttacactatatactataaattgaagctctatcatatataaagtgtatgatttatgttcttttttttttaactgtttagtcttttggattaagctttcatatataatttttggattaagttttgttcaaatttggcattaataaaagggtgaatgacggcaaaacctctaaaacttttattttggtttcacttcacccccaaaactcaaatttgtgcggtaaaatccccaatactcgtattctgttagcaatttaatattttccgtccattttaggtgttaagtgccatgttggactaaacatagtgtacatgtggcacaattttattggtccacgtaaaaaattatttaaaaaaataaaaaattaaaaaaaattaatttgaaataaaaaaaaatatataaataaaaaataattttttttctttttttcctttcttnnnnnttcttttttttttttcttttctttctttttcttttcatctcgctctatcactctctcgatctctggatctccatggctagctcgagcttccgaacccacaacaacaacaacaaacaatgttccagaagaggaagaagaaggtcctgtagagtttttccaatctacagctccgattttcgccacttccgacgaaccctctcctctccaagtcgccaccaatgttctactcaccggttccattgctatcttcctcttccgctcgctccaccgccgagcccgccgcgctaaagaatttgtaaatttctcccctttttaatcttcaaaacagaacattgattgaagaatttgatgggtttgggttcaagttactgactttatgaaaaactagggttttggggattggtttcagttattgaatttttaagaaatgggtttttgtttttgtgattttaaatttggtgggtttggttcaagttaaagaattttcaatataaggagttttgatttttgtgattatgaatttggtgggattggttcaagtttttgaaatttcaagaaatgggggttttgattttgaatttggtgtgtagaaatttaggtcagatggagtgaagaaatcagtgaaggaggaagcacttgaaagcttaaaggcaatgagaaccaccttcacctgctcgagagagtgatagagagagagtggtagagcgagataaacagaaaaagaaaggaaagaaaaaaaaaaaagaaagaaaaagaaagaaaggaaaaaaagaaagaaaaaaaattattttttatttatattttttttaatttcaaattacttttttttttatttttttaaataattttttacgtggaccaataaaattgtgccatgagtacactgttttagtccaacatggcacttaacacctaaaatggacggaaatattaaattgctaacagaatacaagtactgggggttttaccgcacaaatttg

SEQ ID NO: 47931 - DNA, 1696 bp, Cannabis sativa
tccaagcatcaaacggccagcaaatgaccgaggaggataacataaaacctgatgtttgtcgatggaaaccacccaaagatggcaacatagtgatcaacgttgatgctgccgtggatgaacaaggaaaatgcagcagttcagttggaattataagggaccacacggataaagtggttcactccttcacctctttcatgtctcattcggtatcccggatgatagcggagctcagagcaatcaaggatggctttctttgggctagaagattgaacatgaacaatttcactctccgcttggattgccttaacgatgtcaacaaagttaacttgatctcgtcttttggaggtgatttagaatttcttattaatgatattcgtaaagcgatgatcataactaagtgtaggggagtcttctttgttcctaaaacttgtattagagtagctcattgcttaggaaagcaagccttagtagttaaggctttttatttttgggatggaggttaccctccagttgccgtttcagcagtttttgctgatttggccttcctgtagtttaagtttaacggttctttcccctaaaaaaaagtttgaaatgaatagacctgcatatatcaatcttttgttttaattgtgttattcctgagacttgagctgctagaattttgtattttttggtttttctcgtattttagcgatattttgcaatacttttcatgatatttagtgacattagagcatactaaatgttaaggatgatatttaacgatatttagcgacatgttttacaatatataacgacattagagcatactgaatgtgtgggataacctgttagtattttttggcgacaagttgcgactatatttatgacgtattcaatttttgttttctaactacgacggtcatgatgtctatcgacatcattcgcgatatttgtcaatattgttcaagttatatattggtgatgatacttatcgacatgttgcgatatgtagcgacaaccttatcgatattttatgatgtcacttgtgatatttctcaacatatttttgttaaataaggtttttcctttttttttacagatttaattgtatttctggttgtactttatgatgggtcttgggcagttgaaacctaaggtttcaactggatatttaataatgcaaaagaaagatgttaatgtttgaggttaacactactttacagaagatgcaaaaaaaaaaaatttatgaagagttggatatagatcatcttgtgtataaattgaaagtggaggtgtgttacatgtacatgaaaatatatatgataccgccaaaggttttagtgaaagataatcaagtaagattgttcttaagaatgaatgcaaaatgagtgtggagaactttctaccactgtttgcgactaaggttaagaggcatgcaatttttcgggtctaagtgttgttgggagttttgtctcataaacagatccagtggtaggtttgaatgagcaggcccctactaatatagatgaggacagggttgacaatgcatgtaaccagtttgatgggtttgatactccctttaataacaatgatctgtggtagatttgaacgagaatgttgatgtggagttggaagttgatgaagttgtagaggtacctactttgaggttagaactacctccactactgccaaggaaccagaggatagagcaaga

SEQ ID NO: 47932 - DNA, 1273 bp, Cannabis sativa
acttgcgtgagatactacttgatacgtacacttgcgtaataaacagaattttcgtaacatttacaagcaaatcgtcgacgtacacttccattatttttcctaacatacctgcgaacatcatgttaacaagtcgctaatatgttgcacctgtattaattaagccaaaggacattactttataacaatacaaaccttgatgtgtaacgaaggatatatgctcttgatctagctcgtacattgggatttggttgtatcccgattacccgtacattgggatatatgctttgtaagttgtgtactaatcaattacagcaaaatctgccatggacttcactgctattggtgttgttcctagtttgaggtaattttatcatacctttgagttgaacggtgtcgtgtaaatccatagatactcgaggttacatactagtgttataaggtgaaccttcgtgtgtctcataactctctcgcaaaagtggaatattcttccaagtttcattcaaaaaacacaacatgtttgtcaagttaagaagctcttacgctggatgtttttcttcatgtacattatgagtgtgtttagtaatactgttttaatcatttttttatttttaaaattagaaaagtaaaatatttcctaaaataatgttctataaaattgtatttacttttcatttttttaattgacaatccaaatttaaaataaaaaagtcactttcaattttttttaaacagtttttcttttttatcaatactttggacttcgatcccaacctagatcttagaatcctgattcagaccctaacacatgtcccagacttggacttgactccgaccccgaacctagacccgacttaaataaaatcaacaaataaagaagaaaatacactacaagaattaatagcatcaccaacggcactattactaacggcaaaatgtcctcactaaaaatgaaagtattaccaacgatatttaattgtcgttagtaataaaaactttttttttttaatttttgtaaaatgatacatcaatgacgatattgtatattaataacgacattgtcgttagtaattgttttattttttcagaaaaaaaaaatgttgaaaagagcgggagttttccctccacaagcatcattaaagttcacgctttgatttcaattttcatttcaaaactattctcaacctttctctaaaacccacctcaaccttttttcggtggtcccaagcacgtcccacttctccggcggttccgatctcggctgctccttcttcgc

SEQ ID NO: 47933 - DNA, 790 bp, Cannabis sativa
ttaaggcttcgtgcctacctgatgggaatctttcctacgtcttttcaaatcttttgtcataatgatcattaacttcaaaaatcgtgcatggggaaacatgtctgacttttagacattttttgatacagttttaataaaaagaaagggttttaggattttcgtggagaaaagtaatcattttgaatttatttctctaaaaatattttcccaatctgcctttctcctataaatactcctccaagcttcatttcaaacttttaataccttcaaactttaagagcaaaaagttccatgttcttcattttgaagtttttctcagatcattcgttgcgcagacaagattgaggtggatatcctcttcaagattttcaagtccaacagtgagtaagtcttcatttccttttctttgcatgaatttttacaactttttctctatttgtgttctgtgtgagttctttactggagtggatatatattgccagtgttcatccgaatcttgtgatttattgtgttgattgactacggaataatcatcgtcgtctgttagggtcgaatcaactcaaatttttgcatgatttgtcttcattatcattgtgcattactctactataaaataacttttaaatgtgatttttttagaaaattaataaaaaagagaagctaaagcatcctaatatttcttctcattgaaagttgacatttagaggtggttatgttataaaaattgtagctatagactgtacctaattgctatagctacaattttttttttatttcagttgtgatgtgt

SEQ ID NO: 47934 - DNA, 1579 bp, Cannabis sativa
atatatatatagctccaccactaagtttgatgttcttcgatgagttatatatatttctagagaagtctaaacataaataaagtattctaattattttttttagttattattattgtaaaaaaaaaataaactttgaacaaattctgttaatattttatggttcacgctaaaagacactgtagtgtctagcacattataaggtgcaacttctaagaatgcacaataacaatgttcatattttatttctctcactaaatgttttattaattttctcttcactcaaaaagtaggttggttatattgctaaaaatatcatgaattatatcaattcttgctaatattctctccctctgttgaaaatgttgctataatattctaatctatttaaaagcccatttaaatacttttgaattaaaaaatgtaaacagaaaaactaaggacaaaatggacaagtttaaaataagggaccgacagtgaagtaatgaatcttcaaatgcaaagattaaaataaaatggggtatattttctttcaataaatataagttaaaacaagggtatattttgtacctacctaccgtgcaatataattgatccctttacataaaacacgctttaataattcttagagcattgtgatattattaatgatgaaaaaaaaaaaccatgcagcctaaaattttatattcttattcttcataatcttattagattatgtgactattattcaattaattagagtagtttattgtgttaatgcttaatggtcagcttctttgattcttaaccattcatgcatatatatatatatatataattattaagttgacatatgatctcatcagtcatatcatatctcatcaagctggaatgagtcaaatgaaaaaaatgaaatggtttctttatgtagcaccaattataaattatacaaggaaatctttgatgccataattgtatatataatatcctatatatataatataatagatgtgatgatctattgaaatctaaaatacaattatcttttttcaatattaccattaaggaaactctatttattaattaattaattaacaaataaaaacaaaaacaataacataaatatatataataaaaagaatataatttacgatataaatatatataaatttaaattttagtgtagataaatatttaagtttaattttttatggtaataattaatatgtactttagttatatttttaaaattactgtaggtaattagtcattaagtgtcaaattgtctcatatgttattttttctaataacttggatactattactatttatctacaaccgagaattaaaattaaatatttatggtttaaattatttttaaaaaaatatttgtgaaataatattaaaatatgaattagatcaacaattatttgacacgttgatgtatatgcatgtgttttttctttttcattcttgtatatcatatccgtaatttgagcgtcactataggtaatatttaattatccaagaaatctaatactaattaattatgttataatgaaattgctaataatagattaaattaagttagataagtatagta

SEQ ID NO: 47935 - DNA, 1749 bp, Cannabis sativa
acattactttgtaggttgggtggtacagtcttgtacacccttttacttcctgtattattctacataataataatacaagcagttgtgtttagcttccaaaaaaaatacacccaaaaaggaacatcaagcatcatacaaaattaataggaaagaaattatgcaccaacaatcaaatgcctaccttctcaagcctgtgcaggagatatgtcttaaattgtcgaacaccacgtccactagatgttgggtccatcatatgggccttctcaaatgcatggaaacggcctaatgaaagcaaatagcaagtttgaaaaattaataaaccatgcttaaaacagtgcatattgcaattcggtcctttatgaatcacaagaagcatgaattataaaaaaaaaacaaggaaaagtaaagtcagatattcaagttgcaacagaagctaggtggaaagcttcttcgggtttaacatgctactcaattaatagatcaattctcctacagactctggtatcacaataagtagtttctaagtattctagtccaagagctatggaaatcataacttttgcaaaagaacagtttaaatacattttttgaagggaaaaaagaagaagaagaagacaaaagctaccagaatgatactcatctgaaagcattgctagaacaaaacgttcataaattaaaggctaaattgaacttcaccaagaacacaaaaggttccacctacaagctccattcctactcttatcatgcagagattcaatcaattcaataaaatctgttgacaacaacacttttgcagcaagttttcgtggcaaaggtaacttatactatactaagtaccatccaaagcttattttcagtaacacaaaaatccaatattctctgcatttttgttgtgcatcaactaactcaacactagtagtctctttctttatatatgttgccaatttcaaacacttaacaaagacagtctaatctaatagaacatagaataattctccacaattcacacacataaaaactgatacatataaacacacacgaaataacaataataataataataacaatagtaagagagtaagagtaagagggtttacacagataagcgaccctaggattttcattctggatttcattggcgaccctaagaataggagcaatagaagcaagtgaagaaggaacaagctcactatcaacagcagcattgtcctcattccccaattccacataccgcgtaggcatcctagtcatccctctcgacagcgtcctaggcggggcgacatcgttcttcgtcccgctggagctcgccattctcagcgaacactcctctcaaaaccaccacaaatcaaccacttcttcttcttctttttcttcttggactgaaattcgttcttccttggatacaaaattgtagcagaaaacatcttttcagagattggagatcagagcttttatatttctcggagaaaaagtaaggaaaagagaaaggaagatactttgggcaagaattggggcaaagaagaaaagcaaagtgagattttttttgaatatttttttgctgaggttggaagaaaagaatgtgcactgagaatttttgtattgagtcgaaccgaagaatttgagtgcttttgctttatagttattttggtctttttttaaggaaatgttttaaagtatgaatctgattgttgtttgtccttttgttcttttctttttgggttgtttgagttttataaatatatgaagttt

SEQ ID NO: 47936 - DNA, 833 bp, Cannabis sativa
agcattcttttccaaccacacagctcaaattgatgctagtattgccattctccaaatttttgttttactcatttaatttgctaactatcaaggctagtattctagcattcttttccaaccacacagcccaaattgatgctagtattgtcgttctccaaatctttgttttacaggattttgggctacaaaaacagagttcatcaaggctaattctgctttagaagcagagctaagtacaatttccatggcactagtgtgggctttagaagaagaaaggcaagaaattctcttagtttcggactgtcaaaccgcagttcatgctctagctattaatcaatgtcctaaggattggagactccttaacaagtcgttgtcaattttagattacagtagtaagtttaaaatttgcaagttatattacattaatcatagtttaaatcagtatgcggacggtttagcaagaagtgctagagtttctagacaatctgcagttctgcttcaaggagagggtgatccccctgtgatccccaattttctctttgtttaatgaactttagttcttccaaaaaaaaaaactatcagttgtggtacaaatcttggcataacccacgacaacttaaatacctttatcagtctggcccataattgccgggtgaaactgcatcctaagaacaaatgcccaacgtcttccctgctagctttgcagcaaacacaatcagctataattaaattggttagttgtcgtcgttaaattaaatcgatttatgcacacccttcttacaaaacatcttgcttccttttccaaaagcatcttgttttctccccctttgtat

SEQ ID NO: 47937 - DNA, 1629 bp, Cannabis sativa
ttttgctaagatcgttgttctccataactttgttctacgtttgcagccaattgattttgaaactatcatttgtggtacataacttggtagaactcaggccaactcgaattcctctatcaaattgatccataatcatcgaataaatttgcactccaaagacaaatctccaacatcttccccgatgcctttgcagcagacacaccaaccaggggaaatgcagaggaaaggcttcctcttttgcatcttatcctggacgttcattttgcctaaagatacaagtcaaccaaacactttaactttcaatggaacacaacttttccataaaatcttcgtccaaaacaaacctctaacagccgagtttgatgtaaaccagcaaaaggctgatttacaagaaaaaacttctgacagattcagcttccaaatttgactatcttccaaaatactcaacacttttacatgtttgaccttttgcagtaacaaaataagacttgggacctctcgatccattaagttccttctaaacttgaattccaactctatgcccacccacctaccaagccctcgtcaacaatcaactcctttatagttgtgttcctcaccttagaaatcattactaagttagagaagacacaagacactgagcaatgaatcaccaagccaaacatcttcctaaaatcgaatcctatcccttcttccaattttgaagtgtaccagtccaagatattcatcatacacatctaaatatccctccacaggcctttaggagacagacgacatccatttttggagtcccagaaatcatcagccttattatatctgcttaccaccaccctatgccacaacaaatttggctctaaaggaaatctccacagccacttctaaagcatacctttatttctcatctccaatcgcccaatacccaatcctccctcatctcaagccactaaatgttcaccacctgttgactctctaccttcaagagataataatgttctgctttttctgtttcaattgtgtttctattaatcaaactcttgaagtgttttcttcattcacggtgtttggtctatactgatatatataccaggataaaaagtatgtacgtattaactatgaatatacagtatacgttttttctttttcctttttttgataaaatctcattatgtttgatggtctctttccactatttttacataaatgggaaatggtaatttagcacgataagtgaaaatctcatatgtactagaatagtcactagatctcgttccatagatatatataaacatggggagtatcatttgatggagttaaactagtgccaacactaactcattcagttttaggaatgaagatctaaagttttttgtttgaattatttttttattaacattaaatgtgtatttctgattttttttttataatattaggtattagtttgaacttaatttaaataataataacaatgaaattaaaacaattcaattatatttttttaaaatatatatataatttaatctaattttaaatttatatatatatatataaaaataacaaatttataggtaaataccatttggactctgttttgtaaaagcaaccaattggaccatttgttttgttaaatga

SEQ ID NO: 47938 - DNA, 2406 bp, Cannabis sativa
  modified_base (163)..(163): a, c, t, g, unknown or other
gtccaaataattttaattttaaatataataaaaataagaaaaattacctcatatactattttttttttattttttttttagatttacggtttgagtttctaaagtgtgagtttttttatgtagaatttcgtaaaaatgcaaaaaaaaaaaaattattttgaantgtaaaaataaaaaaatccttaaaaataatttaaaaataaaaaaaaaaaaatttctttattctttttggtagatatgaataatcacagcattgaaatgggatacaaatccttgaatccaaccattttataaaaaatttaatggcctacaaattttgggacataatttagtacaacattttaggcaactaattttaaaatacaaaatgctggaaaatattagtaataaggcctaatacaaaagtccataacatataaatactcatctcatttcatctagcagctctcttttcgaaccctagagttagggttatactaacatcctcgcagagtagctgcctcccagaggcattgtctgcacacatctttctctgcgatttcgcagcaatcaaacacccattaccaagatgacgaagaagacagaaaggaaagttagcatttccgggaagccgaagcactctaatgacgcgaatcgaattgataagaaaaatggttctcgtactgccgccacggttcgccgacttaatatgtacaacacgagacccaagcgtgatcgcaaaggaaaggttttaaggaatgaatttcagtctgacgagctgccatgtacccgaatccaacccgaccgccgatggtttggtacgcaattctcatacttttgtatatttataaacatggcgcactaacaattttcgggcattggctttcccgttgtagaatacagtattgggcttagatagagtgagaaattgggtctgggtacatacagaaattgttggttgtgctttgtggaagtacttactctggctgtgaagagtttctaatatttgtataccagttatggtgtgcaggaattatggtttttaatttttattttgcattctataggaaatacccgtgttgtaaatcagaaggagctcgagtttttccgtgaagaacttcaaagccgaatgtcgaataactataatgttattttgaaggagagaaaactgcctttgtctctcttgaatgatcaccagaaggtacgaatgatgcctttctctagcattattttttttcctgtcagggcattgtaagatagccattgccattttgaggtagactaatggtaatgtttagattttctatagtaacattatatagcggtatatatttaacataattttgctcttttcatatttgtgaagcaagcgagagttcatctgctcgacagagagccctttcaggatgcttttggaccaaaaactaagaggaagcgaccaagactcttagctgctgattatgattctttactcaaaaaagctgatggttctcagggtaatcattgttataagtattctactctttattagattctatttagtactgattgcatttcctttcatttgaggataatttttttttgtgtgtgtggtaatgtgtagatgcatttgaggagaagcatggtgatgatgtcaatgttgacgaaggtgaaggggatggattcagagacctggttcgacacaatatgtttgagaagggtcaaagtaaacgtatttggggtgaactctacaaagtaatagattcttcggatgttgttgtccaggtgtgtacttcactctagattgataattttaattgattttaattcaaatagtgatgtagaagcattgccagttagtttagtcacagttcctacttattagtgatgtagaagcattatcggtaaatcactatatcttagtgtgctatattagatagttttctgctgtcctaccatatatgatcatcttaaatatttgctaatacactattgaatgaattttttatccttcattcttactctaaatttccttctcaacttttattttgcaggttttggatgcgagggacccacaaggaacaagatgtcgccacttagaaaggcatttgaaagagcattgcaaacacaaaaacatgattcttttgttaaacaaggtctgtatctcatcttgtgctccttttttttattattaaattcccctgtaacttcttaaaatattaatagttggtctcctcagtgtgacttgattcctgcatgggcaacaaaaggatggttgagggtactatccaaggaatatccaactcttgctttccatgctagcgtcaacaagtcatttggcaaggtagctatagtatatctatatattaataatttcattaaatgcaatttactatgttaactgtggcttgattttatcaatttatattatcgtcacctaattttagt

SEQ ID NO: 47939 - DNA, 1228 bp, Cannabis sativa
taatttattttttgtttcgtttatgaaacgaagaaaaaagaaatttttttttttttaaaaaaaaaaaaaattgaatcaatatggcaccaccacaccactacaacctaacaacaacaatagctaactaccaccaagacataaggatgtactatgtcatatatagtgataatatcggatctaagttacatgatgtatattggtgtgtcctatcttttaatattatcaatagctaaataataaattcatgaaatttataaaattgatttgaaggaaaagttgcaattagtagacttgactcgttcctcaatattacaatatgcattacatttggcaactttcaatgaaaacctttatattataattacaaattatactcttgatatgtaaattataaaaaaatgacaagacaaaacaaataatttacatctgacacgagaaaaaatcatacatatagttatacaaagtgtctaagagtcattataacattttttttaattgtagaatactatactatagttatttttgtaggatacacttactcaaaataaagcaaaacaaaaatctaacggacaaacagaatacttttccaatatctattgctatatacattgaaagaaataaagagatcgcccaagacaaaaatgaattagttgacttactaaagataaatatatgacaaaataagtggtcatattgatccacaaacttactaatcccatcagatgtaagaataattgtgtgaagatttgggatagtctgcattttcaatttttacaatcacatgaattctgcattgtagcctacaaaaaagttttcaaaaatttagttctaaacaagtaaccgaagtcaaataactgttaagataatctttcaactcatgaaccactttagcatctttaaataaatcaattaggttgtcgactccaaacttaatatcctcatagtctttgtaaaataaacatatagaacaacagatagtagatagtatactggatttactaatcccatttgatataccaaaaaaaagtaaataaaaaatttcacacctaataatccttgtaaactgtcattgaaggaagagttgtacttttgccccaaacatttaaatgacatattgattttaattctccgccatcaactacttcacatttaacagtattgtttatcgatattttaaaaactaattaattatagcttaagaaagatatacaacaataaataatataca

SEQ ID NO: 47940 - DNA, 1100 bp, Cannabis sativa
tgttgtttcagttgggctgctcgtcaattttctcgagaccttttattttttattttaatttttactatcattttattatttttttaatttatacccaattttatagatcatattcccattatgtgcattagaaagtagaaactctaattttaataagttgtgaggttatatttggtactttgattataaaagatgatatttatcaattaaaattattttagagttatatttggttttttttttttttgaaactaaagcgtatatatatagggaaaattagatctcactgtcattacaaatgatagcatcaggtattgaggatggctccacaaaacctgtaatgttttgggcgaaagtccatccgaccacattatgggcgccgaaattacaaaaacaagaaataaacgaaattattacaagatgcaaaatttttagagagttgatttcataaatagacataattatcaatattccaggtagagtgaactcctttcagcgcattgataaccacttctgaatcactctccaccaagacatagttatgacacttgagtctagctgagtcaagagcaaggcgacacgtcgctgcttcaccaatcaaagggtccctgaagttgagcatggacacagcagcccacaaaacattcccaatgtgatccctagccagagccgcaacgcacatagactctcccccaaccttagcatcgtagttgattttgatccaatcctgaggtggaggtgtccaggcaggagaagccaccggtaacgactgagggaataagcaggaagcataatctgtgtaacaatgagagatagagtcaatggtcgttacaatgttacttgtttggaaattatgtaccttatcattacgggttctccaaatcgtgtccacgataattgaagcataaaggaacagtttgtcagagtccaccccattcgatttcaagctccaaagaattttaacccagtcccatatcctaccaccagagtcaaggatcaggaacaccccccacgaggatgatctccagagatggtaagcgaagttgcaataaaggaacaagtgttccattgattccgcagcctccccacacaaagggcac

SEQ ID NO: 47941 - DNA, 916 bp, Cannabis sativa
tcacactcattatatttttttcacttgacccaacttatttaaatatttggctatgtattggttgggttggtatattctgatccaaaatttttaatttatcattaaaaatatttatacatattattataattgttcttactagatttattttttttggagatttttttactattttagtctataattattaaattaaaaaaatatatatttaattttataaaatacaatatttttgttagtagaggctatattattactagtgaatgtgtcctggtatattggttaaattcccattcagtcgaggagaaactcctataatatgatgccaaattgccaattgagcaagagtgtcaaattcatttatcagtgtaaattaagtggagttctaacacagacagagctaaagacaaattaaatgatcagacaaaacctatgtgtccctataaaagaataaagtgattagtaaaaatcgattttcttacttgtattttgtaaaatcatcttcttttgatacttttttacaaaatggcatgtaaaatatgtttcttttctttattgttatttttaaaattagtgcttagtaaaattctaattttctttttttttttttaagaatgttgtgaatttttcatcttgaaatacgagtacactctcgtgagaagaggacacgtggactcagtttctaatgaaaaatgatgacgtgtcaatagtggcactcatagagccaacctcgcatgactcaaacttgccagaggatgtgatcgagataagggtctagtcgcataactatatctgacatggtcaaaagataagcagaaccgatagaaattaatactaggactatttacaaaaatatagcaaaaaagagataaatttttatatatatatatatgacataaaaacttttttttttttt

SEQ ID NO: 47942 - DNA, 1154 bp, Cannabis sativa
cccttttcaattcatttagtcaaggcattggaaagttatgaagaaaattgtcaaaatattgaacataaattcacattgtgaatttgtacaaattcatcaaaagagatccatatataaactgttactgttactaattcatcaaaagagatccatatgaagaaatttatgcataagccctgttactgttggataagaaaattattcatcaaaagagattcatatataaactgttattgttgctacatatgtgaatttatacaaattcatcaaaagagatcaaaatctgcatcagccctgctcatattcaaaattatgcataattcttgagtattcacttggctttaactactttatcttagtgttcattgtttgctagttatatgaatttgtacaaattcatcaaaagagattcaaaataatgcataatccctgtatacaaaattatgcataattcttgagcacccactttgctctatcttagtgttcattcttgagcacccattcatacctactctactctgcaaaaacatataatataattaaaagcatctcaaaatttctacatatttataattggattaatttttaatataaggtacctataattgttcatttttatctagtacaatttttcgttgggttgaagaactaattgaagcttaagatagaggattgttgtttctcccataagtaccaagatcctttgattgagttttctttgcctacacataatcataaagacaaaagtcctttaaaacatataacacttttgcaattatcatgttcaacaactaaactaaactaactatagatagcataaaatctgtaggagaatttgacacaaaaaaaaaaaaaaaaaacatggcataaaatctggacaataacagtcaataattaatgatgtctcaaattaatgtaaataaaatacatgcaaaatgatagctaatttcaaagacattaatattttaaaacataataagacatcattatcattaagccaaattcaaacacattttctctagctgcaagcttgaagccaaattcaaacaaacaataccaagacttataaagctaaaaatatccaaatttattaaataaacaatacccatatatatttatatactcgaccaaatgaatattaaaattgaattcct

SEQ ID NO: 47943 - DNA, 1389 bp, Cannabis sativa
  modified_base (470)..(482): a, c, t, g, unknown or other
  modified_base (1343)..(1346): a, c, t, g, unknown or other
cggatcgggtccggcgatgatccgccattgaggatcgatgaagctcagaagagaaatggaaatgcgaatgatttaaagagaaatttggaggtggggttgtttggaaaatgctctccttcttctatctctaatctagcgcattgggattgtgttggatatttaaaggaagttaagtaaaggtaggaagaaaaaacacagagtggaaaaaggattaaagaggagaggaacagccaaaggggaaggtataatccaacaaagcaataaaaaagaaagaaaaagaaaaagaagagaatacagaaagacaaaaaaagaaaaaaaaaatatttgtaataactactcattacagggagaaacgaatgcaacgtacacgtggcgcgtttaggaagctctgttgtggggtcgtttcgaaacgtcctatataaattatcagtgatgttgtgtggggacattagcttttttttttttttttnnnnnnnnnnnnntttttttttttttaacaatgaacataattttttattgaaattaagttttattaattgttcattgctttcagaaaaagaaaaaaaaattgtgtcaacatgagcgtttggtcaattttttataacaaaaaaaaatggttttattgttttttgcaggaaaatgtttacaatattgtttggatattaggtaactgagtacgatatttaattgaaaataataataatatattaataataatacatagaagagatatgaaagttcattcttccaaaagaaaaattatcatagtagagcgatcctaagctaagagtagaaagagagccaaaataaattaaaacatgtactttgtctgataccctcgtcagtaaatgggtcggctacttcaataaatttttcatgaaattattttacaaaaacataccaacaacaaaaaaaattataaaaatatggtttcataaaattttaaacatttttacgatttttttttattttatttacagaaaatacggtctttttaactttttatgttgtaatcttgttaatttgttgttgattttttgttatatgtatgttattttttgttggtattttgatgttacttttatgtagttcttgttgattttatgttgtttccgtgttattttttaaaaaatcgtacaaatataaaaaaaatattctttgaacgtaaaaatgtaattattttacataaaatggtgtcttatgtaattattctctttttttcattcttttcattgaggaaattacacttactatgggattttaaaagttcttagataaatatggcatttgaccaatttatatggtatttttttatttttaggtttttttatggtatttgatannnnatatatatgtaattaggtttctaaatcccatatttaatgtttt

SEQ ID NO: 47944 - DNA, 1129 bp, Cannabis sativa
atgttagtatataatgataattagtgacggactcactagtattaatgtgggattataaccccattaataaaaatatattttttaaaagattaaatataattttttaatttaataattatagactaaagttgtagaaaaattttcacaaaattaaataaatctaataacaatgattataatataagtaaaaatatttttttaatgataaataaactcttataaaataaaatttttggtccgtcactagtaataactaaataactagtattgtttgatatcatcattaaaccatagtctttgatcaatccattgggtcaaaaacaaataattctttcaactgagcatttatgcccaattgatccataatctctcataaaagggtctatctgcgccttttatcttggtagagtgatatgtgtgtgcctatgagagttgggagatagaggagtgttcatgaaacccttttgcatttttccttatcttctctttaatgtgtaggttattggtattggatgaggacaataataaagaaggatggttcatattatttaaaaaggtaacaaaggttttttgatgccttaaataagatgatattattaatgattgttatctatatttttaagcaggagacacatgacacaattataggcaaaaatttattaacatctcggattaacaatgatgaccatcacaactcttcgtggagatcgatgtttcgctaatctgggaagggcttaatgaaagcttgatgcggagagctatcactggcccagttagcgtctccaagacgcaaaaggatcatacttgtccccggactccaagaagtcttcgaataacggtttgactacttgacatccgataaggactctctgaaccgatcacgaacgacgactcctacgcgaatgcggatgtccacctcaaattttccatgacttatacatggttatgcctttttttgatacaaaattagatcttgtctcctatgccaaactatggtagtgtgcatacgcaccttggacacacctttttgcctgacggcttgtctagaggctaattcataatagaaaaatctttgggcgacacgtgtccttgatccttgcaatggattatgaaaaccctaggtgggtaa

SEQ ID NO: 47945 - DNA, 1671 bp, Cannabis sativa
cactttgagtaattttggcattttcaaaaaaacattggtatacttatgctagttggttaacatataacatggtatttgaatgatgttcttccaatcatactagagggcaaccattgatcaaataacagtctttaagatgattcaataccaaaagaacaaaaaagggggaaaaaaataaaacgaaaacaaagcctataaatcacataacttctatcagcatatcaaaataaagcactggttcttttatcacccactaatgacataagtttacatcctatactgcagatttaaattctgtaacatgatgacataaataatagacagtaataccaagaaagatgataattaatggaagtagatacattattgcaaacaaacaagatatgaaaaatttgatcagtaacaaaaatatatgagaagaaatatagaattaatcaccgagtaaagttcaaccggggtactgggccttatattgattatattgagtaattcagcttttgcaaggtcatactttttggacttctccaaaaactcgttgatattttcttgagactgattgcaagcagcagtttcaaccaaataatcataaacctaaagcagagcaaaacagaacacctataagatatcaccctcaaagcaattacgactaatataatccactgaggtgaaaaaagacaatatacaaactttatactcggatggtgatacatccgcaagaaccctagatggatctttagaggctcctctagatttcagaaatttaattacttcaaaattggtaagtggaccagcattggcctctaatctgcataacaatgtggaataaactcacttgtaaaatacaaaataaagtaaacattacaaagaaaatctaacatgaatattcaaaaacctctagataataataaagtaaaaacatacattttcatttcccaacaatcaaatggggaaacagttcaatccacacagttaaaacctcctttgctcgatcatatctgacaagaaacaggggatgtgaagatagaatacattcacaaaacattcaaatagtcacagttgatttttagttcccaaaatatataacatcccaataaatatatgttatgagagattgtagtggaatgcagttttaaaagacaaaccagatacagaagagcccagcaacatacacgtatcaactgttaaatcactcatcacccaataattgtaacttagaatattaaattatctctaaaatcatcaaggtattaattatttatacaaaacaattgtttcgggagacgcacatagtagtgatcatcctcaatctcatcattttgtgtgtgtgtgtgaatgtgcgtccgtccgcatggattgaagagtaatttgattgaagtttgacatcgcaacactattttctcataattctaaaacaccaaaatcattatttagaacaatgcacaacttaaaatgtggcaaattacatgtcgaagactcaaactcatgatataggtccaattcaatattgcagtaagactatcatgtgttgaaaatatcgatataagaagctttagctatataattaacccatgatagatgcaaacatatagtaattttcttcttatgaaaaaaaaaacataaaaaggcctgcagaaatagatgaaagtaaaaaggaaagaaagacccgttatt

SEQ ID NO: 47946 - DNA, 1211 bp, Cannabis sativa
cataaaatttaatatacgtgtcttacacgtaactttttactagtatatattatatatatatttatatatatatacacataattttttaactattctcgcccaactgatttctaaatagcatgtaaatattcatctaaaaaaagcatgtaaatataaattaataaacacttgccaataataaatattcacctaagaaactattttattattatttttttaatggaaaatttatctttattaaccattaaactccgttatcaaatcaatcaacaaatcagttagaacagactccaaactaaaacgacgatcagggtataaaacagtggatctagcaaaactatgagcaatcctactgaccgtttaccaaaataaatagaaatattagacaattcacataataaagctttacaatctatatctaagaaaaaaattggtggtgctactcaattcccatatatgggagctggtactggaggaaattagtggcactcaagaatcaacttcgcttcctggtggacactcaccaattcgaggcacgtacttataacatagcaactaattatgctttattttgtcatatccaggagagattgaggaactggtttggggtagtttaatctacctaaacatagtgtcatactatggatttctatgcatggaaaattgagaacaaaaaaccgattgcataggtttggcattattgataatgctgattgtgttctctgctgcaatcatgaggaatcaaaggagcatttatttttcaattgtagttggacattacagtgttttacaggtgtggcacactggctgcaatggaggagttcgactcttgactaaacaggtataactaggtggattcaaagagtgtgaatgagcagattcaaaaggagagtgatggcagttgctcttgccagcctagtttacaatatttggagaagcaggaatgaattgatatggcaaaataaaacccccaatgctgatcaggtggtgattcaggttaaaagaaatggcaaacaaagactccttcttatttggccaaggaaagtaagcaatgaagatgtaatgtggtttaataatttgtaaatttgtatagatacacactgaggtctcccttattgggtgtggtgctcttagtttgtatagaacatggagtttgtgcaatgaatagttgattttccaaaaaaaaaaaataattatattagtttactgaa

SEQ ID NO: 47947 - DNA, 893 bp, Cannabis sativa
ttgggcaccttcccaaaaggcctcatactaatggagtagtgtccatccttatatacccataattcttcccattcctaaccaatgtgggacttgggttgataccttaacagaatgaactgaacttaaaaccaaaaatggaatcaacaattaaaagcataaaatgaacataaagaacttacgtggttgggctacacaatcaatatgatcatgagcttaatccacgggagaaaacaacctttaatagatgtagagatcgtctttattatggccagaacaaagttacaaaaaactaaggttaaacccttaactcaatggagacttgctccttgcaaagaacctcacttgtgatactctcaattaaaaacatgagagatcattttacagccctcataatcactctgattttctctcaaaagtctctcattcaatctcatctcaacacacacaagtataaactatataaagccactcgggcaagcaagagagaggaaacttagttaactaactgctaagttagttaagggcccatttgtttggtcttaatagaccccttgatctgttcgatcagatctggtactaataagtgggtatattttttttttattttttaaatcactttttgccacttaatacctcttttcgaaatagatgtgtaatgggctcttaaaatttttaatatatatctctctccttctttttctcttttactttatacattaggtattacactctctttttcctctgccatctctgccgcaatattactatccaggtcagggttttttttttatctttctcattttttcattttttttctctgccagcaacatcaccatcaacatcacaatcatcttttctcttttatattatatatatgtaacgtttataccatt

SEQ ID NO: 47948 - DNA, 947 bp, Cannabis sativa
attaaaatacatatacatttttttctcaattttttttttcaggaggccgactgccccccctcgctacaatgtgggtccgcccctgcttatacttaataagattttagcaattggacaaatattgtgtttgggcattattggacctcttagctaggcagagtgatctacttttccttgtgtacaattgcaaatagtaagctaagttgtattgactaatttttccaattaaatttaacatatattatacactaaatttagtactgtatggttttatggcaaatttagcttattaaaagatgaatctgattaaaatttgactcaaattttgcaaccacaaagtacaaattaacttccaaagtcagcatgattgttaaattttgattgattttttttttttaaaaataaattaaacagatatatcaaatattaaaaaactttaattaataaaagtaattaattagcggcaaataagtaaatgagtaaaaataatgtataacaccactataaaatgatgacactttgagagttttttgtacctgtaagtctaataaaaagttgcaagactgaagatttgagttggttttatagtctttttgagcatataaataagcaattttgaagcttgagatatatcttagctttgtattctttttattgagcagtatacttgtcttattcgcaaaagaaaaaatgactagtgattattataaatcattggaaccgataatttcacccataattatatgaagactaaactggtgtacttagtatttttcaaatttaagagtgtaaatgggtcggatcggatctcatccggctatgagccgacctgatccagatcatgtaagatccctgtcctgcctcgtcccgctagatcagatactcggatcggatcagattcgacccgatttattcggatcgggtctgatccgacccgactatttttt

SEQ ID NO: 47949 - DNA, 1126 bp, Cannabis sativa
gattcttacacaggcatgaaaataaagcaaaggctttttttctcactaaccagattttgaaagaagcaaattcaaagataaagacttttttaaacgatgatgaagaagattgaagataaaaattctttctttcaaacttagctgcctttgatttcttcagcaaaataaaaaaatattcaataataaacaaaagggtctctctctctctctatcttgtttttaacttttcttgactttgcaatctttcattagcttaaagcataatccttttctcacttgttcattgtaaatgcctctaccttttatgttattttttttccttaagcactctttttcatcaaaaggaaaaaaaaaatgaactagattgtgaaagcaatataggactaaatatataagcttaagcaagcaaataatgaaagaccaagtcttaagagagaaaaaacataagagtttagagcttcttttcatgggtaatagtggcccccttgtatagctgtcttgtgttattccaagtcaaccctggccttgagggagccataagtcaatgagataaatagactaatgaagaaatagtaaaggacaaataaatgttatattattattagtgtaaattaatatcgagttgatttaataaataatataaaaaatcattaacgaaatacaatgtcttatatcggtatagtgttgggtatcatatagttcttaataacaatgctctagactaatgagtattgttataagatatcagcattatttaaaggtagcgtcttgcaataaattagcgatattttataaaagttattttattaaaaagtattgttattagacatcagtagtgtttagtaccttctagcgtatcatcttgcaattagttaacgctacttctaaaaaattattacattaaattatatcaaactaaacatttagttgaaccaataacgatattaatatatatataaaggtgttaggcactactagtgtcttttaatatttctctttattaaattaatacgatatttaattgcattaataataatataaaattgtagaagttgctataccttttagtaattctctaaaacaatataatcaattcaaaagaaaagaaaaagtttgaaactcactc

SEQ ID NO: 47950 - DNA, 1564 bp, Cannabis sativa
  modified_base (158)..(158): a, c, t, g, unknown or other
aaatttacggttttggtttctaaagtggttgcagtgctagttgcaataagagtttatgtgcgattttttgttgcaatttaagttgcagcactagttgcaaaaatgatttttatgtagaatttcgtaaaaatgcaataaaaaaaactgttttgaagtgnaaaaatgaaaaaacccctaatattaatgataaactatttatattttattattttacataatgaaaataataataatatgaatgattttttttatacttttaaaaaaatattaaaaattaagttttgtaattgcattgaaacattgctttaaaaaaaaaaaattgcattgaaaatcaatattaaaaaataatcaaaatatattataaaatatttttatatgctgaaaatataacacaatttttatatcaatcttaaatatgaagaagataaaaatatatggttaagctaattcattagagtgaagttttagactactttcccacatattacataagtgaaagtgctacattataaattctagtttctctgtaacatctaattaaacaattagattggattgaatttcataattcacattagtgttgagtaaattaaaagaacaaataatgataaaataaaattctaaataatttcaataaatcacatcaaataagtctgagtctcacctctgcagttgctaaccatagatctttataagtggaatctgatacaggatcattgatttttattacctgaacaaattaaaaggctacaacatcaaattcagttcaccatacataattatatttttcaaattaaatatctcaaaaattatttatttccaagtgggaattaaaccaatagactaatacctctcctgcatgaagatccaggtgctcagaccacaagaagcatcgaagactataagaaaattttccagctttccatggctgtccattcatggttgaatcaacaaactcgttatcttcaattagtaccccaatctgcacaagccaacccaagtgaattgagtcattttaggctatctttttataatgttcaaggcttaattacttaggaataatcagtttggccatactactaaataatcttaatgggacctaatctgatgaaatatatatgcttaattattaaaaatgttagtgaattttgatggcagtacactatagtctcgagccacgtgatactgcaggattggtcgggagcaacatatttgaaactttttcgaccaattttgactaagaaattggtgtagttagaagtaataaaatagaataaaatggaaaaaaaaaaaaataattattattcaatttttttatttggttacatttaaatatattggaatgtcattctaataaaatgtattttccactattttggtggaatgactatttcattttaaaatagaaagaaaaactattctaatgtaacataaaaaaaaaattgattattttatgcaatttaaattttattttatttcatttctatttttattgatatttttattcttatacctaatgttctccggcgagtgcaatataacatgggaaatttgattttttatg

SEQ ID NO: 47951 - DNA, 2993 bp, Cannabis sativa
ttatttgaaaaatcctccaaatgacggcatcttcaaggacacagttaatggacttgtaaactatctctctctcgcatatacacccaattgacttgggagtaattgttgcttttaatgcacttcaatcagtgtttattttttcttaacaaaaaaaaataaaaaaatcagtgtttattttttaaaatatctcataattcttttttaaatgctaaagggcaccagtggtacaatatcgctattggtttaattaagtatcgggtctcatacaatttaatataataatttatagagagtatcgctagccaatcgcaacgcgatatatcgagaaggtgctagacaccactggtacctaatagcaatactctttctttttcattttaacttaaatttttatattttaccatcattttttttattattatttatttaaaatatcgaataataaaaaaaagattgaaaaggaggataagagttgaacaaaagctgaaccatttggtgttgtggggtggccatattggtcccactaatttttgggatatttttccacttctaatttaggtactgtataattgatataaattaaattaattcaatttttgtaattaaacaaaaaaaaaattgatgtttgttataataaaaagttgatgataaattggaaaagaaaaataaaaggattgaatcaaatattgaatggaaaacattttaatttgtatagtatattgttttatataggcttgtatataaggtattttagatgttaaaaaaaatgcttagtccctctttatcagatctttctcaagttgggagaaatattattaaaataattttaaagaataaatagtattctctataatacattatcattaatttatttatactatcctcaaaaatacatcacaattatttttttattgttttatctcaaatttttacattataccatacatatttttttaaaagacatcaccaagattctatttttatcaaattttaatatattttatttattttaaatatataatactaatatttatgtatattcatataaaaaaaattaaaatctcaaacaattaataaaatatgttatcttcaaaaaaataaaatatatttagaataatgaatattattatataaatgtagagtaagaatatttaattttaaatacagtttaaaataaataacgagtttagagcatttgatttaatgtagttttaggtaattagttctttaaatatttttaaaaaatttctatttttaaatatctgatgtgagtgcttgaggattaagagcattcctaatgtgcaataattacaaaaataaaaataagagtaagaaaaagtgttaaaataacacataaaataaatgaactattataactaaaaaaaaataattcataaataatgttctgttaaatgtagctacagttttaaaattttagtaggcatatatgttttttcattattattttgatagtgtcttttgttaacttttggttatacactataaagtaaattagatatataggatatataatatatttttttgttgtgttataaatatattatttgaataatgggtaatataaaaaatttaattatgtatggtgtaatgtgaatatgtgagataaaaaaataattgataaagtaattgtgaaaaataaaatagagaagttgaggtatatttataacacaacaaaaaaaaaatatattatatcctataaagaaaaatataattacataaatgagtttaaaatgactcaaaatgtaaaatataaagaaaaatagtttaaaaaagctatcaaataaatgagttaaatatttcaaaattttacgttatgagtaatgtttttctacttgtgaaaaagcacaatattcattttttaaataatttatctattatttttctattttttatttaatatttttaacatattgtttatataaaaaatatatatttttaaaaaaatataatatttaaatgatatagaaaaaaaaaatagaaaaattgatatttgatttaatataaaagtatgaggtgaaataaaaaaaaaaaataataaaaaaaaaaaaaaaagtagtaaaatattttgaaaaaataaatagtctagaagatgataggattgctactacagttaactaaaaacatatgatatagtgtatttttaatttaattcttcaaatatttaatttaagaaatctctattttatgcatctaattaaagtgctctaaaagatagtaattaacataagattttttataagtaagttattttagcattatattaactaaaagctattataaattgaaatagttactttagctcctctagtgaggatgctctgaataagctaaaatatacatgaaagttcttaaaaaaaaaattatcaaatgagcaaaaattgtttaaaattttacaccattgcttcttgacataactgcttaataatttctttttttttttcttttttatattattaacttttacatatgtttatataaataaaatataataatatataatatttaaatgatattgataaaaaaaatggaaaagatgatataaagtgtaatatgaaagtggaggtaaagatatttataaaaaatacagtaaataagatgatgatagtattcttgtgtaaaaaaaacgataggcattaaattgagttataattactagagtagatgcctcatttccattatttggctatgtcattaatggaaattcacatgtaaccaaaattgaacaaagatttgcattattagctgtttagtcaactagtggaatgtgcataaattctgagataaattatatagataatagattagtgtagtgatggtagtagtagtagtaataaaatgtgtttttattttgatgaagagagaaatggatgtttatggttttggagtacaaagggaattgtttctatgtatagttaataagttttttgaaaatggcaatgaacagtcaatgtcaggtagtgagaactttttat

SEQ ID NO: 47952 - DNA, 1567 bp, Cannabis sativa
ttgaaatgttcgttttggattggctcttatcttctgaaattatagtttttgaacattagacgctgtgggacgctgccggccgacctcaaattatcaagcgtattatataatgtcacgtaataacatatataaatattgatttgtatttattgtggctaacacaatattaattcttctttatcattcattatttttggtatataaatttctcaagatatgaacataccaattcattatattgattgagacggattctttttagtggttaaaagattgcattcttcatctgatttttatagtttgctttatgatatttctattctcatgttcaatttttttggagttcaaatctataatctgtttagatatattattaatactgttgctcatacattagcaaagtatactttttcggtagacaaaaaatgtatttggatagaagaattgccatatcctccaatgactattgtattataattcacttaatataatataactttatttcaaaaaaaaaaaaaataataatcactttaaccaaatatgttattccatacaaaatttaaccaaataaggtggataccttcttgaggtaaaattcgggtaaaacttttgcttaattgcttaattgcttaatttatatttggataaatactattttagatcctgtattttgtaaaagttatcaattggacattttgttaaatgacaaaataaattatgtattatataaaatggtacaaatagaatcctgcactgattttttgtcaaaattaatttaataataattcgatctaaaaacattatgagaaaattgtttacattttctttatttgtttatgttaggaattatctttaagttagttatattaaaaaaaagttgtcaaaaattaagctcaggtcttattttaacattttgaaaaatacagggtccattttgttatttaacaaaacagatccaattaataacttttgcaaaacacagaatctagaatggtatttagcttttatattttaacaaattagttattatatacatatatgaaacaatatatacttgtggctttgggcttcaaaaaatttaaaacaaaaacgatgaaaattataagtttaaatgtacacatgcatgttattaggacagatctaatattgatcattgtaaaaacatttaattttttaacacttttgtttaattataaaaaaaattgagctctatgtatcaaaattttaattttaaaaaactgaactttaaagaccagaattataataagaagcattttattgatcttgaacacgtacagttactgaacaacttcttaacataatcaaagtgaacatatgtaatatatggagctataattattaaagagcacaattgttcatcattaatttatatgctcctatccatgattagctaggtttacatgatatgattaaatattaaaactgcttctgaagattttcaacaatctttttgtccaacttaaaggctttagcaagaatatcatattagaatattttatatatggaaattattttctaattaaggaaataattttctatttaagga

SEQ ID NO: 47953 - DNA, 3051 bp, Cannabis sativa
  modified_base (1378)..(1379): a, c, t, g, unknown or other
aaatataatatttttattctagaatttcttcaaatttgagagtgatctctaccgcacccgatcattgcctgaatatggtgtgctggcatttttgaattctagattattcctcaatcatgagctatcataaaatctcctaaaatcttgagatttccttttgtacatcaatcaatcattggacaagggaatattttattgttacaaaaaatattccattctttgtactatatatatacattcttttattcactgtaaaggcattgagaaatcaatacacaaaatatacttaccatattttgctgcaatactctacctctgctatactttgtttttatttttgttcctgtattttagcttggtatcagagccaggtttggtatctccagacgattctttagtcaacaatgcgagatctcaagctgtcgaagctcctcctcaagctccagctcctgcaccagcacagctcgtgcccctgctgcaacttttggcacccatcagcattcacctaaacagagataactatcccgactggcgttcacaagtcgtcccagccgtccgtgcttacgatctagatggatttttctttggcacaagaacgattccgcctcagtacctcgaagttccaaattaagttaaccccgacctgtagcagcagcaagtaaattcccaatttactctctaggttcgcactcaccaagccattttatgttggcttttaaactctatttttgaggccatgcttggccatgttttacgctgtcatgtttcctatgaactctggtctttgctgaaaaatctctccacaactcaatctcgagcacgcatacttcaactccgctttaatagtaacaattaattatttcgataaaattctttcaaaaaaaaaataatatcaacaaaatatctaaataataaattttaggttaattatgatctttttcgacaggtgccatattgtgttcttgaatacttttaaaaattcttcttgaactactaaaattattgcggattcaaagattttcgttcaatttcattcaattttattagcagacatctaaataacgatatgattgaatatgaattcattatgaatgtttagtaattttttatgacaatcattaaacttagatatgtaaaacatgatatacttaattatatcaataataatagaattttttttttcagctaaaccatcttaactatcattcgacatgcacttaacttttaaatctcaaattttggtagtaaaaccgtccaaactactcaactgttagtaaatttaaagtattatctattttttatagttaactatcaacatggactgcttatgtgtacactcttatacacataacgtgtttatattggtacacttaatatnnttatttaaaaattataaaaataatttcaaaattataatatatttttttttatttttatcattttatttaattttaaaataaactttgaaataataatattaagtgtgtatcaatataaacgtgccacatatataagagtgtacacataagcagtttatggtggcaattaaccgttaaatttgctatctggttcagtaatttggaaggttttacaactaaattttgagcttggaggatcaagtataattaacacgatagttagaatggtttaaccattaaaaacaataatattataatacattcatagttatattgtgcaccctttaatatttttcaatcatatatatgttttagataattaataattagtgttattttataataattattaaattatgtgagacacaatatttaattaagctatttttttccctaagaacttaattatactaattaatacctatatgatatttttaaatagtactaaggactatgagctttgctattgggtaccagtggtgcctagtacccttaagacgtgtcgtgttacgattggctagcgatacttcctaaaagctattatattaaactatatgaaacctcatactaaattatactaatagcgatattgacacgtaagagagtgtttgacaacggtactgatgccttgtagcatctctcaagtactatttgaactttttagcatttctcttcaaattgaacggacattaattataggatgattacaagtgacacttgtcataataatattcactttctttgatattaattttggtggtttaaagaacaaaaaagcaaaaagtttagtgaaatgtaaagtgggtttgtatatacatttttagtttgtagttgtttttatatagcttttagatttgaaatgatgtttagtataccccatttcatctctagtactttaattaatctaatctaatctttctattcttgattgtcccttaattaaaagtatcttaactaatattaaatggttcggtattggatggaaaatccagaaattctctctatatatgaaaagaaaataaaaaaagaaaacaagtgatttttttcccaataaaataagaacacattttgtagagttttcataaatttttattttttggttaccaattagttaccaaaaaggaaaaattgcgaacaagtattttgtagagttttcataactttttatttcaaattaatttatatcactattactataaactttaaaatatttatctttttataaatatattatttattttcattgaagtttattcttaaataattctaaattttttagaaacattaaccaaccatttttttttttgaaaactacaaaaactgttatttatcttatttttaaataatttttaaaacaaagtccaaaaaataatgacaataggtcattaaatttttcatactacaaagttttttcaaatgtaacttcttttgaagcttcattttatcatttttttttttcaatgtatgatttacttaaaatattctttcatatgtcctttagaaaaaataaataaattttgcctaataataataaaaggtaacatttcctctactaaatgtgaaattcatatagagaaaatggtagtccgaattcaattattgagttctcgacacttatcttatgctgggagag

SEQ ID NO: 47954 - DNA, 2915 bp, Cannabis sativa
tctttatttgttcatgtaagtattcattaattaattaattaattaatttataatatatatatatatatgtttgaaattaaaataggtaaattaattaatttgattattaataattttttttattattattattattgcaggctttttggtgcactagatgaaggttatataataataactattaactacattattattattaattaatttatatttttgttaagctccattaatttatttataaatgcaatgtaatttttgttgcacaattaatatatattattattacatgatgaatatataattttgtacctactcttttaattaatatttaaaggaattaattattgattatttctaatttattatatatgtgtatatgtgtggtctatgagtattgtgtccatatatttatacatcatgtccctatcttatctttatcaaatttatatatatcatatatgcatgcatatatatgtatatgagctgtataaatgtgtgtatatattccatttctaaaaaataaaaaatatattcatgcatgtcgtcgtaagtaaacttgatattaatattgttttttttttttttttgaaacatgatattaatattgttattataatagaaaataaatttatataataaaagattttgaaggacataaaaggaaggagacaaaaatagtctgcaaattagagaaaaaaagagttttggtctgtgttgtgttgtgtgtgctttatttggtcataaggaacatttgctttgattcttgtaacggttattatttactttatacattcacaaaagttaaaaagtcattgttattaggtagtggtagaatttttgttaactgtctaactcgagtaatccgtctaaattaaactaagataattcgataaaaaattcaatggatatataatttgcccaagacaggttgaaaataatatcaacccgtctaatcaatctgaactagaatttatatatatatatatatttttattatatatttatatattatataatttatatgataatttaaaaatataaaatttaaattaatatgtttttttttttttatgatggttgatttgaataatttatatatttttctcattgttataattaattcaaatataataattgaatgtaaaaatttaaaaaaaaataattagtggtcggttaaggtgggttaacctaaccaaactgaccaatttaattgaacaggttactatttttttttcttaattggaggagctgtacttaattttttgtaacacaatttttatattgagttgaataaaatgtagcaaaaactgatcaaatcgaccgatgtacacccttaggtactagtagtgcacaacactttctataagtggtgttttacgattagttaacgatattcccaaaaagttattttcttaagttatatgagccatgatacttaattacaccaatagcagtataacatcaaggagagtgctaggtactagtggtgtcttttaccatttttctaaaggacatctatggtgtctagcatctaatgttattattggtgcaatttaatatcgggtaccacttattttaatttaataaagattatagagaatcgctaaccaattataagacaatatgttatagaggtgtcatgcaccttggtgttccagaacaatgttgttatacataataaaaacaccataggatgcttctacaatctacccccttgaaaatggtctatcgatgcatcccctatctgtttcggcatctgagagaaatttttagtctattttttttatgttcgtctatattgtagttatttaagatattttgtaaaatttgagtgattcagaaaaatttagcacgttgaaaatagggtttaaacaatttgttgcacgcgagactcttttattttgtacgcatgtgaaaaagacggtttgaaccctatttttagtatgttaaatttttctaaatttcttaaacttttgtagaatgtcctcaataaccacaatgtaaataatcttaaaaaaaaaattgactaaaaaattctttcaaatgtcgaaataaatagaaagtgtattggtatactttttcaatattatgtatatataaatatatttatttacgaacttgaataggattctatctttaacttattacttttggttataaatcaaaacctaacttacaaactaaactcattcgggtcttttatgggtgagtttggaaaataattgagtaattcgaagtgagtgtaatttaaaatgactactagatttaatgtgtttgtttaatgagataattacacaacaatcatgtaattagggataattgaagtatcttatttttttaacaaactaacttgaagtcaacttttagtaggaataaatacaaaaaaaaataataattattttggtcataaacacctgttagaactttgactcaaatgatttattttcttacttatttgataatatttataaagttgcaattttttttgggtaattattaattatgaaaaaatgaaagttttggttgccaagttttgaaaagtcttcttaaggaagctttggaatgtcttggcctccaagttgtcttgatgctcaagttttgtaactctataaatatgtgttttgtgtgagaggtgtgtgtgagagaaaaaaaattagtgagttgtgaaaaagagaagtatgtgagtttgttatgtggtgagagtgagtaagaagaaaatggtgtattgggatttgagtagagagattgagatagagagtgtgtgtaattttaaagtgataagtgaaatatatctctttgtgggtttagtagttttaccaaactgagtaaattgttttgcttcgtttctttttttattttgctgcgcttgaagtttatcatttttcccaacaagtggtatcagagccaaggtt

SEQ ID NO: 47955 - DNA, 1843 bp, Cannabis sativa
aaacagaaaataaaagtgtattctataacttttatttctatttttattttttgattttgtttaagtcagtgtccaagtccaaatatggggctagggttgtagtctgatgagtctgggacaggccggaactaaagtccgtatcgcaaggtccagggtgggatgggagctcaaaatatttattaataagaaaacagtcaaaaaaatttgtaccttttaaaaattttaaaataaaaaagtgaaaacaattttataaaatatgttttaagaaaatatttttattttttaattaaaaaataataatttaaatacttttatatttgaccataaatatcattattaattagattttgtcacatacatgtgtgatgtttgttgatttgtaggcgcccatatatattatatatattactctttttggcttatccaatgaaaatcatgatatatatatatatatgacattattagttcccatgcatagtaacacgacgttaacctatgcacaacattattcatcatttcaataaatatagccccgaataataataggttcaaaaaattatttttgtgtataaagtattattgggtttctttttaaaattttttataaaatactatttttttttcaaagaaaataagtatattatattaaaaaaaatgtagactctaaatttgggcaggtcttatagccttataggcacgagcctagtccgctttagcttacggacgtcgtgcttgaaagtagctatagatatatgtaaaaaatgttaaaaggtattataatagtagtctaacagtaccatttaatatgtaatatcgttataattaaatatataaatttttgtagaatattactaatcaatcataatgtgctaaatttaaatagttttatgtatcagtgatacctgataataacaatgctcatatatatatatatgataattaatttatttaaaagacaatgtcatatttctttattaatgttgtcatcagtgttctattataattttatacttaatttttatgctcaaaaatacatattagaatatttttttaattttttatagccatgtttgtcatatatactcacaacatcattcatatgaaattttgaaaaatttcgaatagattatagtgttgaaaataggtttgaatttttttaaacacgcatatatatgtggtaaatttagaatatcaagaactctgtttttggtattgtaaattattcaaaaaatttcaaaaatttgcaaggatgatatcgtaactataacgaatactgcaatgaaaaaaaaatataaaaaaaatgttaccaaatgctctttcaggcatggagaggttgtaatagaaggttgtaattaacactcattatacatcatataccacatgtgtatgcatcatagtatgatctatactacaccctatcttgggtgtttattttttttattgtcaggtacattatagttatttaggatatcacttataaattttcagaaaattaattgaatagtgtcgaaaacaagattcaaatgttttattacacgcgtgtgactattttttcttatatatatgttgaccgaggtttttggcaactagttaaataatatataagaaaagttgtaggaagttcagtgcatgggatttttacgtggttgaggcattaatgagccttagtccacgagtctttgttattaatgagagtatttattttaaattatgttcttggtgcatttctctaatagtttctctctttgattccttgtaacccagaaatctcgaccctttatcagtctgtttgtggggtatttatagtgtttttctagggtgatccctaggaatggatcacttg

SEQ ID NO: 47956 - DNA, 786 bp, Cannabis sativa
ggaaaatatatttgagaagttctttttttttttttttttttaaataaacaaaaaacttttaaagaatatatttacattgctgcttaaagaaagatgcaattcatttagaaaaaaaaaatgtaatttatgtctaaaaatatgcataggtatataaaagaatagtttttattttattataaaaaataattctaatttaaactagttataaataaagaataacttctaattgtaattagttataaacttttgtataattagtttatttattcctcaaactagtagtaccatcagtattatatttttaatattgatgcaattaataaatattagtttttaaaatttaaattaataactactataaaacatcattaacaatttacaaggtattttctcaagatgatgttaagcattgctgatatctaataatatactcatatataattgtaataactttctccactaatatctaataacaataacaatgctcacatataattttgaatatctatggttgatgcctaatagcaatactatatataattttgaaaatgaggtagtactatgatactccccaaatagtacttcatatggtatgttaaaaatttctcaatctagctactaggttccatttcttcttaccataaaaaaggacaattgctaaatctttttgcccctaaattttgaacacttttattaaaaatttaattcaaaaactttaaatttctattaatacttaaaaattcttaaaaaataattattaaatatatccaataaaattttaatttt

SEQ ID NO: 47957 - DNA, 1272 bp, Cannabis sativa
aagtcaccagttgttacaatcatttatttatagatacggtttggcttccaaaatataaaaaatctttaataagtatcgctctacgaatagttagcgatatgatatcgatgacagtattagatattagtgccttttaacaatttttatataaaaattttgttatattttacataatatatttaaaatgaactatttaaaaaaagtttaactatgcatctcaacttattttagtgttcttgacattaaaaaatagtcaatttcgtatcatctaataagcaatagctgtaaacagaaaaaaataataattaaaaagagaataccacaatttatagtagtttacttttcatatcgtgatggtaataaaattacatctacttagagcttttattatcacaaaataattatcttataagagaactcaggcaaaaataattaagtttagttttacttcacaatttctaaaagagagaaagtgtgaagagacagaagctgtgaccttgtagagaggatggaaagtgtgaataatgagctaggagagctctccttttatagggaatgatgtccaattaaattaaaataaaataatagaaaaatcgcactaaatttgctaagaaatcttgcacgagatcgcaagtaaatttcgaggtcctaatcgtcagaattgcggtgagggtgtgagacgcactagatccgtcttgaaaagagctttaattggccacttgaatcgcatcatttggacaaaaattgagagaattatggccattttactgagtagtgtgcacaactgaaagaggattgcgagatcaggctaacttttgggcccccacgttgacgtaaacgttaacctatgcacccataacttggtttcttgggctttaggcatattttgagatgcttgaatgatgctatagctatccttttgaccttggggaagttattttggagattatgcacgggtgatgcccgatgaatcactagtgacagctaggtgacacttgggtgatcactagtgcacgtggatgtcgatggacttgcgtatgacatgtgtacatgagatattgacttacaggagcatccaaatcttattttgagggcaaaagaagactaatgcccagagcagaactattgtttgaaggacaaaacactgagccccaggccaatgtcaacttgcgcgcccagtgtgcttgcacactggcgcccggtgatgcctgagggataactctctactcgagcggaattttctcttaattctaagtctcatatcttgttttt

SEQ ID NO: 47958 - DNA, 1142 bp, Cannabis sativa
gaagatcgaagaagtagtagtgaacctaatcataatctgctctcaaatataaggggacccacttcggtcggtgacattactctcttaattttatttttcttccttgaaaaaagattacattatatttgtcagggtttctgtatattgaaacagtaatttaatttggtcaatatatcctatttagttggagccattaattgtgttttaacacgacactctatttttacaaaaattgacataaggaaaacttcaataaaatagatcgtctgtataatttgaaaagattctgaaacgacaccttttattttaattattgttgttattattattattattattaaattggtggggtccactaatctgccttgactggtaggagtgcgtttgtaacaatggagttttttttttttttgtatattgtttgtaggtaagacattctcactctcactttttcactcttctatacaacagcaaacacatgcttcttttctttcttcctaaaaaattagaaaaaaccagctcaataaatagttatagtaattctaccgatgttttcgcctttgaattctccggaaaattgaacttttaaaattatcaaaatatcctactgtcattttttttcttttttacaatttccaattttctttctaatctactctcgaccaaactcctttaatttgttggtgggctgagtagtagggtgggggtcaaaacaaactccctaaataataataataattatgattaaattgtgtctcttaaatttataatttctctaaattattgaaattattgggaaattaattgagtggtagtttttataaaaatatatattaatcgtgagctcgagagtggcgttgaggacgtgaatcctttactaccctagaattggagcaaatgtatgttgtaattcaagaaacaatccaacaacaaggggaacaaattagagaactatggaaacaataggtctggcttgctcatgatcctaattctctgatacctttggttgtcactagatattagaaattatttggaaccattgtatggagatccaaatccacttaaggcggaacagtggatgagtatgaaaacttccatttttgattttataagggttgagggtaacgacagtgtatgttgtg

SEQ ID NO: 47959 - DNA, 1219 bp, Cannabis sativa
  modified_base (1026)..(1031): a, c, t, g, unknown or other
aaacaagatgctaagaacccatatcaacctgtatgattgggcttcctcaaattaacacattacctcaaagagagctaaaatttgcctttaattatcttcattaatactttactcaagcattgttttaaaacatagagtactaccactaaagaatatcacaacataaattcacatgtttaaaaacatataatctattgggacctcatatcatatacattatatgtaataacatttaataatcataatgtcaataactcaagaagcaaatattctcagagggtgcattaattaatgttatcaaacattcaaattgtgatatagagatttcctttctcacagcatatatattaattatgtatttgcaacaactcttatatataggtcatattaaacaaatagaccaactatcattaaaagtacatatactaataatatataattagaaagtcatcaatctaaatcatattataaacccattattgaaaactagatttaaatgttgagatcccatataaaattaccaaaatacttctccttttcattttgaaaaacactaccagttacttgttaccataactaaaaacacaatataaaaataaaaattgcgaaccacattgtagtaaccagtgtattcaatattagttggtaaatagttacttgtatgcatcaaaatattgctctaattaatgctcctccctctttttctcgtcatgctccttcttcttttcgaaaacattattggttatacgagttactataactaaaaacatgacacaataattaatatatatggattagtacatcctagcaaccaatttctaattttattagttactagttaaccattactggtacgctaaaaaaaatcaactataggtgttatagtaaccaattacccatttttccaaattactagttactaggtaattgattaaccatgtccaaaatgaaactaaaaaaataagaaaaaaaaggttgctaatatgttcaaattgattgtaattttcaatattattattattattnnnnnnattattattattattagtaaaaggaacatgcttacaaacaatattaagttaattttgaaatcttaaattgattcttttacataaaatacctaaaatgatatataaatatatacgaaaattctaccatgcacccccttaaaatggatatattgatgcatccctatctgttttagcatccgaaataattt

SEQ ID NO: 47960 - DNA, 1126 bp, Cannabis sativa
  modified_base (46)..(53): a, c, t, g, unknown or other
ttgaaaaatattttcacttttctacttttaaaaacagaaaactgannnnnnnngtgttaccaaacgccaccttatttatttattattattattattaaaaataaggtaataataataatgatgatgagatcatctaaaataataataaaattcacagattacttcatttttaaatgcatattaccgtgtcttcgtgaaattctgtacgtaaaatcctactttatttattttcgtatttcatttttattttttactttttttaaaaaaaataaataaaaactgaaaatagtcttcaacgtgtattatgctttctgggtagagtagaagcaaatacaaaaaagaaaataaatatggctccatcactttctgggtagaaacaataatattttataaatgggattattaaattaaatgtagatcagttggaataagaataatctcaaatattcgatgccaaaatcttcaaattctatatttccatatctcttatcttttgcacgtaacaaattttgattgactaatacgtcaaattttatattatccatcattcataatgaagcatcaattgctttcttccatttaataaattataccaaaattaataaattatctgcataaataaactattttgcatgtcacaagattaagtgtccaaactatgtatttgaataagagttagatagagtcattcattggcaatcacttttgatttatatatataaatataatatatatattataggataaaaattcgagctttgaacttcttatttgtgttgggggttttatcatagattcataagtgcaatattctaatttttttaaatgaaagtttacaccattttgtacgtaggagataacttccaatatatagcaatttgaaataaggaataactttctctttaaatgtttttggtattttgaaaattacaaaatatgttgacattattttataaaaatataaatttatggtattttggttgtttgtcaactattgagaaaacaacacttcatgggagttgttttattttattattattattaccaaacataactttttcttcttattattttttttagatatagattaatcataaataaatcttaccaaaatcaattctcaatt

SEQ ID NO: 47961 - DNA, 1326 bp, Cannabis sativa
tattccaagtttaggaagcaagtgtattatgttgcaattgcagcttcggtatactctgtttggcaaaacagaaatgctcaaatttggaattccaacatgcacacagtcggttcattgatgcagcagattaaatggatactgaagcatagaatagcaagtgtaatgccggggaaagtagctgagaaagatagagtttggtttaacaatctttaagaatcatttttcatatcacacataattgtatagattatacaaaaggccttgattaaggtgctattagtttgtaaatgttgtaattggttgtttatgcaatgaaatctctgattcataaaaaaaaatcattattttagagatattcatatttaggatgttagtttaacatacttgtcagtaaatccagatcctggtaaaataatcccaacaggtgaagtataggatatctactgaactctcgttatcaacaaatgtctagtgtaccctggtgttagccatcaacaccgtaagcaccaatagatcattgtgtgggaaatgcactgctcttgcatcttcctctataaatatgactggagtgttctccccctcaaagttcttcagaggtcttcgttctaagctctaagagtgaggttctcgtcttacctctcaggcatatatgtccctccctctttgagtttggcctcctatgcaagaccctctgatgattgtactgacctcttccatcactttggtgacttcactgggcactctatgccggtgctcttcgtctatttgcaccctactgatgttcgcacctccacttctaacggtggatggtgacaggtctcaccccggtgcaaccaactattctttgtcaaggtgagttttcacgtactgacaatgacgagagtgtctagtcatttttaacaattgtgtgcaaaggatcaacctggtctgaacttgtcttctgagaagagggtattgataggctctaatggcctagaatagaaagtggtcccaaggggacaaaacgttgctttcaagctgtagaccgcaggtgctagaggtgtcttggcacctcttacttttgtttggtgtaaggtggtccctgattacaagcttgtggtctgtggttgcatgaaggtgatccccagttgcaagcatgtggtccccgcttcagtgttgcaggagagtggttgtagcatacccttggtcgggtcctcagaccttgcaagtcttgtcgctgctactcgtacatctctgcattcagagctttcagaagggatggtggtacgctttcccttgcacaccttgtcccttaagtccttgtccaacgtcatccttgtcggtgtg

SEQ ID NO: 47962 - DNA, 2359 bp, Cannabis sativa
attccaaattccaaattccaaattaagtgtttgttaaggcatagatagcaaagataacactttaattagtctatatgataataataatattctgtcttagcaaaaaataaataataatattttgtgttgtaaattactaattaattattaatgtatatgtgtatatttatttttttcaggagagctggaaagtcgggaagacctcctggtcaagcttagcccttaccaatttaggaatactatatagctagcttaacgagcaaaaagagcagatatataaaatgacacaaatgagcatatctacaatcatgttttccttaatcttttagaaatggggttatgaaattattaattcctgctgctcatatctgaaaaagttttctcgatccccagcccactcatggagtaatataacttcaaagtcttttcacctatatagctaacgctaccccgctattaattttctcgatgagaggtttacggaaaataccatatccgccagacaaacgagcttattagcttgcataaaatacactcgaaataattcagtgagagataaaagtactgtttctacaaatcttgcctcttatatattagcattcaatacagttaacatatattatatatatataaatacatcagcttgtttatagtgagtgtatgtgaaatatatttataatattcttgttgtaaagttacatttcactaatgaaaataatattttttaagagaatacagaaaaaggaaaaaaaaagtaagcaacccaaaaagctagatatatatatgtgtaatgtataaagcaagcaacagccattccatttcatgcatatcagttatgatatgtatgcatggagagaaaccatgaattcatccaacaaatctcaaataataattaaagaatgatcatcggcttttacactgttcgaaaattcttttattcttttaatttaaaaatctacctacgcatttaaatatatgggatttagttccatctaaagcaaatctcacctattaaagttgttttagtttcttggagacgcttggagacgcttatatatatatatacatatatatatatttatcttcttctgttggtgctttttcatggattcctttggtttaggtgcctcaactactgttttggtctttggtccggtcaagctatatagcttcttattctttctttttatatatatatttatttctttcattctagtttttttatttggctaatggagtttatagtgtcgtgaaatcaaataaaaagaaaacgaaaaaggcaagataagagagatacggtctaattcagtctgttgttccaaagagaaaaatcaaatgaggctctttccttaagcttttcatgctctcttcttttttggggggaagagaagaagcaaaggctgactatgaagtgggtttcaaataagggttaattactaaaaaggaaaagaagaaagaaacaacttggagaaatataaaaaattgttacttttgcagttccccatgtgatgagacattaattaccacaataaccaccaatctttattctatttcttgcacaaatccttagttggctgtgtttgagcccaataagatgatgcagaaatatttcaagcccaagcaacatctactagtagtagaaattacatgaaactattggaattttcgaagtgtgtacaaatttatgacatatgtatatatattttttttaatttaattgggctgtcaacttaaaaatatatatatgtatatatatatatatatatatattgtgtggtttttattcctgccataattttgtaatatatttttgtattttcatattgaggacgtactttgaacccgagtagatccttctgtctatctaggaatccattttcttcaaaacacattcttcaatctcgaacataaacgttgcttttactactacaaaacaagctagaggcgcttttttcagtataataattaataactgacgctatagagttgaaaatttttggaagggaatttgacgccacttttggcgtcggttatttctggcgtcagttatttccaaataaccgacgctaaaaggatttataaccctagcccattccttcgtcttcctcattcgatcagccaacccaaaaatcctcaaatcaaagaaaccccaaaccctctccgccaaccaccacggaaaattaccccatttcaccattttttattttagctcatttttgtatctaaatcttctatttttcataccgaaaactatatacctgcaaatatcacattttcctcattttttagagtaaaccgaaggtagaggtagtggttgtggtggttatacctccggcaactgtttttagtggagaaaaca

SEQ ID NO: 47963 - DNA, 1282 bp, Cannabis sativa
atatagggagttctccaggagattttccagcattctgaaaattctgtcttatctactttgtgatagcctccctccattttatgcaaatctttaaaaccaagctactttccaccactgatcagtttcctatttgagattaacattattaagttaaagataattggaatggtaaattagtgtaaagttgtttttgttactatgttaccttttcttagcacaaaactgataaagcatgcaagaacacaaatagaaaaaaaaaagagagaaatatgtgttcataaaatctaaccaatatcagatgtgattaatattcttactttggatttacttaagtggtttctcgcaattaacaattttatgttactgtgataaattttctaaaaaaatattagtaaatataaagttccttaaaatagttacatttgagattaaattaagtgtgtcacatactttttttattataagagattaaatacatatcataacatatataaaatgtgtaaactaatctgagagtaatgtatgtatttttttgtataagctttttctaaacaacattattgccaaaaagaagaaaagtttgaattcaataataaaatgtaatgaatgaaaatcatattagagattaaaagtaagaagaggagtacctcaatcacttttttcctctctagtagaatactatatagttaaatatagacttataatagtaataatgtagatagctttgcttaaatgtttttctctctctctatttttgattatggtaggagttgtcatacgaattatttatagagcccaaaatgtcctaattgtaatataattacattgattaggtttgtcaaaaaaaaaaaaaattgtaatatgattagattaggaaaagtctcacgattgcatttaaaaaaggaaagatatatccgaaaaaaaaaaagaaaagatatatattttaaaaactatatttaaataacaaattatttttactattattattttttttggtttaaaaattgattttttttttttttttataataatttggaaccttctctgaaaattcggcttgttatgagaatagatataatcataattttaatatacaaatacaacaacaaatttcaaataattagatttttgttattatattattatattatcttttaaaattggtaaaaataacattttattttaggaaaattttacaatgcacccctttaaaatggatatattgatgcacccttatttattttagcatctgaaatagttttttagtcaaattttttctcat

SEQ ID NO: 47964 - DNA, 2998 bp, Cannabis sativa
gagagtaccatagtactatagtagtagtagtgtagtgtaatttgagagtaagaagttgagaccacaagacaagagggtcagctctttattaagttgtgaaaagaacaagtgagtcatgagttagtgtgtgaaagctatatcaccctccatgcacacgtccctttctcgctcctctcccccacatctgccgcctctctctctctctctctctctccaatgagcattgggaatgccaaccacacatgttatatgttatctctctcttatacttcaccccatgcgtatgttagctatatacaaacatatactaattaacatacatgcttcatgtgtgcatgacacatatatacatacatgatgaatatacacatacatgtgaatgagctcacataaaactctaacaccaataataagaggcaagagaagagtagaggtctctctatgccttgactaatataactgccctcttcaaaaaaaaaaaaaaaacaaaacaaaaccctacaagaccaaatagatagatcaccccatattgtctctctctttctctttctctctctttcctttgcatatatatttgcacctttctttcacaactcataatcaaaggaaagaaatatagaaaagcagatccaaggtggttgttaagctgtcattccatcaatcaatcaatcaaagaaacacaagaccaatcatcaatcagtttttctttctttcttttattttatttttcttttataaaagaaaaaaggaatcgaatccaaaaaaaatgtcatcttcttctgcttcaacaatattgccccagcaactggaccacctctcttcctcatccgagcagctctgttatgtccattgcaacatatgcgatacagtccttgcggtacatatatatatatatatatatttctagggtttgtaacctttgttataatgatcttattgtatatatgtctatatatatgtgtgtgtgtaggtgagtgttccttgcagcagtttgttcaagagtgtgacactaactgtgagatgtggacactgcaccaatctgcttccggtgaacatgtgtggtttgcttttgccttcgcctaatcagtttcatttgggccactctttcttcaaccctgcttctcaccataatctcctggtaattaaattaaattaatatataattacttctactaacttgatgattatgtgtatatatttatatatgtgggtctaattaattgatttgataattattttcaggaagagataccaaactcagccccaaactttctgatgaatcaatcaagcatggctgattttgcagtagtgccacctagaggagtcaataatactcgtcatcatgatcatcatcatcatcaccatcatgaaatttcaaggcctcctgttattaacagacgtatgtcacatgttaattaatttcctttgcatataaatatatatatacatactaattttcttctcttcatcatggactctttagagatcagaggttttcttttgactgatcatcattttcttacgaagaaaagcaaaaaaaaaaaaaaagttctgttttaacccaacaccaaaccatcaagcaaaaaagtactattcttgtttcataaaacacatatttagccttattcaaaagttcttacacattattaataagttttaattacagagatatctcatcccttaaaaaaaaagcacacttccagtataggcttattctaattgcaccaacactacttaattacactatttagttatatgtatatgtgatcacaactatatatatatatacacttttgatcagcactgctgtacatctagctatacatgatatatctacaaagattaatcattattaagtgaaagcaaataatcataacataaatgtacatatggagataattttagcagtactagagcaagaatatagagataaaaaatttgtaaagagcttatagtaataatctttctatatattaatttagttataaattttgaagaatatatacattaatgttatatgcagccccagagaagagacagagagttccctcggcatacaatcgtttcatcaagtgagtagttttactcatacattaattttacatattattatcattaataatgttcaaaatgattaagtaattatgatagtttataatatatataatgtgattcgtggcagggatgagatccaacgcatcaagtctgtgaatcctgatatttctcacagagaagccttcagtgcagctgctaagaatgtaatctatactacacaatattcaatattatagccctagccttgttccattcccaaacacacatacttttattactaatattattattattatacagtatttacaccctatagctatgtatacatataaatattccattttaaataaataattaatatgtgtagtttacataatttgtggggtgtatatatgtatgtacgttgtgtttgtgtataaacttgtattgttttgtctgtgtcagtgggctcactttccacacattcactttggtctcatgcctgatcagactgggaagaagacaaatgttcgccagcaggtttctatctactctctctctccctatgccctagctatgtatatatatatttatattcttaatttagtatattatatgtacattaatttttgttctcatcgtctccttgctctctttaaattttgtttaatcaattatgtatattaattataaaccccatgcatgcacatttttttttatttgctaattatgatttatatataaatgtataggaaggagaagacgttctgatgaaggatgggttttttgcatcagccaatcaagttggtgtttctccttactaataacataaacatcgatggatcgaccaatatatattaagcatataaatatatatatggagaggaagctagagatgaagattaagtacgaacgtttattgaaagacaacactatatttcatggtgaccctacgtagtaatta

SEQ ID NO: 47965 - DNA, 1023 bp, Cannabis sativa
tgaagttgatgctccttcgccggttccgatcagctcatgaggggtccctgtatgatcggttttttgctctccgccaaacggactccgtccaagattatcggagaaggttcgaatctcttgctgcagtaatgggaacgatgaacgaccaagggttgcaggctgcctttgttaatgggcttaaaatggatatacaaggcccattacgtttgttgcatccaaatgggctgattagagcaatggaacttgctgaatctattgaagcaaatcaagcccttgtgagaaattataaacctgggcccaatagaccatttcataatcggcccaacactttgagtatcccagaagcacgggttccacacgtgacctcctctcccacttattcgaccacttcagtcaacagcaagatgacttcggcttcaacttcatcttccccaacgagtttcaaacgctacacagaagccgaattgagagaaaagaaagaacgtggtgtgtgtttcaagtgtgatggtcgctggtttcggggtcatgaatgcaaagaggctgaattagtggtggcggttgtccaagatgaggctcaagaagaagcgccggatgattttattgccgagatggtcgggcttcctccggtaggagcagcgaccgaagcccaaactgttgaagtttcattgcattccgtagtgggattgactcccccgaagacaatgaaaatgtttgggatccattcatggacacgatgtggtagtttcggtggatagcggggcgactcataactttgtcactttggatttggctaccaaattggcacttccagtcacaagtaccgaggcttacggggtgcaacttggcagcgggcacgcaatcaaaggtacgggggtatgccgtggggtccctttgactttgcaaagtattactattgttgatgatttccttccgcttcctttgggcaatacggatgtgattttgggagttcagtggttgaatacgctgcagaaaacaactcatcattggcaagagcatactatg

SEQ ID NO: 47966 - DNA, 2854 bp, Cannabis sativa
ggtgtgtgttcaagagagacaaaaggtaactcctataacagagctctaggtataaatgagtctcgtttgtacaagagactcctttttccatgcgattcgttgatccactcttaaattattaaaagatgtacgtattctttactctactactttctcccaccaagtaacacaaattctgcacatagacttcagtacattctagaccgatattcctgttatccgtatttttgaagtaaagacatgtggcaaaagataggagatgatgatccaagcaattatcatctaagtctctttggtcgcgggaggttgcggaaatacttagctagcttagaagaggcctaggtcaagggaaggtttatcaccttgcaactagacaaagcaaccgtccacgacccgaaaattttctcagccttccgagactcaaagaagattaaatccattaagtctccaggaagatacctgggagctatctaaagagtctaagaggaatgccggaagcctactacgaaatggaaatcagacgtctctctcggtgtgtttacctttctggcacaggatcagatcttgtctcttgtgtgcgcgcacctcttctgaacacccccattttgtccgacagctcctctgagcactttgtctatcaggcgtgatctttatccgacacgtgtcctgcaacaacaatggtcccagttgtacgaaatcgtcgctccacgagaagaaaccttctaaggggcccaatattcatgcatataatgtattttatccaaaagtaggcaaccttttgacaaaactctaaacgggtcacgagcatgcccggacacaaactttagcctatataaaccccttcatttcttcataagggggaatcgaaaaaaaataatcgaagctctgccaaaatatcctctaagctttcttcttttagaaacctagagagacagagttaaggctttatgtgtaaatcacttgtaatacatttgaaaagcttgtaaggccagtatactgactcatggactagggataattaacgctcaaaccacgtaaaaatccttcatcgtaattacttgtcaattatttaatttccaaaacttacatttaattaatttccgaaaatttcataaaatattttggtgtttttattgagagttgaggatctctgccaactggaaaagggagagtaaaatatgctatagttgttgtagacaacttcacctgggtagaagcgaaacctatgaacacggtcacctccaaaaaggccttggactttgtcatcaaaaacatcgtgtgccgtttcagacttccacaaaaaattgtctcagataatgggaagcaatttgacagcgtgcattttacgaatttctgtctccaacacggaattattaaaagcttctcagtcgtggccagaccacaggctaatggccaagtggaagccgtaaacaagattttgaaaactacgttgaagaaaaaacttcaagttgacaaagcccactggccagaggagctttcgagagtcctttgggcatatagaacgatagaaagaacttcaaggaggtacacgccgtactcgatggcttatgatcagagttgctagccactacccacttctccgttgtcaactcgcagatgttgttcgaagtctggtcaattatctctgaggcaaaaggcaccacatcgcctccaaccttaagtgccaagaactcactcaaggcggcgcaatccacaatcggctcgagacctcttctgcatcctccatcagctatctccgcttgcctcttcgattggagcaacgtagactatctttggacatctgtcatctcctcgtggtgcctcgttaggtagagattgacttcctctaccttctacagaacatccactttgagcaccttgggacgcaaggccagtcaaaattaagaggaatagatgggagagcaatgggagtttgcttctgctgctgatgcttttgaggttgtaacggttgttgtttttgttgtggggatttttggatttgctgcagggtttatggctgtagctgttgaggttgtggttgtggtcgttgttgctgttgttgtggtggttgcaggggttggggttgttgttgttgttgttgttgtttttgttgttattgtatttgttgttgtttttgttgtaattgtatttgttgggtgtgctgctgttgttgttgcggtggtgacttttgttggtgttgttgttcttgctactggcctaatcgttgctaggtttgggcccgcctcaaatctccctccactccggaagactggtaggaatttcctaacaaattaaatagtaacaaagaagacagagtagattgtagatgaaaattgattgtattacttatcccagagttcgagagcagggttttctctccaaactgtcataaaacctttacaaaatatccacccctttctcaacacacacccacactttattcaaactaaaaccgagtgtatgacaactcacccacaccctaacaaaacctcttaactaactctttgccagctcactcctttctatctcatgtaatattcttcacagtagttttcttgggcctgcgagcgtaaacaaaagtaataggtggcctatcagggacctttgcctcatttctaccccctttgccttcttagccttcggctcggagctaggaggaagggagtttttgttggcaagcgaccttctcaggaaagacgaagccttccccgttttcatctgaccaaacagtggcctccgtaccaccctgaggtaccttgggagcaggcatcccggacgaaaccttgcctggagcaagatgaagttgctggataggctgaacttcaaggttttcatcactagttagggctgcttg

SEQ ID NO: 47967 - DNA, 3139 bp, Cannabis sativa
cccatctcaaacttgagggagtttctacaaccccaagtttgtcaattaggaaatgaaacctatatgctgtcaaactctttgtcaagcagtcagcagtttgatcgcttgaaggaacatatatgacttcaattttcttgttgatcaccttatctctcacaaagtgtacatccaactctatgtgttttgtccgagcatgatatactggattagcagccaaggcgcttgctcccatgttgtcacaccaagtgacaggaatgcatggtaagggaaattcaaattctttcagtaaactttgtatccaagttatttcggctgcaacttgagcaagggccctgtactcagattccgtactcgaacgagataccaccgattgctttttggaagaccaagacacaagtgtttctccaaggtacacacagtatccagcaatgctccttctatcatctggacaacaagcccagtctgcatcagagtaacctgtgatggatagcctatcggaatgtttaatgtgaagaccatgataggctgtgccttttaagtatcgaagtactctcttggctgcactccagtggactgtagtgggagattgaaggaactgactcagtttgtttacggcaaaggacaggtctggtcgtgtgtgtgttaaatattgcagcccccctatgatgcttctgtattctgatggatttgcaagtggttctccatcagctttagacaacggcttacccactgtcatgggtgtattacatggcttgagatgcatcatcccaattcttgtgagaagttctttgacatatttcccttgattcaagtacagacctgtatcatctctatgtacttcaattccaagaaagaagtgaatcggtcctaggtctttgagagcaaagagattattcagtttgtcaatgaaacttttgagtgtagcagctttgtttcctgttataataatgtcatcgacataaattagaaccatgataattgtaccgggacttttgtagaaaaatagagatgaatcagccctcgagttactgaatttccagtccagcagtgttgttttcagtctttcataccaggcccttggggcttgcttcagcccatagagagacttggttaatttacatacagcattcggttgagtttggtcttcaaaaccttggggttgtgacatataaacatcttcttgtagagtaccatttaagaacgcattgttgatgtccagctgtctaatgtcccaattctttgatacagcaatagccaagattattctcagtgtagaggctttgatgactgggctgtaagtttctccaaaatcgataccgggtcgttgattgaagccctttgcgacaagtcgtgccttgagtctttgcaaactaccatcagcattccttttctccctgaaaatccacttgttaccgataatattcatgcctggaagtcttggaacaaggtaccaggttttgtttttcctcaatgctgtcatttcttcacccatagcagagttccagccagggtgatttaaggcttcttcaacagtggcaggttcatcatgtttccaggaccattgtgcttgaccgaggtaggctttgggcttgaaaatctcagctttggatcgagtaaccatagggtgagatggttgcacagttgctggtttatgttgagcagtgtggtctggttcagccgtatgtggttctgtggtgttatttttacttgaaatggtgcctgtacttgtttctgtatcatgtaaatgggtttcatgagatatgtaagatggtgagagatgatcagagtttgttacctgggccatattttgatcattaggatcaattgaagtagctgcaacatctgaaggtgcttctccagggacttgtgataaggtaatggacttggaatttttgagtgtgtgttgaagagactgaaacagagtagaccatgaaggaacactaacacatacagattgctcagattggtaattgtttaggaaacccgatttgaaaggaatcatcttcattgaagatgacatttcgagatatgtacattcttcccgtagaactaagacacttataacctttatgagcatcactatatccaagattcacacattttacggagtgaaattagaatttatgagtttggtaaggtcttatgcaagggtagcatgctactacaaaggttttaaggaagttataatctggtttcttatgatgaacaagctgaaatggtgactggtttctcaaaattggtgtaggcagtctattaattaagtagacagccgtttgaaatgagtcccaccaatatttgagtggcatgtgagcttgggcaagaagagtcaagcccatctcaacgatatggcgatgttttctttcggctctaccgttttgtgcagaagtgtgtggacatgaatgttgaaaatcaataccatgctcaataacacattttgagaatgcttgaaattcccctccccaatctgtcttaagtgctttaactttcctatcaaattggttttcaaccaatgttttgaattggacaaaggctgcaagagcttcatctttggttttgagagggtaaatccaagtatatctactataatcatctacaaaatgaatgtagaatttatagttgctgctggaagtgattggtgcaggacaccatacatcagtatggattaagtctaaaatgtgtttagcacgattaggattagagttaaatggaagagcatgagattttccaaattgacatgcttcacagaagctattcttttcattcatggctgtttttacattaacaagactcaacacatgactcaagactcgattggacggatgacctaaacgcttatgccatctatcctttagggaaactaaatttgaagtaacaacttgatttttcttggacacaaacactacaccagtatatggtgtaacagacttagactcaaccacatgactcaaatgaggagaaataccttcttgctggtttgggagttgatacaatccatccttaagagtcccttggaggagcaccatctttgttgcttgatccttcacaaaacaatttttagcaaaaaattcaacaaacacatcattgtcatgggtaagtttagaaatgctgagtaagttcttggttatttttggcacatgca

SEQ ID NO: 47968 - DNA, 709 bp, Cannabis sativa
ctctctctcgcagtcatggcggctctagctcgattctctaagaaggctttaaccactctctcgtctcagcagaatatctttcatcgtggactcgccactgaggctgggaaggccgtaaatccatcggccgatcgagtccaatgggactaccgaggtcagaggaagatcatcccgcttgggcagtggctcccaaaggtggccgtggacgcctatgttgcgccaaatgtagttttagccggacaggttaccgtctgcgatggtgcttcagtctgggccggttcggtcctacgaggcgatcttaacaagatcaccgttggattctgctccaatgttcaggaacgaagcgtcattcatgccgcttggtcttcgcctacaggttcttaattctccattttcgtgttttttgatctcttaagctttggatttgaattaaagtatcttaatttatggtgtattttgttttggtttctagttctttattaaagtttaggttttgaattaggtagtgaattgctattgtcttttaagtaagctgaaaatgatagcttggagactgtgttttcgaatgattgttaatgtaagtaacttgtggatatagtcttgaacctttggaaaaagtagaggagaaaacaagaaaagatggaattttgtgtatttaggaactaaacatgaaggagtagtgggaaaaacatgttttggcatgtctttt

SEQ ID NO: 47969 - DNA, 1080 bp, Cannabis sativa
gtggggggatgatgtgaaaaaaaaatccactggtgtacttgagagaaattgtgcctacataaagaagatggtggtatgggtttcagagacttgcatttgtttaaccaagctcttcttgcgaagcaagcaattaggatctacaatgtccctatctctttggttgcctgggttctaaaaggtttatattttaggaaccaaaattttggtgatatagttcggtccaagtaaggctcttttgtgtggaaaaacatttaatggggtaaggtgctttttgactctggagcagtttggagggttggcaatgggcatactattcatatatattctgacttttgggtccactcggcgtctccatctttggtgctggctcctcatttttttggtgaaggtagcaaagtttctctgttacatgaggctttaggggactgagatttaggtttggttcatggtatcttcattcctaatgaagtagaagctatcttatccattctttggcccttctcaaaacaggatgacaaactcatttggaattttaaaaagttttgttggtactctatcaagagtggttactggatggctcttcgtacaaagggcttgggtcgtgcttctccctctaggaggtactcaggtaggtggaataaaatttagacccttaatatccctccataagtgaaattatttgtttgggaagcatccttttattggattcctacgaagattgatttggctagtcatggtcttttatttgatggcctttgtcctctttgcgagctccatgaagaggctacttatcattccttttggggatgcccaactttaatggcttgtagaaaactttgcgattttgatctggataactctttttccactcatacatatttttttaactttattcataatattaattatcctttgtcgaaggataaattgaattagttatggtcatttttgtggcgtatctggttcaagagaaataaaatagagcatgatagctttaaatagcctcctgatatggtggtgaattgggcccatgaattttttcgaaacttcaaacatagttgggctcggtctgggctttct

SEQ ID NO: 47970 - DNA, 1664 bp, Cannabis sativa
ccaagaccagcacctaggaaatcattatttgggtagtatagagcctttaaaacttgagccaccaagctatccgggttagtgacgagtttccagccttgttttgcgagtaatgcttgattaaagtcctcaagatctcgaaatcccatacccccagaccacttgtccttacacaatttctcccaattaccccaatggatttgatgtttggttgtcgaagatccccaccagaatctcgcaataagagcttgaatctcacttaagaggcctttagaaattcgaaaacagctcattacgtacaccgaaattgcttgaatgattgattttatcaacacctcacggccggcttgggagaatagacccattttccatccttggagtttttcccacactttgttccgtaccaaaccaaaagcttctttcttgtttttaccaacaaatgcaggaagaccaagatatttcgaatggttctcagtaaaagtaactcacaaagctgatgcaagtcgttggccatccgtgttcttaatcttattcccaacacataaattggatttggtgaagttaatgcattgtccagataaggtcgagtaactatcaagcacttcctttatagctttgctttcttccattgtcgcatctacaaatattaagcaatcatccgcgaacaatagatgtgtcaaccttcttcctagatttccaaaacgtaggccatgaattttatttgctctacttgcttcatttaacaaacatgacagcccctccgagcaaattagaaataagaatggcgaaaggggatctccttgcctcaatcctctctttggaactatgtttcccttagcttctccatttagcaaaacagagaaagtaaccgtcttcacacatcccataatcttgctaatccattgttcctcataacccaaacatctcatcatctcttctatgaaatcccattccactcgatcataggcttttgacatatccaatttaagagccatcttctttccattcccaaaacgacccttcttcatacaatgtaagctctcgaaccctataatggcgttatcttgaatttgtctccctttaatgaatgcactttggtttttcgagatcaccttctccatacttagtttcattctattagccaaacatttggatatcaccttatatatgacattgcataaacttaagggcctatagtcactcaccttagttggatccttaattttgggaataaggcaaagtaaggtgtcatttaggcagctgcaatccatattattatttagcacctccaaacatgtagcaataacctcatgtcccacttccccctaatgattgtggtagaataatcctggtagaccgtcctttcccggagctttgagagggtgaatttgatcaagagcttcctttacctcttccttggtgaagtcttccattagcatggcattatcttggctggatactcgattcgacacacaccggtttaggacatccatcatattttgattcggtcttgaagatgaaaagagttcagtgtatgaatgaaccaatatgtgctctatttcttcctctttgttgcaccatttcatattgtcatcgaagagaccattgatcttgtttttcttttttcgttgagaggccttgtaatggaagtatttcgtattgcgatc

SEQ ID NO: 47971 - DNA, 2057 bp, Cannabis sativa
tggaaagtatttttggactcttaattaaaatgccttcaaaaatcaaatattttatttaaaaagccttttgtcatgctctttcagctgcattaaatctttataatcgaaatattatttttagtactttttactctttttattttgtaaacattgaatctgtttcttatgctctcttagaatgttccaaaacattacatgaatggagaggcactacttttaggaactttcatgccataaacaagagttgtgatattaaagaatacttgcttaagggttttgaaagtttttcaaaggatgagttgtgtttgtttttcaatataatttggaaaatatggaataagcgtaacaaagttttgttcaaaacaaggaaattacttcaattctgccattgaatttcaagtctcttctttgctgcatgaatatgtcaaagctgagctgaggatcacaaaattgaaactctaagtgaaatgatcaatcaagatttagttgaagtggttcacggtaacggtgagttatttagaaatttacctagccaagcttctttaaattgaatgtagatgctacgtactattgatgatcacaattcgaagattgggattggaaaaattgtgaagaatgattgagggaaaattgtagctggcttgtctacctcttttgatggtaaattgtccctcttctagctgaagcaaaagttttagtttgggctctcaactcgtatgtatttgtagaattttctttcgaactgattgagtttgattgtaaaattttggtgaatcaaactcaagcatctgtccatacacgctttcctaaactagtaacaaatgttgtcagtgtgtgggcatcgtttttcgtagatcgcgaagtggcattacaagtatcaccacccacaacaaccattaaaaaattaatagctaagagaatagaatgaaaaacaacatttgaatgtggattattaacccaaccaacaacgatagtagaatcactattaataatggagatattgaagccaaattgatgcgcaaaagtcaaccacaatataatagaaagcagctctgccacataaatagaaaactccaccaacacactagttgcccatgacagccaaaccacctttgcttcatcttaaataaccccccccagcctaacaaccactaaagcatcggtcgccagttcaaaggaccaagttgatggcaatctccactgtgaaagtcgttggttgaccgggttcggagacgaagaacccaacaggagtctccaccaaacgtgatcttttaatttagatacctggttttgtgctagttttggaactgcttctattctcgactatatatcaccaaacaacactgagtttttatcataccacaacaaccaaagagttaccatcgttaactcaaaactctcacgagatagctttttgaagaggaaaagaaaattttctggaattcgaccattcacacattgacaaagcaatggccagacccaaaacggtgccacatcaaaattaggctagaacaaaagaataaagcatgttctaaagtttcaaattcctcctcacatcgtaaacaacaaagaggtacttgaactttctgagacctaagttgtgtagctactagtatcaccaaatggaacatacgccggacaaaaactttcatgtttggtggcatctcaaggttccataaaccattccaccatctggccattttagatgagtttgttactccctcatcaaattgaagtgaccatgccaatgaatatctactctaaatattataaattccatcctgatcatagtgccaacaccaactatcccccactactcgcctcgctatggaatagacagaattatcttaacatccatgcgtaaaaataactactagagcttcccaacatcccacctaccagctggaagaataaattcactcaccgacactcatcattaacccttctcatgattggcttgaaagaccttggtctcaggatccacaggttgttgaacgatagtacttacattccatctccaatggaccgctgaagaccactcttaagaacttccaaca

SEQ ID NO: 47972 - DNA, 1085 bp, Cannabis sativa
aggggaaatttttaacggtaaaaaaaatttagggggcacaatttaatacacgtgaaaattcgggggaaaaaattattaattagccctaatagaaagctaatgtaccattattcacttttttacatttccaatgtctacctaactacctttctacaatagttacgtacgtaattaggattccatgacttcgaattatatatcattattttcttaatttatttcttttatactttctataatgttctatattgaaaattgattagcatgataaaatttaataaataagaattaagtatatattttttcaaatatgtacgtatataataaaatttattgattttatattgtttattatattatatatgggcttagtgtatataggtgtcgtactataaatatggacgtatcatgtcatgccataaaaaagtacgaatcataccgtaccataccttaaaaaaatataaattatgtcgtgtcgtacaataaaaaaatatagatcatgttgtgtcgtgctcagatttgttatgctttacttgagtcgatccgttttcttataagagttcaaattctattttttcacattttatttttataattactaaagtgatgtattttttatagtttcgattatttttatttagtttttcaaaaaaatttcacataaattatataaaaaaaatcattagaacttaaattgaaatatttactaataagtattttaattattattattattagtattattaaacgatcatatatctaagggatatgtttctatattttatgatcttgttgatgatatacctcttttgttatcctcttttcctagagttcttgtatctcatgtaaagcgtgatgctaataaagcggctcacgagttagcgagatttgctcttcgattggataatgattgttcttggttgggggaaattccatctccaatccactctgttattgttatgaattctattcaataataataatagtattttctcaaaaaaaaaataataacttatattttctctaaattttaaactaaaaataattataataaaactaattttaaattaaaaaaaaattataga

SEQ ID NO: 47973 - DNA, 1982 bp, Cannabis sativa
tatataagatcacgagaagaaccagaaatttgctagtcacaacaataagttttccaacaattattccttctaaagatttagttttatatgaaagatcagtgcaatattgaggagaaatagtttgtttctaagttcgctaaaaatgaatggaacttttttttcttcctccattcaacttaattaatataaaagccactatatattagagccactagtgcaggcccaactattgttactaggtaggccaacagtggagccagttcatttgatttttgagcacatataaatctatgtctctctcttattactagagccatgtacgtgccattggcatgtttgtttagcaaaaataattttataaaatataatacatatacataattaatccaaatatttattcaattatatgagtatatttgacttttttaaaaaaatgaaaaataaaaaatctgacaatacttgtaatacttacaatatgatgaactatttcttaaaaacaacaatgaactaaatatttatacatatatatatgggtacattcaatcccataattgcaggtactgtcttcgcatttggacacaacaagattaatctctcgaatcgtcatctctcatgcttcgctcagcatagccttgtctacaccttggccggacatcttctcaatcttcatgtttagatgtctgaatgttacagatcctgagtagtcctttatgggctgctagggatattttcctttacccaggtgtcaaaaatatgggacacatgccatccattcctttttccatgtcatggtgcaaacaataggataatatttgtctccaagtctgcatgcgaccttcctagtcacacgtggacttcactcagcctgcagtcttgtccggatgggtgacgcgtgtcgttgatgtcagatgatgaaccgatgtgaccctgactaagagtctcttcaatttctgtccatttaatgataattcacggttttaccttaaatcagggttcaatgtgttcgcgtgtttgacggttacactccttgtaatgagtacgttacgtatacttttgggaaaatttttgaaaaatttgaattttaaaatgattaattctcttttcagattgcatataaatagaattaaggatctctaacaatccttttagccaaatttcctctcaaatttgtcaaggaattaacaggaaagcttttgacgattccatccgagtacagcaagaaagcttcaaattagtgagtaacttcttattctttcttttacatatttgcaatgaaatgcatgcctagtttttggattttttgttatgaatctcgcctattcttgaactgttctaggttaaccatagaatacttaggttaaggacatgaaaatctcatttatattaaaccataacattttattatctgactacgcttcgaatttaaccttacaacgttcacttccactcgtccatagggttttagcgaaactcatattccaattcgaagatttaaacttcttggattgaaaattctctatatttgtgaaactttcacttttgatttctcaatcgaatatggccggtatatacaacctaattttcatttgttacttcgaccaactctcactttcttgtccctacctttgtagatgaaccctggtgtgttttggggaggcaaacatcatataaaccaggatttgctccaacttttatacgaggatcaccctcgtctccgtgctagcccatcctcgtccagtgacgatctttccaattatagctttgaatattgggaagtaagtagtgaacatacaccttccccagagcccgaggtgcaacatcatttttatcccaactagattcaaggtgaaggacacggtcgtttcatctgggaactaaggaaaggttggaggcattaccttcttactaactggatgtataaagttcatctgaacatggttgacactctacctgggggccgcccaaaaccctgttgttgtgga

SEQ ID NO: 47974 - DNA, 1469 bp, Cannabis sativa
  modified_base (1394)..(1402): a, c, t, g, unknown or other
atcgtacttgataattctatattagagatccatttaatacactatcaacttgttttattcatattgtataatcttatttctcttgtacaaccttacaagattataccatctctaataagaaattttcaaatatttattaattaggtttctataatttaagtatttatttatcttataattgtgtttcatatattctataatatattatccatgaaatacttactattaggacacaaattttaatactggattctctaatgcagattgggcatgttgttaaaataagaacaaattaattacaggatattgtgtgttcatgagagactcttttatgtactggtcctctaaaaagcaaacaatagtggtatgatcgagtactgagtcagaatataaggctctagtgcagaacgattatggttgcagggtttactgaaagagatgaaagtcaatcttccaagtgcaccaaattatttggtgtgataacatgagtgcaagtactttaaatcaaaccatgtatatcaacatgctaggactaacacatcaaattagatgtaaacttcataagggacaaagttatgcaaaaggcaattggaaatttgatatattctatcacatgaccaagtggcaaactgcttaaataaagggttgacacctaccagctttcactttcttatagacaaacttcagttgatggaatctccctgtcgtttgagaggtgtgccatgaaatgataggtgaccttacagtctaagctggcactcccaatggggattgtctatccgaatattctaggctcagtacaattatgttagtatataattcagcaatttgtcagcctagttttctgtgtaattccttttgtgtaatcagcctacacatatcagtttttaatggctgagatcaatgcattcattcatttatgcttaatgagttgagatttaatcattctttatttttcaatcttagggttcgtttggtactctatattgtaatgttttgtattgtgttaaattgtgttgtattgtattatattatattaatattatttaatacaatacaatatttagtattaacttatattaattgattgtgtaaagttataatatatttttaatacactaaatcccaacactaactacgggttcgggtctcgggtccggatccacgtcccgagtccgagatccgagtctggggtcagggtccgagtcctaggtccggggtccgggtccgggtcaggccaaaaattggtgttgatcccaaatcctttgtaaatattataatacaagctaatacgaatattaaataatataacataacatacattgtattaaaaaatttggtcgtaataattaatacaatacattgcttaatctaaacatagtgttatttattannnnnnnnnatacgacccttatacggcgtaccaaatgagcccttaaggattagaagtgctagtattttaattcttg

SEQ ID NO: 47975 - DNA, 1124 bp, Cannabis sativa
aatttgttacactaaggaaatgtagatgttagttctagctctatcactattagtaagggtgacagttcaagtcacaactcgggaatttaatacgaacacgattcgagattttacgggatcaatacaatgtaaaaattagacgggccgtgtttgtgtctataaatttttcgggtcacatgtcgtgttcgtgtcaacaatctaaatatatttaatgacacgatgacactaaaaacaacaatttaatttataatccgctaacaaaacacaaacacgatacgagattttgcgggttcgacacaacataaaatttatttgagttgtgtttgtacccgtctttaataaatttttcgtattgcggatcgtgttcgggtcaacaattttacaataaatttaaaaccctaacacaatccgaacatgacacaccgacacaaattgccacctttatctattagtttataaaggtccaccctatgtataggcaagtcaattttgtatctagggccttccctaaaaaaataatattaaaatttaatgatattacattctactagttagcgatctgtttaagtgatacctttagcaattctcatacgaaaaatgtatttacttttcttttttaggttgaagtttcaaattttagaaaagtatacattttctacataaaaaattgaaaagaagaatatatattattacattttggtgtttttattggttagttggtaactagtgaatgtatggatagcttttgttatgcaggggaacaagtgtgctatgatagcaaaaatcacagaagcaaacaatgtcttaaacagaagattaaaccgttcaccaacttatgatgaagttgccaaagagctcaaactagatgtcacaacagtgagactagtttcacaaagaaatcgccccccgatttcattggatcgcgcaataaccgatagagggcgaatgacactacaggttacttgccttgaaaaatactaaacactcaatcaaacatagtcaaaacaaattgaagctcatttgtacatgtttttttgtttgttttgttttaggagattatgccggggccagaagaaacaatacccgaaaagatggtaaaaagagagcttttgaagcaagaaatg

SEQ ID NO: 47976 - DNA, 765 bp, Cannabis sativa
ttaaaatatatgtatatttttaccgggtactacaatgtcctcaagaacaactccatcctcagtggtaagggagttaatatgattggcccgttttctgttagaggcaaacttgtggaataaacgagtgtttttttctccagaatggagccattggattacgagatctctatttcaagtatgtctcttctttgaatagaagagtgtcaaggtttgtttgcaacaatttttgacagagcaaggcctctggagaattgtcctcagagtttctggcttattctagatctttctaggttttcttaatcctttgttggaagctaaagaaagttttgtgtttctattttgagagaaagtcagcacaagtcatctgagtggagtggagagcttggataggggagccatcatgagtattgtgctcccaagccttagacaggacatcattccaggtgggcttagtgagccaaacgttttcaaaaaggaacatttttatcttagtgtaaattcgaagactgagtgggatatgtgaaaggatttgggttaccctatgattagaaccaaaaaagtcaaggtgattaagattgttactagggtggtttgtgtgccgatgagaattgctaacagcccagtccaatcgttcgtgagtgttcctatggccctggttgttaggtgtccaagtcattgttggaaattgttgctccaaaattcgcccaaaatacgtggaccagtcgagaggggacacgtggatcagataacttggaaagatttgct

SEQ ID NO: 47977 - DNA, 786 bp, Cannabis sativa
ccactacaagatcgtcaacagattcaagaagcatgaagaaaccatccctaatctgggatgggctaatgacatccgcatacaaggctgaaagcagaactgaagccatttccttctccttgtcatgcctgtccatggccatggacacaagccgcttgataaagtaagggagatactcacttgagccgagttctctgaggtcagatgcagccaaatcaacatcaccagtgctgaagtattcctctataatggagaccacagctttcttataatcatccaatgggtctgaaacagttgacccaacaagctgatatggttcctgttgaggaaagattaacaggcaaaacaatacattaatcatgtggattaacttcaaaaagcataaacgtacataaacctaaaaaaattgctcaaaaaaaaagttatctctacattaatgtgcgggtcaaaatattggatatacacacaatccacctgtataataacacacatatgactgacagaatatataaattagactggagcggaaaatacctccccactgtcatagttaggatcattcctatcaagatgggattcaccatcggtgtcgagcagtttcccccaagttcctttaccaccaccaccatctgtaagcataaacaagaagttcaagaggaaaagaaaatagtcaatctatctatacataaaattttatatgaataaccacttaatcattcaacattatccataacaagttagggtaagaaatacaataagagatgttttatgatgaaacaattgtaataa

SEQ ID NO: 47978 - DNA, 4202 bp, Cannabis sativa
taatatattatataaaattatgcagtataagtaagttaaactattgactgaacatttattattagtaattataaacatccttaattaattaaatatcaaactgatattctatcaaatttaattgtaaaaaaaacgtctcgtttcaatttttaccctaggcccctcacttgcttgagacgatcttattgttaagcatgtcactattaaagtcattcttaccattgtcatcacaaatcactagacactgaggcaactagatgttgataatgcattcttaaatagagacttacaggagaaaatttacatggtccaatcaccaagttttgtaaatgaacaatttaaaatccaatccatgtttgcaagttgtctaaggccttatatgaattaaaagaggcccgtagagcatggtttgataagctatatgtagtccttttcaatcttggattttcctctgcttaaactgatcattcattgtttataaaaatcttttctactagttgtttgtatgttttaatttatatggatgacatattaataaatggtaattattcttctcaagtctccaatattttcactgctttgagcacaaagttttccgttaaagaccttgacaacttaaactactttcttggcatccaagttgttccaactgctactggtctcatgttgtcttagcaaaagtatcttcaagacttactttgtgatgctcaaatgcaaggtgtcaaaataaagaattctccaatatattcaaggtagagattatcttaatatggaagtgttccagtaacatatatccagcactttataggtccattgtaggtactctatagtatgcctcaatcatttgaccaaacattgcctttagtatgaataaggtgtagtcagttcatacacaatcctctccaatcacactagatttctatcaaacgaatactaagatacttggctggaacattggactatggactgcatctcaccaaggcctcctcttttgatcttcaagcttattgtgatgctgactggtatgacgaactagatgacaaaagatcaacaactggtttctgcattttttttggctccaatcttattacttagcagtccaagaaacaaacaaccatttccagatcttcttcgaagacaaaatttagaacccttgttgcagtagtcactgaactcacttggttgcaatcccttctttttgaactcaaaatttagataccttcacctccatttgtctggtgtgacaatctaagctcagttatgatgactgccaatctagtactcgtgatgctcagtggcatacctaggatttaaagtgagggggcgtattttttttttttttgtaaggaaggagcaaaagtaaacttaaaaagaaaaaaaaaatactcttggtgggatttgaacccttgagctaaatattatgtttataaatatcatctttttattacaaatgtatgtcgtaactaactaaaatgtaaatatattttttttcttaatttttatttcagggggcgactatcccgccttgtttctatgtaggtccgcccttgttcatgcttgcactaagcatattgaaatagacctctactttgtttgggacaaggttctccataagctaattcaagtcaattatcatgttccctttgaacattaaattgtagatggtctaactaagcctatttctaacaacatgttctctattctcagagacaaacttagtgttgtttgtgctcccacattgagtttgaatggagctattagagaatcctagcctaggcttgtttactttgcttagttttctgttatacgtaactagttaagaggttaattagttagtagttataatttctaactgtctaactaactttaaggcagctggcttagatgactctttaagttttcaattcttgtatataaagcctctataattgtctttcttaattaatcaaattattattaagttatttttctctaaaaactctacaattattattttattttatgcgcgtgtaaaataaattatttgaatgctgctttttatattgtaaattattctgaaattctcagcattttgaaaaatatatctcaaataactataacgtgcacaaatacgagaaaaaaaatgggctaattttttttttttttttctaaatgtcaaaacagtggagagtgcattgtaaaagcactctatatatttatacatttatccctactgattttatatatatataaaaataaattataatgatatcatgatataaatattttttattagggtatagatcgtagtccctctctcgaactaatcccagtcaatattagagtaattaatgtataataaatattattatttttatataaataaaatatccatatgtatagtttggaagataacatagttctatctaccattatattataatcttctcagtttggtgatgatcccgtctcattcaaatattgagataacctaattaattgcatgtgtatgtgtgtgtaagctttattaatttatttaattagtgggtctaactgcttacttaccttagttaataataattttcgcttaaaaaaatacaaaaaaaattgaaaacacatcgataataaattgggtcaacggccaccactagttttaaatttaatggtaataattctataaatacatgttgtgtaataagaatagaaaaagggaatatattaatatatatagcaaatttgtggtatgacttagcataaattttgtaccgttaaaaaaactttttccactattaattttagataatataattattaaaactttatacatattataataatatttaatatttaataataatatttaattatatatttattttgaaaaaataaaataatattaataattaaaaaatttattaattttaaatgtaaattataattattttttttagttaatatatattgtttttataaaaatagtaattttgaaaaaaataaaattaattacttacgaatttcgctgtcaatttttttcatattaatatttaactataataaaattaattacttaagtactttcacatcagcttggactactcactattagtgcaaagctcaagataaaaataatttattaacagaaataatgataataaaattgagcactggacaaaaccagattctactacaggcaagatcaatgttgatggtgccctttttgagagagagaagagacttaaggttttgggatgttagctcgaaattcttcaggtaggctactagatcaagtttaaagcgaattaccatggcagtcttatatatgcaacagaagttattgaggcgttgggaataaaagaggctcttagctagataaagagtaagagtttggaataaaataatagaggttgaaactgatagcatgctcactgttcaaataatttttagtagttaacaaatgtcttctgttttcgggttgattaattattaatgattgtaagaatctgttatcttctctatattctactagattacattgtattagacgaatcaagtagctcattatgtagctaagattctcagtttttctctaattgtacacgtagcattcatgatcataatgcctcagctaatcttcaagttattttgtactcggaatgctaaatttcaatgaagttgatatatttcatgatgttaaaaaaaatattttcgccaccattttgtttagatacataattctgccataattactttttaaattaatttacattgttaatttttttatcaagaaagataatttttattaatctaaccgagtcaattacatccacaagggatctcttttcaaaatagaaacttacaactcttttatatttttaagaacaattttatctatgctagataacttcttttcatgtacaagattaagtttaatttactcgaatttatacactttttcttatttagatacaaattttaatttagccaaatgttataaattatacctactaacacattcttttttatgaacataatataatttttatgatatattttaaatattttttttaataacaacaaagtccaaagcaaaacaaaaaaacaagtcctctatacaccatatgtatatatatactagcaaaaagctacatgcgaggcacatacactaaattttatgctagttttttctatgttatttgaaagtgatacaattaaaaattaaataa

SEQ ID NO: 47979 - DNA, 2427 bp, Cannabis sativa
  modified_base (122)..(124): a, c, t, g, unknown or other
atttattattctagaaagaaaagaagaaaagaaaaaattattcaatccagttttattcacgacgataacaaggaaaaacaattccaccgaattataatgttaaaaaataaaaataaaaatannnatttttttaaaattaattatttaactcgtaaaataataataataagaataagtggtgttatgaaatctctcacttcaatgtgaggtttgagatatcccttaaatgagacaaaaaaaatacaaatataatcacgagttatttcacctccaataaatacttgagcctagctcaactggtcataggtgggtgggtgtgtgcatattggagatcctaatttcgagttccaaataaaatatggttgtaatatataaacgcttaaataaaaaaaaaaattatttcacctccaatagccgattttatcaacttgatggtaacttgatctagtgaccaaataatgcaaataagacttcttgttaagaaaaatacatataaaatttcgttttgtctcaaagctattttttttttttattctactttcttactttaattttaatttattttattgagtggttaaattttagctgcttgtataattttatttctctaacttatttcttactaaattactttatagattagctcacatttatattttaggaactcaacagtgctatagaaaaagaatattaataatagacattgacatcaataatttttgtttaagaagtgaaatgatcattttcttttagcttggttaaagagtgaaatgatcattttaaaaattttagcttggttaaaaacgttaaatgatagaatactcaatttaaaaattttgttagtttactcaaaaattatttacaaagaatagagtgtttttatattaaacggtaaaatagtaattttagtcataacttattctagaccgtctataaaagattagttgataactatgacataaataatgagtaattcataacgtatctatattgcttataaagtaaactataaaaagtaatttgcactataaatacttaagtgtaaatttcaatagcagataaatacttaagttcaactttcgattgtagataaatatttaagtttaactttcagttgtagataaatacctaagtttaatttttgacggtaataatacaaagttatatttttagaacttccgtaggtacctagtcattaagtgtcgagtcaatggccacgtggcagtccctgattagtctaagtctttaaatttttatattttttatttaaaaaattagtttaaatatacaaataaaaaataacacatgaataatgacttgacacttaacgatcaggtgatcgctaagctagttttaggttcattttatgaaatattttagacgtatgttttaggtaattatattcattttgtgcaaaattacgtttgttttctacttgttttaggtttaatggtaatattcataatataaattttaaaatgagaagaaacatattaaatgagatgaatataatgaatatatcatggaatttagatttcaagatataatggggtgaaagattttaagtttttgatgctcaacacactccgtttgtgattgaaaaacaaatttgaagcttcaagacaattttttactatgatgcgttcaaatcagaaaataatgggtttaaattcttgggcacatcttttcagagtgacgagtagaatgttctaccccatgtcgcattaaattcatgcacggtaccctagcctcgagttgtacgtcatgcttcatacaccttcctatttcctctatgggtcgaggttcatccgcaaagagacagagacaaagctactatcctcctggaaagtccttcaggagatgactaatctcctgaagcttctgccaatcattaatctccgaatacaatttaacatagcacgtctcgtattaaggatctcattgctatatgactccttgagatgcaacatattttggaagaaatcctaagcaacatgtatgataataaattaaattataataatattatcattataactataaataaataatttgtaatactttaaactttataatttataaaacattgtgcagtttattttttaaatttgattttcttcacagtaacttttcgttttcctcacagcaccattggattagtcctatgttgtttaaggatatatttatagcatactatgtggtgaactttttgagaaagaacattgctatttgataataatagtgtccaacaccttctataagtagtgcttcacaattggttaatgatattccctaaaaattattttttaagttatatgagactcgatacctaattatatcagtagcaatatgatattaaaaagagttagacatccataatactttttaacaattctctttgagaataggtttatgcacctgtcctcc

SEQ ID NO: 47980 - DNA, 840 bp, Cannabis sativa
acctagcctcaagtggttaacaagttattggatattatgataagttttattgtatatgttaaacccactttttattaaaatacgtggcaagcgtacaagactccacgtggcagagggggtccatggagaaattagtattttttttgtggaattactccatacctggactcctcgagtaaatgtgtgttcgggagtaggtctctcatatcaagataaaggatcaagtaaatttttagccacccgaaaggtactaagctcctggattacaggtcctttggaactccatcatttgcctaacatagattctaaaacaaatcattgtacatgactatttcggtgcaggagtagcattattacgaagtcaaattattttgacaacacattcacttcggcaaataaaagagacgactatgaactatcacattaaccacacatggaacaaatattgtctcaccaaactcctaccacaacggctaagtagtacctatagatcaaagagagatgtacctttttcctcgtttgacccttcttttttctataaatacttggaactgtaatggaaaaagggacatttggactcgcatacaaaagtgagctctcatactataacttaaatattctctaattaagagaacattcccactataaataaaagtgacttgtggactacagttcactaatactgaaatcacgtaaaaatcctttatttttcttaatcatctttactatttacttatacgtatttagtggttgccaaaaatatcagtcaatattttgttgctttcattgagagatttgagaagctttcacaaaaaatcagaacatatgaatttgttaaag

SEQ ID NO: 47981 - DNA, 2314 bp, Cannabis sativa
tttagaaaagagggtaaaaataaaagagaacaatataaaaagggtatagagtgtaatttactcaataaattgggccgaagccgatgaacccaaaacggcccaaatagaaggagacaggcccaatacatagacccaaacaataactagatttggaaaaggaagaaccagaaagtaagatctctcccatctctttccccaaattcagtattttgacaaaaaaaaaaaaaaaatcatcaatccaatccctaatcgcaaatctagagagagagagagagagagtgctactacaatcaatctgaaccggactggatcccatggataccggaccggcgggcttaggtctcgccgcagatgataaatcatcgtcttctccggcggaggcattttcgcgatggtctttcaccgtttcgaggcggttccaacattttctcgataagtcaacgccgcacttgctttacaggtggttggggtgcttaggtgtggcgttgatctacgctctacgcgtttatctggtcgaaggattctacatcgtatcgtacggactcgggatctacattctcaaccttctcattggatttctctctcctcaggttgatcctgagatgcacgattcctccgatgggccttctcttcctaccaggggatctgatgagttccgtcctttcgtccgtcgactcccggagttcaagttctggtaattgtaaatctttcatttgttctagttctttatcttttctttaattttgctacattttttgttctttcaattttactgcttatataagattaggatcctttagggctatgatttaggtttctttgaaatatacatgagcattattaccttatcgaacatagtattttacattgctgaaaatctgaatagtatcaatcattttttatatcaattattgtgtcttggaattatcaaatggtatttaaaattgtttttaagttccaatttttatttctttgtggaaattaattttcagtatatttgtaggtttctgcattttctgttctgatttcaagaccagtctgagctcattcattcgtaaagtcatattagtttacatggctgaaaatctgaatagtttctatcatttcatatcaagtaaaagaatttattatcatggtcgataccttatggattcgttgatgagtaattagtgtggtgaaattaatctggtattaaagatttgtttttatgttccaatatttctttgtcaaaattcatattcatgtttatttataggtttctacattttctgttatgatttcaagaccagtctgttttcttagctgattcatactcatgtagtcaaattaatttcattttgtaatttggatgattataataaccgaagttttgtttctgtttaggtactctattacaaaggcgttttgcattgcttttgtgatgacattcttcagtgcctttgatgtacctgtattctggcccatacttcttttctactggattgtgttatttattatgactatgagaagacagatttctcacatgatcaaatacaaatacgttccgttctctattgggaaacaggtatggagggtgctttatactttgatgcttataaatggtgtgtcattactattaaagactgatttttttcctttgcccttttttcgtttagcgatacgatggaagaaaaagaagatcatcttcaactgatgggacatcagactgagcaattttcaggtagattgcatcaaaaaatttaatattttttcttaaaagtcacaaatccaggtgcttgcaattaggaagattacgatgtttagtgctttgattaggcacaatggttgtttatttaccctggaaaatggagctttgacaggatgatgaagtggttggctcaagtacttttcttctcttacttttggtattatgggaaagtccatttgtataggagggaaaatgcccactgttttttccttaatagttaaatccagtagtagtgacattacatatcatatctacttttttataagtctttgcagtgtgaaaataccaatcatattgcgtatttttttaatcaccttagtagttgtattgtactcttaattccttttcaaactgaatctgagcttagtgctatgtttcttatgcatatttctgttctctcattctatattttatcttttgatgaaccctgttttttagagtcattatctccactttctctgatttgctctgaaaattggcatcttttgattggaacttgtattttgaccttttaggttatgtttggttggggggtaagaacaagaagtgggaatgaaatttaatcat

SEQ ID NO: 47982 - DNA, 1206 bp, Cannabis sativa
caagataacaggatattgaaattcaccttcacaatattttgacaaaatgttcaacaaaattactcctttttccatctggaaggacaaggcaaaaaaattaacttgaattaataatcgccatagtagtgatagtgagacaaatgaacaaatgacaattgtcacatttttagtcatgtaactaacaattatctatatattatagtttcatacatagaagcaaacaatattcaagattcaagcatatatgacaagccagccatatgaggaaagacagaaacaccaggtcttataaccatggcaaaaataattcatatgattacagtgcaaacttacattagcctccgccatgttttcatacttttgaagttctttaccaacaacagacatttccgagttcagctcagatttcaaacttgggagagccattctgatatgttgttccaaaatctagtgcatgagcaaccatcacaacaattaaaaaaagagggcagcagcaagttaataacaactgaaatcagactcaaaaccagctaatacttgaaattgaattcatccatatatataagaatcgagcagtagtaatgatgcgaaaaaatggagttaactaacctgatttagcttccttgacagctggggaatgccacaagaactaggcagaccactatatacctttaacaaaggtatgaaaaggcaaatgaaaattgaacaaaaattaggaaccaaagcaaatttaagccattcttcaagtcaaaatggtaattaagggagtgcactgtacaggatgatcgcgaaagaatgtctcttcacgagaaagagcatcagcaatgctacggtttttattaatgtcctgcaatttgaaacagggaaagagcaaggcatcagcttaattaaataatgctgacaacaacaaatgaaatcaaaactcttcaaatgcacttggccataacaagagagtgaaacctcattttcaaacctgtatctcacaactactagtatataatatatatagaagatgtcggacaacttgtggtgaccaaggtttttgttatgcaaatctgagttgggaggagtaaagttggagggagtttagattaagagctcgtttggtaggccgtattgtattagataataaataacactatgtttggataaaataatgtattatattaattatcacgacagaaatttttaatacaatgtaagttg

SEQ ID NO: 47983 - DNA, 2466 bp, Cannabis sativa
ttcgctttcaggatctactcaaaaaaaccatattagactacgccaatcaaaccatgtgcttcactttttcaatacatattcttactgtagaaacaatcaaagaagacacaaatgtatttctaaaaactgaattatgtattaataatgagatctgaaataaggagcgtctgcccactaaagtgctctgtggcagttttagtttttatactgattttttaatcagtttcttctcttgttcttacaataaccacctcggtttcttcgaccatttctaatcaatgatgcagtacctcatccttttccttcattctcccatcattttcttccaattagtgaagttttgatttctttgtctaaatcatttacaagttgctttcagtttgcaacaatagaaacattgtctccttacctatctacacaaatcattgtatgatttgcattctccaaatcaaaatatgaaactagattccttgttagccaaatagaggaatgacttccagtctcttatccttttaattattactttgtatgataggaaaattttaactgttgccacttgttcattatgctgcaatgcttggtgttatctgcgtttctgacaagggagagacgtggatttcatgtcagcatctaaagcccaccagtaggcctaaagaagataatttgggtcaagcccaagttagacaagaccttccaggaaggtacttaagctccatgactagataagcttctgccaatgacagcccgcatccggaaacaactccagtaccgcgagctcagagggccaaattgtgtgttcctggaagacaagtctgattttactttctatttaagcgcaccaaataagaaattagctctcctcaaatctcgaataaaagatcatatcaagttaaaaagggaaactacataaaatggagatcaaacaattaattcataattaattacccaaaattataaaatacagcattgacaactcaatcgtatccaaccctcccagtcaatacatctatcctcttatgggctgggtcgcacgaggacaacccaaccttatgtattttcatgtaaactccctattagaggaagaaaggagaaactaagtataattctcataatactatcaatacccaacaaatccttcagattaagggttgattctcttggaatatttgttcaggaaaaaatagaaaactgatactcattgtattcccaaaagattttttagctaaaagtacataataatattgactcgtaaactaaggcttgttaatgtcccaactacgtaaaaactttgtgtgttgctcttatttctttttttgaatcatttatttattcaatttaaatttattataattagtttttcaaaatttgagtaaatatttttgtactttcattgagagctgaaggaagtagtgataccatttgaagattacgtttagtaatcatgatactcaccccgaactaaatctagcaaagacacaaatctggacgctcctgtattcgaagatgatgaatcaagagagaatagttctgatgatgttgaagatgatcctcaagacacatcgaaagatgatcctcaagacacaccgaaggatgatcaccaagacaaatctactaatggtggtgttggagaaaaagataatctcgacgagtcagatcccatggtgatcattatggccaaaaagtttcaattaattgaaaaataagttatctcgacatgactaatttaacgtcataatgcttgagaaaatgacaagaatggaagttgtgatgacatccctgactaaaggaaaccaaaagcgcaaatgtctccaacaaatccaactaaacagctcctatttctactcaattcaaactcaaacaagcataaaaacaatcctagaaacttaccctaaccataatttaacgtcacaacccctacaaacctaaaaccctaaccgaaaccttgtctagaccttaaagaaaacaagaacaacatgataaaaagcttacctcaagaattggataccactaggattggttttctagctaaaattggtgctaaactatgctggaaaaattgaatccctcttagtttcctaggccgaatgagaggtgagagagagcttagagattttccttctaacttcttcttgtattttaatcctttagtaaaaattaaattccctttttcttttattttttttaaatagcagccagctcataattaaaaaaaaaaaaacacttttccaagcaaaatgaccaatatacccttctccccaaaaactaaactaaacacaccctaggggcaatttggtaattttagctaatccaccaaaaccgacgttctaaaattctaaactaatccggaatattcctaaaataatccatccctaaatgtcgtgacatttctgaccactctgtccagtttccacggtcgtcaggcccaaaaatattttatttcagaaattgtatccacgatacccacat

SEQ ID NO: 47984 - DNA, 680 bp, Cannabis sativa
  modified_base (626)..(629): a, c, t, g, unknown or other
cagtaaccaacttggtaactggtgcaaaggtatctgtataatcaattccatcctgttggttgtagctttttacaaccaacctggccttatacctttcaatgcttccatatgtgatcttgtaataacatgttggtcatcaggtaagctcacaacaatccaggtgtgatttgcttcaaaaatttctatctcagtgcccatagcttgatcccactcaagaatcccttgagcttgactgaaaaaattaggttcaaaatggctcgaaatggccagcacagtagccttgaaagtaggatacaacctgtgataagtaatgatctcagataaaggatgaaaagtaattgagggaaaatcctaagaagaaacaatagtaggattagtagttaaataacaatgtgatagtcattgatgagatatgatggtttagtaatgtatctggttgatcgaccacagggaggagaagaaacaagaagaagttcaggaatagatgaagaagtttctggagaataatgactagcaggattaggaagattggagaaaaaatttcataagagggagctaaacctccaaaatgcacgaaagtgaagtcaagtgatcatctttgtcaatactcctcagatacaatcgannnntcttactccattccaaataattcgaaccaatcaatttatggtccgtgattt

SEQ ID NO: 47985 - DNA, 1069 bp, Cannabis sativa
tttagttattggaatcttatatatattgaaggaatatacatatgggtatgtctttaaattaaattaaattatctcttaaacactttttcagttttttgaattaataaaatgatattaatgaatcaaaacctaaaatgataatgatttaaaaagtaaaaacaataatgatttgtgcagtttatgcacatgatttaaatattattatagaatgtgtggatggatttgcaatgcaaatatatcacgtctgttttttttttttttttaaatataatatatacttagaactcatcacaataatttaattatatatatatatatattagaaaaaaaaaattgtttaaaacaattaatggagattgacaagacagaataatggaaaaaaatattagtgggttatatttaatttttaatttaatttaaagtgtatttgttaatctattcatgccttatcttgctaattattttgatcatataactaatttttatataatttaaaaatatagaaaataaatgtatatccaaaatgaataaacatgcactaattagggaaaataattatagagaaataaataaactactttggcgcttgtgataattattaccaattatgaattttgtattttttttctccaaaaaaaagaattttgtatttattactaagagcattgctattgggcactagtggtgcctagcaccttctagatgtgtcgacttgcaattggttagcgatactccataaaaattattatattaaactatatgggacccaatacttaattacactaatagtgatattgacacgtagaagggtgctaggcaccagtggtaccctttagcatttctctattactaatgctcaaatgaaaattgatttgattgatcaaaactgaaaggtaactaatcatcatgaccaccaaaatttccttttcatctttcttgggaaccaaacaacactatccatttgttcatgatttacttgacaaattttgatgtttgatttaaaaaaaatctctagaaatttctttctttaataagataaatattgtggcaaataataagtttttttttt

SEQ ID NO: 47986 - DNA, 1815 bp, Cannabis sativa
aaaaaaaaaaaaaactcatttggaagtttctgcctgggagtccctcatcaaaacaatcggatccaacctggaatcttccatttcaaaacctcacaacttgagccttcccaaaacaactcctaacaaaacataccaatgtctgaaacctactcggccagaacataacaatcataacccctgcttagaaccactatctggaacataccaactagatacctctgtacaagccttactcacattcatttgagatcccctaatccagatactaccagctaggttgcacctatatgggcaacctacacaccggaagcatccatccatgttgaactactcagaacttaaccaccaaaacaccgttcagaactaccctaccagaccttacgaccctaatcccctctaatgagtataactcattcgaaaccattctaggaaaaacagagtttgaaaatacccaacttttagaccctcaaaactagctcacaccttaaccaaagggtataaactcaccaaaataacaatataggataatctaaacataacctacactacaaaagcacctaaaaccatctgaaactaattttaccaattttgagtgagctttgagttcaaaaactcaaattcttccaacacaaactacaaaagctaaaaccttacaaaccaacacaaaattcaaccttaattcatactaacaacaattctaaactcaaacaaactctacaaaacctaacccataaatccaaacttaaaacaaaagcttcactttaaaaaaattaaagagactaaggagatagggttccttaatactccttccaatttagcactaattctagttagaatttcttggttaaattagtagagattcgttgtagaaactctggtttttgggttggttttcttcttaattttagatacaccaagagaatgaagaaagatagactctttcatttggtcttaccttaatgttgatatctatccttaaaattagtctagccgctatacacttgtcaatcaactcacaatgtaaccttccaagatatttcataaagataaatcactagagacaagcctaggtggaagaagacgaatatacctccttactcgcttccaagaaaattttacactaagggtaaaacgatcataactaaataccccaaactactctaataaaactaacaccaataaaactacccaattcaaccattacttatactaatattgatgtgactttctacccaatgcattgggtttccatggttgccatatctaaaaatattttaaattcacaaactgcatgtatttaattcatatattccaaaaatatcgccgtaattaataaattatgcttatttcccacatttctattaataatcttaattcatataattatcatagtaagattataatcttactcatttattcctataatacacacatgactctatattttgtaatatatacttatttatttatgttaacccaaaaaattagcgctcttaatttttgggattattcacccaagggtgaagagacacgcgagagcgcaccgagctagcctactcacctaatgcatatttcacaaaggaagtattcctgactcaggatacattcgtgctatcccaaaggttaccatgtgactccgataaagatacatgtgcgcatacatggaagacctgcgtacaagtccatgtggaggccctagggcaagttgaacttgaggcatgcgtgggaagtgcaggagtgtgagggcttgcatgtgagcccatgggaggctcgcacgtgagttgtgtgtgtatgtggggaggtgtgtcgagtggt

SEQ ID NO: 47987 - DNA, 1505 bp, Cannabis sativa
  modified_base (568)..(591): a, c, t, g, unknown or other
  modified_base (639)..(639): a, c, t, g, unknown or other
aaatattaattttgtagctcatttttcaacagaatatgtttaattgctacaactaagctagagaaatactaaaaaacgagatcttagcaattgttttctgttcatgccaaaactggagcattatataagtaatagcctgagaaaaccacacacacatacattgtaaggcttaaacatcacagtgactgacttgcaaatttgagtcatgagaaacccaaatcatacctctatgcatggtcttgtcaacattcaagatcaatgacatatagctattaattactactacaaattagctatgttgattgctattaaataaccaaaatcaaatatttatagggataattacataaagtataatttttttttgtaaaaaaaattacatttttaagtttaaaaatatatatttcttttgttatatttttacgttttcaataaaaataatacgaaaataacaagaaaattacataaaagtaatataaaaataacatttaaataacagcaaaacaacaacaaaaaataacatacatataacaaaaaattaacaagagtacaacataaaaagaccgtnnnnnnnnnnnnnnnnnnnnnnnnaatcgtaaaaatatttaaaatttcctgaaaccgtatttttgtaatttnttttgttgtttttgtgtatttgtgaaataattccatatttatatgacaaaatgatgtttaccggcccagtcttaggacaaggcgggctaatcctgtgtttgggtgccaaaattaaggcccaaaaaattaatatagggggataagttgatgaatatctcttttctgtatccatcaattgaaaatactctcatattatattttattaaaatttacctatttttatgaatgagttgcttaatatatccttgtcctccccttaagtactataacacatgatttatattatcctaaagggtataatgagcacatcatctataaaagtaaatataacttaaagaatataaaaataaaaataaaaattaaaacaaataaaataaagtggatatacaatgtaatttttttcccaacatatatatataataggccggcccaataataccaacctattggtacatcaaataaaacaaaaataatattattaaacatatatatgtattatattatgctggatattttagtttgggagaagttaaagtatatttttttttatatatatatatataaataaatttaatttaaatatacatttttttttatgaatattgtaattgtcacacacttacataatagattttaaaagagaagttaaaaatcaaagacatcaaattaaaaaaagtatgtagtgtattttttttttttttttttaattttgagttggttgttttattgggttatacattatttttattaatccttgcttatgactcgtgctgccatttaactattgttgttataattattcatgaaattatatagataaataacatgtcatgttatttagttagttaatttaataataataataa

SEQ ID NO: 47988 - DNA, 738 bp, Cannabis sativa
tctcatctattttatattattttatattatttcataacaaaatgtagtatctttgaaaattagtaaaaatatatacatatttgtttaaatgggggaattttttcgggctcttaaattaagtaagccctaaatacaagcctaatttgcttatgcctaaggccagacatgcttccacacataaatgttctattatttcagcttcaaaaagaagagaagagataaaaacaaggcttaaggatagttattaaatttataaatgacacaaattaataatttttttaacaaaaaaaataattacccaaagatatatattaaaattatagtttggttagtcctctaactcaaagatatattttagtagctgactaggatgacgcgtaaaaatttaggtggcgtttggttgggaggaataaaaatatgggaataggaataggaatagaatggaataaaatttaaattgcataaaagaaattaataaaaaaaatcattaaattttttctcatgttacattgtaataattttttcttctatttcaaaatggaatagtaattccaccaaaatggtggaaagaacattccattggaatgacatttcaatactttaaaatgcaatcaaacaaaggaatggaatgaaaattgtttcattttcattccattacaatttcattacttccaaccaaacgccaataggtattttatagaattatattggatatcactacaagaaaaaacagttacg

SEQ ID NO: 47989 - DNA, 1458 bp, Cannabis sativa
agttcctttaatggactctgatttaatattgaagtgaggcaaaaatataataattggttagatcatgttttttactcatgagatgccgaaacatagttctaatgtatgccataacaaaagtaaatgaaaacatgtagccagaaagaagttaatagctttcctttttgaaaaaaaaaaaataaaaataggagaaaagtgtggcattgtatttcactgatggaatgaaaccatatttttatcagttttgtttaataaaccaaaattaaaccacaaccaattattatattttgcctcacttcaatttgaaatttttacattttcagaccatcacagaggattgacaaggccacattaatgctaaaactaaggatttcattagaaatcgtatctcccgtaccatggaatctttggcagcacgtccaatgtggtgccatttgacccttttttacttcaaggaaattataagcttgaaagtctattattatcttttcccttgggaaaaagaagaagataaaggaaacatagataggttttacaattgttgctaaagcctcaaaacaaacaagaataaatcatgtgtaacacatacaattgcctgaaaagtttggaattttacacagcataatacctgggaagttaaaaagtaagttttgcatggaacttaaatttgattccttgatgatctcatgtggctttgagccaaagtctctgaacaacttaggtggctcagattttccattgtgctgctcatgtaactcctcaacagctgcataagagcaatgtagagaaaaacaccagataatcagacgtgcagtatgtttctacatacttgtacaatagacagtatgccaaaatgcaaaatatattcaggcccaacaataagttattcacacaaatcaaaaagctaagcaattgaacaacgctgaaactaatattgccacacacgcaaagtatgtttacctttactaagaacttcaagattaaggtccttctcgtgataaaaaattggattcttaaaatgtttaaataatatgtagcatacaccattccccacctgcagacacaagaaattaaaaaacaacaaacttatagtgccagctagtaagctatctgtcaacattttccaaatacaaaattcaacataaacaaaagaactcacttcaggaaagttcttgttagataacaaaatgggaaagaaaatgttttctttcactattagttggactaaattacttctgccggctgcagaacaaattaaactgccagactgaaaaccgataatgtggagctgaggaaatctgcaacaatatagccacactacataacatcagagagaaagagatgaatagattaatagataaagagaaagagcagactacatattgactattttagctaaaatctcttcaggggaatttgaaaagtaaatatcatttctttacctttgctgaagtaact

SEQ ID NO: 47990 - DNA, 2324 bp, Cannabis sativa
  modified_base (1484)..(1491): a, c, t, g, unknown or other
gagaattgacctcatatgttcactacctaaggggaaagacagagttcaatatgcagtagtgggggtagattactttaccaagtgggacgaggttaatcccttagccactatcacatcaaagaaggttcttgattttgtggtcaagaatatcgtttgccgctttggactcccacagaagatagtgacaaacaatggaacacagtttgacagcgacctctttattgaattctacatcaggcatggaatcattaagagttttttagcagtcatttatccacaagaaaatggacaagggaaaatgatcaaccgaactattaaggatatgtcaaaaaatgcatggagtaagccaaggggaattggcctgaagaactgcccgaagtactatgggcttattgccccaaaaaaaaagcaaccaaccacactccctttgctctgacctatgggtacaaagctaagatactcgtagagcttacaccaacatcacatcaaagactaacataagaccaacaaaccaaccattaattgttggccgaatctttggatgggattgaagagactagagaaaggtatgagctaagaaaggcaacatatcagcataaggtcacaaaacactacaactccaacgttaaagataggaaatttaagcttggagatatggtgtaacaacgagtattcttaagcataaaagacacatcaacatgagtacttaggcataattgggaaggaaaatatgtcatcattgaagcattagaacccgagacataaaagttggcaagctatgaatacaacttgaatctaataccagtaccaaggtactggaacaagggtgcctctacgacggtactaccaataaaagtaactatcttcaaaatagctcgcttcacagtgagattccctttaccttaatcgattacctcttaaactaaggagatacaatgaagttgtctctatgttaagaggtccatctctaaggtatgagtcctatgctataaattgaacagggcattagtatggtgaggatcacttcagctaagcttgaatgaaaaatggcatctgtaattactactttaattgttcttttttctttcaacttagctcaaagtaatgtaattatatttaatttgatgagttaaaacactgaacaaagttttttttgtacttcattaatactaatcaattatagctcacagacctgatgatgctctcaagtgctgagtaaagcttgtgagttggtcttgagataactccggttgtttctttagtgaggtcaaccctaccaccccacgaatccttggataagtggagagtgcttacacgtgtaacatgacccaagagcaatgatcaagaaggcccagggggatttggtatgacaagtgaccaatgaaggcacttctttgatcacttgggaggcacataggttttgttatggtatacgggagccatatgttacatgagcattttttttttgcacatctatgtaagtnnnnnnnnggtaaagataactttaagaagcagtgacattactgccaatgatcgattttcttaagacatggtgtactatgcaagtgttaaacagtcaaaaggtaacaaataaagtaaaataaaaaagcaaaaatcagaataaaacttttattacattagattactttctaatttaattcaaacaattttgataacattttactaaggcttatccacatcaaaatgccgcctaggatgaccaactaacacactaaagctaaaagctaaagacaaaagaagaatggactcacataatatcctggaattttattatgtcaatagtagcttctctcttatcctcactctctacaattggctcatcaacaacaatagaaggaaacttgggatgctcgaggttccagctttcaactcctgtcgcttcttcgaccactggctaaccaccattcaagttaaaatctattctctagagagcatcttcactaaaatgttgctcacatcactttataaacttcgggacttttgtattaggtaggggtgcacatttagacccgtaaactcgactacccgccccgacccgctgccaaaaaaaccgttcacctaataacccgtttggtcgggtcgggttcaacccgaaaagatgccaaacgggtttcgggttcaggtttgattatttatttttttcctggtcgggttataacccgtaacccgaaattataaactttttttaattaaaaaattaatacttaattaatatacttgattactaatttaataattaatattatttcaaaaagaagcctactggactattggtaataccgagtccctcacacaaagtctca

SEQ ID NO: 47991 - DNA, 1727 bp, Cannabis sativa
tctttattgatattgaataaaatagattacattgaaatagagttttattcagggcataaaacctaacagttataacttaggcattttgccaaaactaggggtaaaatggtccaattccataaccccgctcaaccacgatatttatattttctctaaaatgttttccactaagaaataaggttctaaacttaatttctaaaatgggccccacaataattaatttcataaataatcataaaaataacaaaaattagtgttaattgcctatactaatcccaattattaaagcggtcattacaataaagaaataaaattaattttgcagcatttaatttaaataaaaaaaaccaaaaaatctagtttcaagtccaacttagctggactagaacggggtttatagcgtgagatcgcctttcaagtctaacattgttggactagaaatatttttctagtctaataattaagtttcatgttatgggactgttggactagaaagatatttctagtccaataatgttcgacttgaaaaacaccctttttatgtcccaggctattatgtccaacacaaaagggactcgaaaaatatatctagtccaatgttgatggttttaaaagggagtttttctagtagtgaataataataataataataataataataaacaacaagtctttaaattgtacgtgttatagagatcattaaattttttataaaatgaaatatatagatcagtatagttataaatactgaagcaagtaagaaatatttgtactcttctgatcggtaccatatttttaagcaaacattattaaaacatatgtattatttttttttttttttgagtgtagcgtaatggtattttacaattaattaatagcttaatagcttcaaggtcctagattcgaacccatgacctctcctttttgcccatccctccctaaccactaagctagccttagtggctttaaaacatatgtattcacttctagtcaaatatgtgcgccattaaattcaatattttttttaacaaatttttgagtaactactggtagtagaataacggcaaacaccgataaccatataaagtgtttcatgtattggtggaatgactatatatgttttacaaaataatagtgagaaaagatacatctttgaatttttaaaaactaattaaatagagaaattgcatatctcaactttttataaaatcaactttaatttagaaaaaatgtaaaataattaattgtatgttcaacaactcagttgaagagtatacactctcattattcaaccaatcaaaaaataaaaaaaaaaaaaatagcttatgggtaacccagggtgcacctaaaaaaactcctctatattgatatacataccaaagagtagtgcaataaagagtattcaatatgaaaattaaatcaattatgcacattgtcatcatttatatggtaacattcatgatgtgtatcattttcagtttatgtataatagttttatgaaatgtcttgataaccataaataatgattattaagctcgtattttttcaaatagatatacatatttacaccatgaataattatacatggtacatagttttaacctattaatatattaaaataataattaacacagtacgtacctcttctttacaccgattgctttttaatttattgccttataaaattacaacctaacctaattacttgaaaattaaaaaaaaaaaaa

SEQ ID NO: 47992 - DNA, 1175 bp, Cannabis sativa
ttaactttatatgtgtttatttatggttttagaaagttcatatttagggtgttaaacaatatacttgtgagtagatctaagttcctggtaaaataaattccaacactaaccccaagggaatctttacacatttttttctatgagcttttctgtgagttgatagaggggacatgtctccaaatttctcaggatcgtgttagaggtgtgacacatagacaccttccggaatggtaggcattgttatctgtcttagggttgttcatatattctgcaatctgtggttcgaaactccaaccaatttggaccaaaccattagaaatcgctccaaatgaatctagtgtcaatgggttggtcaattcggaccgtaataattatttggttcgatcatggttttgaacttcaagcctgtggttcaaaccaagccaaaatgtatgatttttttgtatatacttaatgtttacatgaaaagtagccctaatgatgtggacataaatatttaacacatagcaagaagaaaaatactcccgaagttgagtagtcccgagtcatagcagtcgacttgggaggggttgaactatagagttattttttatgcttttaaactgaaaatattgtgaggagagtagtaaaaatttgtttggttgcttaattttaagtagttttagtttaatttctagttaggaagctaacatttgagtcttgtaaaaattattgtgttaagtgtgtttttttttaattaaatgttgcttatttggtgtgggaaaggagaattaacttgctaggaaaaaggaagtgatgcaaaggaagaagtggaactaaagctgaaaacgtgacagaaatgctgaaggaatgctatagcattctggcagtttgggtaatgacgtggaaaaagtataaaaaaagactttcacttatacacatcagcaaatttgtccaagtcacttaaaatgcaccagctggctgctgtgggaggaaagagactaaatctagtgggccaaagtggaaaaagattgggcttctattttagggtgtgaatattgtaccctaaaaacccaacaactaaaaggggagaaaagcaagtacaccatcatcataaagaagggagctgccattttttgaaggagagtaattgcagaaagtacaaagagaagaaaagagaagggggacccaagtgc

SEQ ID NO: 47993 - DNA, 836 bp, Cannabis sativa
aaaaaaaaaagaatatccatctaggtgcaaaaaacaaaaagataattctttatgtctgtaaatgatgacttctaagaaccataaattagttgaaatttgccacatagaaaatccaaaattacttctttcccctactaagcctttgcatatggtaattaatgcttccccatggctttctgttgttgttctgcaagaaaaataaaactctcaagctttaaagctggtactaaaatgaaattttgctatgttgcaaaataaatttaagcataaaaaattcacacacatgcagaatccaaatacaagaaaccaacctgagcatccatacaagtatttagaagttccttatttcggacacacttctcatcactgttgtggttaagtgccaagcagttgagaaatgtcatcatctccttcatgcagggtttgtgaagagagccgaatttcttgggattaattcgaagagtaccaactttccgacccattgtgatcttctaaactacatgtccaagcaggcattgttaaattcaacatcaaagagatactcttttagaataatgacaatacttggtaattactccaaaatcatcttaaaatacaagatttccaatcagacataaaaggtaagaaacttgaccattagtctatttcatgataaatggttggcaaagtataacttaatttaggattgttcactggatcacatccaatgtttttagactcattcaggtccaattcaattatacattagatgttggatttctccaaccgatccaatccaatattgtaggctcaaccgaaccgatccaataaatcattggattggatcggttccatcc

SEQ ID NO: 47994 - DNA, 1256 bp, Cannabis sativa
atcgaactcagatattattatgtattattttaaaaaataaaataaaaactaattggtacgtaactttttttaatgtagaatctaaataatatttacttaaaatataatacttaaataataatagaacagtgcgtaataatttttttaaattttgaaaattaacaaagctacgttgcctatctgagcaacattaaagacatcgaacattatttaattatctccactctaaatatgatattatctttttgttgcatctccttagataatacttgaatttttagatttcaacactcaaagatccctttaagtaagttagatgaatctcttcaccagctaaattcgaaatcccttcgaattagattaaacctccgacagctctagtagcaagcttcaccttctttatttgacaatccaaaaattcattcacatgactaatttttaactccaagaattgaatgtagtactagcaaaataatgtggattattagatttaattaagacctctatatatcaactttaaatagtatttagttgaaggtaataaaacaaaatggaaaagaaatgaatcaatttttattgtattcttttatatagttgtattttaaaatattggatttcttttttaccattttagtagaatttgaaatgaaagaaaaattccaacaaaaaatggtaattttttttaataattccttttatgcattttaactttcaatttttaacttatttatattctcatttccattgatattcctacatctttttgttcctccaaccaaactcaacttaaaagatgataaaaatatacaattattaggtgaaaaatgtttatggaactctgaaaaatataaaaggcataaggaaacttgatatgagaaaaataaaatgaaagaatgaaaatcttatcctatagataggacaaccatggaggattattttttttatgcaggaaaagtatggaatgtgggttcaaggaacatattacatatggcttgtagttgtagtagtgagtactaaattgacttgatactcaaaaaagagtgttggtttcatccgcatacaatgtatatatgtgtactactagactagagattagagtaatagagtagttagatgagtactctactcagtagagtatgtttcaattcaagtaattaataataataattgtcatctccagcttgcaaaaatatcttgtacgatctgtacatttttattcttaaagataagagttgtaactaaagttaattaaacta

SEQ ID NO: 47995 - DNA, 3744 bp, Cannabis sativa
atgccatatttagttttagtggcatttacttttggcatttactttttcatttactttttatacctactttttataccatatttatcataactttaataatttttcccatatattttaaaatagcccttttaacatagtggctgttaatttatattttcgttaataataataaagtattgtaagtaaaaaattaactatttataatctaataaatatatatgttttttttatctcctgaaatgctttcttaaattcctttgtctacttgaatcttttaatgtctcgcaatacattaaaaaataacagatatttatttattgatttcaagatgaatttatttaaagctgtcatttttctagttaaggaaggaacttctttcacttcttaggtgagggcatatcaagtaaagattttattttttctagattggcttcgattcctctcgcgtttattatgaaaccaagaaacttctcagaagaaaccccaaaagagcatttttttcgaatttaacttcattttgtactttcttaagattgaaaaacattatgcgaggtcaatcacttgatcaacgatcttgaccgacttgactagcttatcgtccacatacacctccatgtttcgatctatctggtgctcaaatatgtcgtttacgggatgctaatacgtggttgctgtattttttaaaccaaagggcataatcttgtaacaatatagtcccgtatttgtgataaagcttgtatgctcctgatcagcgacgctcatcttaatctggttatatccaaaataagcatccataaaagacatgagctcatgcccaacagtggcatcaacgagctgatcaattctcggaaatgggaagcaatccttcaaacatgctttgttaaggtcgaagaagtcaatgcaagttctctaggtcccgtttggctttggcaccaacactgggtttgaaacctattgtggataaaatgcttcttgtatgaagtcattggttaacaacttgtcaacctcttcttttagtgcgttctatctctctgaattgagaagccatcttttttgttgcttcagagaatggtgagggtcgatattaaggtgatggcttatgatatttgggtcaatcctaaccatgtctgaatgattccaaggaaattgatcctagtttgccattaaaaagtgtattaattgctacttcaactcttcccataaccctttaccaatttttatagtttcggtagggccatttgggttgagtaacacctcttccaactcctctattggcacgagttgggttttctcttcaacaattcttgagtctaaatcttcctcctttccaatttctttagttactacaaccatcatttgacaagcattggttctttccctcaactcaatgttgtatcattctcttgctaacaactggtcaccttttaccgttcctaccccgttcttagttaggaattttagtgacaatgttttattgatttcccccagtctagtccgtgctgggcaacccataatcatgttatagacagaggggagatcaactaccaagaattcttccatttgagttactattaaaggcaagtctcccattgtgaggggagttcaattgctcccaaacttgcaatgctatctcttgtgataccacatagattatccatgcatggttttagagttattccttccaatcccattttatttagggtttctttatacaaaatattcactgaacttccattatcagccaaaactcgctttactctcttatttgcgagctgaatggttatcacgagtggatctgtatgaggaaatcttacatgtatcgcatcgccatcaatgaaagttatcgaggcctcactcttagctcattttgacatttcaggtgcaaaaactaaagactggtttctaattacttggtttatctacctcttccagtgttactagtttcactagagaactcaggttctattatgccctaaggttttagtttcttgcttcgaacaacgaggctaaatataagacacttcttgcaggtctaagaatggcagaggtagtaaatgtcaaggcaatacgttggcttggtgatttgcaattgattgtaactcaagttcttcgagaatatcaggcgaaaggaataaaaatggccaagtatttagaaaaagtttgaaaaaacttgcagaaattcaattattttaaaattgaacgaattccaagagaacagaaatctaacgcagattctttggctaaactggcaacgcagtctaaataaaacgacctcaacttagttcccataaaaaaattagaagaaccaagttattgacttgagatctagccaactgacaacgaagccttattaattgctgattatcaccacgtgtaaataggaataataaatagtaaaaataacacacaaatttatagaggttcgtctctcttgatgaacggataatgacctactctccttttagttgtatttactcttgaggtaataccatgcatatcacaggttaaaactttatgatttcttgctatggctctcttcagtattacaattgtgagaataatgtgttatagataaagaactggtgagatcttacaaagaatttatgcagaaacttgacttaatgtctaggaggcataagtggcgtgtgaggtttgagagagagagaggctatatgtatgtggaagggagtctggaccccttttcacgtgtagttaattccctttatatattgtagggcttacaaaatattctaattcaaatagataaagatattccttcaaaatagagacattaacattttttatcttttacttgaaatataaaaaaggataactaaatccctagaatatagactaatgtcttgagggaatattcctatcttcatgggctgctagacctctcccgtagtagtaggtcaacttgagaatcttttagaaggcttgtgatgagaacacaaaggccaaagaatcaagtcaagttctaattggcccggtgatgagggcgtgagccaagagattcaaagaagaactcaaaaacttagtcaacagagttttaaaataagaagagactgcagtcaacactgaaggagaacaaagatttgtgcttttcatgaaagtagactcaatttagacccaaattgagctgatcacgcttttcaaggcatttgccaactttcctttttaattttatttcctttattctttctttgttttatttggaaaattgtctttcttttagttttcttttttcttggttgtaagttggctatataaaaccttgtaaacactttgaaaaatcagattatttttaaataattttgagaggttttcttcttgagttcttgaaagaactattcgaacttatcaaggagtattccttgtggcgttcaacctgacttattaaacgggttttcaccaccgtttgtggcatcttccttcataccaaggttcatgcttaactaagcattgggtcgcagttccacatccaaatttcgagaattcttagagtctgccatatttgttgtagggtttcattacaactgttggtgtggttcgtatcatttggtatcagagcttaggatcatcgggtttggcctatctatcttttatgttttttttctattccattcatgttctataatcttgtttaacttgtgttctatattcctgtcaatatgtgtttcatctcttttgttttttctttgtgaaatccgaaactgttagaaccacattctgataattttc

SEQ ID NO: 47996 - DNA, 2481 bp, Cannabis sativa
tgtgccaaactggcccttagtggtaaggcgagtcttccccgcatcacaatacccagagtgggggtacaggctcctaattgggaaggaccctacgagatcaaagatgaaatatgtgctagaagctatcatcttcaacgaatggatggatctagaatcccaagatcctggaacgttgatcatctctaaaagtaccatcaatagttaagagttcgatattcaatttcatctttagtattttcgtgaaaatttataagttagtcgaccaagataatatattttttgcaagaagtaatgagctcatgacattacttaaaatctgttaatacaacttgaggaaacacaacaagtgactcaagtcctactcccttcagtcacttggggtgtaggtaataagtagacaaacataacacaatgtacaaaatatacatcaatgaggcatggcccaacctacccacaaaaaaatacaactaaaccaagaaaaataaattctgagcttagcaagaaaaaaaatagtaataacaaatataccttgcgcaaagattacaagcttgaaagagataaaattaaaattaaggctgcatggccatattgtcttgaatagataaaagttgcctagctagattgtcttaaaaagtataagccttagggaaggttattaataaatgtctccacataattaaaaagtggctatgtaagccacgcaataaataaataataaataaataaaattattggttggaatttctgggttgtctattaccatggagaggctagaagtagtagtcgagatccccccatcttcgctgctatagttgcatccaacttcttgttcttttccaagaagcacttcatggtggctttagggtcaagcaggaagtgaagacagggctgaaagttgttcatttccagcacatgaaaaccccctccttatagcacttcttgcagtgctcatagatgaccggagaaggaagccggatggtattcttagctgatacttcattaaccattttgttagagtcctagagcaaacaaaacttcttcaattccttgagctgagacaaacgctacttaaggctctcattctccaattagaccttggataaatcagccttttttgaagacaaacatgttttgccaccaacaacagagtttgagccggtgtcatcaagtcttggccctctttcaaggccttctgatcctattccctcaacatcttctgggctaagatgtcatccttcaaagtctccacctcttcctttgccttcttcaatttggcttgcatccccgaaagcccctcaaaggtagcaactgtgtgaccttggtcaatcaagttcttggacagtcgaccaacctcgacggtagcctaatcagaatgcaaatagtatgacggtaagcctgagtgaatgtgaaatagagagcaagatgacaataaagataataatttattaactcgctaaagccaacaccaagcttaaatcttgggcctgatagattgtgttggaggatgcataagtcgcaaatctcttagtaggaacttgaaccaaatcagctgctaaattgctaacaatctcagagaaaaatagagcgagggaataatcaaagaagttgaagacccagcctgtcatagggtccaacttcaagtcacgcacctgtctagagtattccccctagagggccccatcttgatatccaactaccttttcaaggcctcacctttcacactccctttagtctactcatgtacatcaaaattatgtctggcgactcggagttgagcatgagccttatctgggtagattggagtcaaagggatggaaggcacccttaaaaaatgggtcacctcagaagggatcagaaaattggatgtttcctaggatggtatcttggaatacctggaccttttggataaagtcaagttatttaaaaaagcgctcctttttcttaccatttttacctccatatgggactatttcaccctcattgagtatgattatctctgggtcattttgacctacccttgctagacctcttggagtcaaagacttcaatagctgggataacttctcctcccttggcatcagcatcgaccatgtccagcagagcaaaagtctcatccatttaaggacctacaaaagtgtatggaacttagtgagtatcaaatgaaaaatcagcacaacattcacagtaggattagtcaagtttaatagaggacataagacagaatcagtcctacactggtgccctaattcctctttaacaaaataataaatcaaattactggagtcatcatcccctaggtagctatctgatggaaggaaacaactggaggtgatgtaagaagaatggtctagtggaatgggaacgagacgacctaaccccatctaagacctacttaaaaaatcttcgataaatgaaaagtacatgctcatttcctaatcacccacctggaatggggcatccttaacctataaagtcttctat

SEQ ID NO: 47997 - DNA, 2808 bp, Cannabis sativa
gccaatctaattatgtttctcttctctataggaagaaataggatgtgattcttcctatccctcatctgcagttgggggatggagcgcttgaaaaatggcacctggtggaagttgtagcgcccaatattttgaatgtcccaagtaacaaagtgtttcgggcatacccacctactttagacatctgtgtgctattggtatcacccaaccactagtggccaacctgggtaaagtagaggtatccagtcctattctgcttcagggaagactttagattgaaatagtatccaatctcataaggagtgggctgaggctagcctagctccttgtacaaaataagcatcaccaaaaggtacttgatactttttggggtgatttgtgttggacacagctcgaaataagcagcgatgtctctgaagtaagggtggagtagaaacactgccccttgctctatatgatgctcttaccatgccatccaacccagggcaagccagtgcaccctttgatctcttgtgggtatctcacaatgaacacccctcactagcccacttataagtgtcctgctaaaagtattaacagagaggacatatgcaggagagacccacctgtctcccaatgatctagcatccaattttgaggctcaaaagattgaatgaagacgtgatccaaacctaacaccgaaggctgatcaagcgtattcaaaggctccccattgtgaccttaactacccaaggggtggttggagaggacgataaaagttttgtatctccttctcctgacaggtgtagcatcctcaaccttagacttagtatcaagactcttagcccctggtcaacctctagatctacattaacatggggctgagtaacctcctctataattttaactttgccccttgttgccaccctggcaacatggggatcacatggcgatgctctacgacatgtttgtttcattctagccatggttgtcagtcctggatcacacaagataatgaagggacctatgcgactgtcaactccctaatccaacactcagaatcatctgcatagagttctagtcaattgtacttaagggcaccttccaggtaaatcataatgtacaaggttagttattgaccaagtactgtcttaagtatatttacttagacaaatagtgagtcctaagttgtggagtcgactataatggactcactaccaagtctcatactgagtttccaaggggaaccacacataagactacacttttacatgtctccaaggtcgtcatgagaccctagccgaggtcaacagaggacaaaaaattggctcccgcttggaaccttagccttggccagccagagttcccaagcctaaggggcaagccaggccccatgaccgagcctagggccggccaagaacctcacttccaggaataggcttgccagcttacggggtatgcccccttggctggccaaaccacatggtgagtacccttggccagccagaccccatggtgggcacccttggctagccaagtcttaaacatgacctccttggcccactaggatgtgtacgggatccaagcatgtgttcaagaactcaaacatgttcttcatgttcttcgtgactcaaagagccaagaatcacaacgatggaggaaatcagatcttttttgtttggaaatcacacattacgtatcctaagactatcatacgggtcaaaatactgaaatgacaacaatctaatgtgtgaatcaaaagacatttaaagagaagaagaataattttcatcatgcattcatgacaaaatcaactaaatcaagtgaatagtgggataaagcttaaccacaacaagaaacctttggtgaagaagatgggaaacttagatcgtcaaaacaacacaaaaatctcaagagaatgatgcaatgtgggctcagccctctaaagagaaggaggagcatcttcaaaacttactttctagtgcgagaccgaaaagtggaaaagtgaagagagtttccctcaaaaggacttaaatagtttctgtgggaccactctttcacttgccacacatactcaacaaaaagaaatgtaaaagcaatttggttactacaataaatgagatcagactgtcaagagcaagtatttcaaaagacaaaaaatgcaacatctattcagcaaaggctacaacagttctaacttagctagtaagtccctatccgtatagacgtctgcatagggacttagggggaaaatgttatcctaatttttgcccacctgatgtggcatgctcacgtggcaaagattagtgccatatggcagtacacctcaccaacaagaaggtcaagtcaacaccttaaccaataggggtcccaacactcaaacagtctgacaagtaatagactagccacatcaagggggctggccatccctgcccgccctatggccggacaacctatggacagcacaaggcaagaatctgtgcacagctttacacgtggacaaccagttagacagtaaattgggccttcataacccaataaagtacatgaaaagtatctacatttaaggggaattttagtcttttgtattaaattaatataatatgtaaatatctacttattttattggtaaattagggtttgagctctcatatataaagagccttaacttaaccaagaaaaacctaagctgctaagtctaagcctaagcctctaagtttgataacacactctctctctcattcacatgcccacataagcttctatcaacacttgagatttgtcatctttgattcctactttgtaactttaagggatctatatcagatccca

SEQ ID NO: 47998 - DNA, 1608 bp, Cannabis sativa
  modified_base (163)..(191): a, c, t, g, unknown or other
tctaggctcagatcttgataatactctgcgacaaaaaggaacaatggttaaaaatctaagcggaaggagtcattaaatttcgttgcaaccaatgtaattttttccaaactcttatgtgtttaattttattattttagtgatattcatatttaggatgttaatnnnnnnnnnnnnnnnnnnnnnnnnnnnnntggtaaaatattcccaacaattagcacccaggctaacatattgtcaacctacgccatttccaacaacagttctaacaaagtcttccagacatattctctgttttcatcagcaattaggatacaggtgcttttgggaaaaaaaaaaaggagccatctgatggccaaaacaaggacccagcccttaggttgaccgggtgctaggttccactgccaaagatgaaactttctcaacctgggccgattctaagcatttttactgagaaatctcctagaaatttctgtgtttccatcaataacaaagattaaagtgttctcgaaaaacaaatgaaaccatttgagggcaaaaatagggacccaacacccaggttgacactggtgctaacccctgtgctcaggttgacattcaacctggtttccatgtttctactactcaaacataattttttctctgaactttcttcttatcttagtccaaaatggggtaggagatgtcatttgtaatcttgaattccaaagaattatcaaaacaagtcccaggacgctcactaaggagcacccagtgcccaggttgacatgtaacctggtgcgttgggttttgcttatccaattacatttccatatcgaacatctccctatttttcttttgtagtaaactaaagctacgacttttcacaagtcaaattcacattttatatttcacctttccagcaatgtgtaatatctacaaaacagtcgtaaatcaggaacttttgagtctacccaatttcatgaaaaaagcaaaatctccaagaattggtgaacaatttcaccagagctaagacgttgactaagtgatgtcaaaaaaacatttaggcatcgaaatatataagtgtaacatgttttcccactcatacagcgtcaacctgggcgctggatttcaacttgggcaccagctgttaaacaaccttcactaaaatgaccataactcactcaatattgatctgattgatgcaattccaattgtgtttgaaatatcttttcaagctatttatagacatgtctcacatgcatatctcaactctgaagatataatgtcaaaatctccaagtcgtgtaatttttctttacaaaaagtttgaaaataatccaacaggcacgattcgagctccaaaaattgacaatcatcatcctgaatcattttagccatttgatcattatcaatggtcaagatcatgttaggatttataccctaaaaagcctataaagaaatttctaattattaaataaaaagttgaaaattttgatatatgcatgaatattaaattattgaataatttatatgaaatattaaattccttataaaatatcgacagagtggccttgctagtggtgccttcgtgagccaaatgttggcagagggccttctctcttctctccat

SEQ ID NO: 47999 - DNA, 2499 bp, Cannabis sativa
aatatcaaatatttatgttctttaaatatgttagctatttaacaaaaatacaggaccctatatgtaattgttttaaattagaggtccaaactgataataaataaagaggagagaaccaagtttgaacaacgtgtaaatatacccaacaaaacgacaaaaatatgttaaaacgacattgaattttccagcttggaaattgggaaactatatgtcgtttagagcgagagcattatttcttttcttttgctcacacagccagccagccgctggattctcctaatcaaaaaccctcctaaactctcaactcaacctccattagcagtatcagataaaaatggtgagcaaaagacagaaggaagctcgcaagaaattcaaggccgagaaccctggactgttccccaagccagagcctactccccctaaagacccagacaaggtgaagaagaagaagtttaagcgaaagaagaaggtagaatcgaaagcccccgccgatgggtccagacccatcaaaaaggggctcagaaaacacccactaagggtacctggtatgaagcccggtgagagctgtttcatctgtaaagggaaagaccatattgccaagctttgccctcaaaaagctcagtgggaaaagaacaaggtttgggcttttagtcagattatgtttttgaatttcatgggatgtcttgtttcctgtttctgaatcaagcgatttcttttctttttcgtattgaaatttttgttttgtttagtttttgatgttgtttctgtggtattttcagatatgcttgctctgccgaggccgggggcacagcctgaagaactgccctaacaagaacgatgagaccctggatataaaaatgtgttataattgtggagaaagtgggcattcacttgataaatgcccccaacctcttcaagatggtaatttatcacatatttttcgtcatagggaaactatataaatttgaattgtttcttgcaactatatactctttatttgtttagtgtcatgtcttattgcaccaagtttgtttagtgatgcacccatcttttgagccaatgtgacacaagccttgaataatatagatttaagctcttgaaccttacatgaatactggacggctttatttctcaacatgttatacttggttggaacttggtagttgagtctggcattttttcagtcaggatttcacctttactttccatgggtaaacctatgttgagaaaatttggtttctccttttggcgaggctcgtccctttatttggttgtgtagcacatgaaagtgatttgttatgtcatttgatttttagtttctctattcaattgtttacgagggactgctggcctgtatgttcaaaacatgggttggttcattcagactgctttgaaaggagcatttagctgcacttgaggaaattatgatgaggattgactgttgaattggcgtcattgtgtgtgagtgtgttttcaatacaagtcattaattgtattgtctttttgtttattatgcaggaggaacgaaatttgccacatgcttcatttgtaatgagactgggcacttgagtaaaaactgtcctaaaaactctcatggcatatatcccaaggtaaatgagtttagcattcttggttttcatgttattgaatgttcttaaaattgtaactaaagtttgcactattagagcaaaatctctctatcaattgaatttaacattctgacacacggttttctttctctgaagggtggttcttgcaaactttgtaatggggttacacatttggcaaaagattgtccaaccaaaaaccaacgaacacatgattccgcagttgctagtaaagctatccgtgcctgtacgtttctctacctgataataatggcctatttattctacctcatttctggcagtaattctttcgtttgggctgaaattatgcttggcagtcctcaagtttaaaatgtagtttctcctttatgcttttctccatgctttaagcttctagaatagagtgaacatgtgattcacaaattatgttaattttctctaccgaatgccattaggggataataacatgtttatttcgtcacccgggatcttgctgtaattgatgcaacatcaagggccatgcgcctcagtagtacttatgtatttggtttctcttttctgatcttgcatgaagtatttaggttctcttttcatttaaccttctggggcatacatacttgtgcattttcattgcttatcaagctaagtttagtattctcttctctttctagctacggagggaagaccaagaggacaagtgatcaaatttacaagtggcgatgatcttgaggatgatttcacggcagaggacaaaaatggtggtaaaaaagacgagtcttcggaaccaataccgagttctgcttctgattcccaagaaagtcatataaaatcaaagaagaaacaaggacccaaagtagtaaattttgttggataaccaaatattgttacagcc

SEQ ID NO: 48000 - DNA, 1112 bp, Cannabis sativa
tacattgtatcatttttggcatgccacacatggtaaaccagtgctgtcattgcaacaaaataaatgagcttgcaaaacttgttgcattttgctttttctatcaacctgatcaagcttccaaggtgttacgaccaatgctgccaagagagccattctttcacctgctgcaaatagtttagtagcaaaggacaatcgataaataaatgatccacaatttcatttctaatattgcagaatacacattttgcatcaacaattatgtgatatttcagcaacttgtccttggttctgaatcagttttgcatggctatccacaaaaaaaagctatgtttaggcacattaagtcttccccacacttcttggctccatcgtattctgttttggatcagggacaatagcttatatcctcgtgaaatctgatatttttcatttgcaaactgtcgtatgtcaactatttgtttgagtttttctttgacagatatcagcttcctccaataccaactcccatgattaggagcttggtacgaccactaatcttcttctttaatatatataatatgtacccatcgaacccataagttctcttccatgtttatttgcaactgcccaaatatacttaaataaggctgcaatattccattcatcaatccttttaaagccagatcctccatccgctttagacttgcatacattatcccaagcaataggaccagacgctaaaaataaatgttagcctttccaaagataggcacgacagatagcttctatttcattgagtactttctttagcaagatcataatctgactccaataagaatgaaaggataacaacacagaattgatgagtacaactctacctgcaaaagataaatttcgagtgctccatgctttaatctgggctgtcattttctcagctagtactttacattccttgcttaagattctttttgaacatataggaatgctaagatatctaaacgacatctctttcttgccaaaccccgaagtatcaacaatcagttgcaatttactagcttgcattccacaacaataaatagcttattttgatgaattaggttacaaaccagatgtacatgaaaagagcttcaagc

SEQ ID NO: 48001 - DNA, 830 bp, Cannabis sativa
  modified_base (45)..(63): a, c, t, g, unknown or other
tcgttttagaagttcatatttaaggtgttaatcaacatacttgtnnnnnnnnnnnnnnnnnnngtaaaataatttccaacatttcccactcaccaaaccaggatacagagttaaaatactaggggaatgatcaaataacccctcattgagaaacacggcttcagcaaattcaaacttgttaatccaagcttgattggacaagattctatcaatcttggagaaaatttgatcttcaccaggttatttatttgtccaagtgaaaaaattcccaattgatttgacatcttctaattgaaaaaaattaacacatctcaagaaatcagaatcagggtaagattttactctatgcccgatcctctcttctttggctagaatgtcattaaagtcccccattagaaatcaattctcaacagtagccaactcacacaaatccttccataaaagacttctttcacctcgattatttgaagcatacaccacagttaggaaactgttgaaaccttctactgttgaaatctttaaatgcataaattcaccagtgcatctaacgatatcaacagtaaacctccaagagtttcaggctataacaatctttccccctgcatgccatgcaatgttagaggagaagcaccaactttcaaacacattagagtacaaggtcccaagttttggagccttgaccctagtctcaagaagcccaacaaagtcaaccttttgagtattaataaactgctttattaattgttgtttgtattgactattgactcctcggacattccaacagaacaatttatccatttgagagagagggctccccccccccccccccc

SEQ ID NO: 48002 - DNA, 1774 bp, Cannabis sativa
agagatttttaaaaaaatagatgaagagcatgaaagcatataaaataataaagggtatcattgagatataaaagtttagagaaaattagattagctaaatttttaaaaatagaggttacttagttaattaaaaaaactttttaaggtcatttgactaaatattctggtcattcagccatctggaaaacaattctaggtgtccaaaaattgccgtaaattagaatttgtagaaaaattagcgatggagctagtacttctatctggtttgatccttgggtcccttacaggaatcgttgtccagttcctctaaacagtgcaacatctagtgtggtttgggtgaagcagtttattgttgacaacaactaatggaatgtgaagatggtgaggggttggtttgcttatgaggataccaaggctatcttggacattgatatgccagatgaatcgagaaatcatagttggacatggcttctagaaacaagtggggagttcaccattcgatcagcatgtaagcttatcaaagggtcccttagagaaagaggatttgatccgatatggaagaaaatttggaaatctacacttcatccacaccttaagctattatggtggcagctactccgtgatgccttcctcaccaaaggtaaattatccaccttcatggacattggctctaatatgtgtatgttgtatgataattctatggagacgaatgttgctatgcaaaagccttatggtacagtacaagttcgggaatcaagacagggcacctaaaagtggggaactggagagaatggactaaatggttataggaaggttttaatcgaccaccaaacgtatcactcaatgaattaatggtagcaaccctttgtgtgtattgtggaagtagtttggtgggagaggagataacaccgttgcaccatctaatggtgacaattaggggaaaatcaaggatcattccttagttgtctcaaactctgtggagccgattgtaacatgcagtccccctccaacatcctaggtctattgcaattcggatgtgactgtaaatgcagaaaattctatgctggcaatggtcattaggaatgaatggggtgataaattatccatcaaaactgcaatgagtcatataactgatccaaagttgtgtggggtgcacgctctttgcatggctgcaaacttatcggtggagcttggctattgtactgtggtgttccagtgcaacaacgaggtagtcttaaagatgtttaatgtcaaaaatgaccgtagggaaggctttactatttccacagctagaagacattttctaaattcttgcagccttctaagggggtggggagtgttaagagtgtctattcagttagctgttggttagagagatttagttatgttcggtattgtttgttgatttcctttaactaattctgttattttttcaactaactacagctgtaatcattggctatataatgccaactgtcttaattgaatagtaagattgccctttgttttcaatcttctctttcactatctttctttctctttctcttcttctcttcttctctgtttcgcttgctactgtgtttgttgattgttcatcaatggcaaagagattcaacatggtatcagagctatttcctccattgtcggctaatatggcgaacattggacctaacactcagagcaattcgaatgctaacagacctgcaaatcaaccaaatggagcttcgaatctaactcgatcgagaaacaattctgatgagttcaatcctgttta

SEQ ID NO: 48003 - DNA, 1311 bp, Cannabis sativa
ttagtaccactgcactactccaccattacaatttacaaacccaaaatccaaaaccttaaaagctctagaaacaccatactattttatattatattattattgtagtagattaagcaacttggcactaattagagaaaaataacacccaaaaagtgagactcgttaaaatctatctaagatagtgcctttttttattgtgtcttacttattggtgggttctctcgaataaataatgggtgggttgttgattatctcccattgtttgtacgataatactgttcgagggtatattagtagtttcatagtatactagagaaagggtgagttttgtagttttgtttttaaaaatgtacattaattaatttttttttttaaggaaagttgatagaggttttataattgtttttatattacaaattatgtgcaaaatagtttcttgatataatattggtgggcagtttggcatctatctattatgattatgaatatagccaaatttaataaaaacaaaaccagagttactattatgtgaaaaagtttaataacataatttattagaaagtatatcatgttaagacatagtatgtaacaatgtatcaatcatttagtaaacaactttttttatgattattattatttttatgaatcatttagtaaacactaaataaaagtatgtaacacaccccctacaaagggatgttttttttagatatttaaaattacttataaatcaattcaatatcattcagtaaaaatttacaatatatgtataaggtatacttaatgtgtccaagcctatcccacaaatatattaaaaatgatatcttcggaggggtgtaaagctaagcaaattgtttctactcctaaaatatttagaaatgctaataatttatttttttttcataattatgtatgttgtagtttttttaaaccacttgtaaatttttaaaaaattttaaaatagttatcaatgccaaaaataaagtttaaataactacttaccacttgtataataaaaataattacacctgcaataaaatatttaaatcatacttttagcatcttaagcttttcatttttttttttttttgaaaatttatagattaatatagaacacctttttaaagaggtgaactataaacttttctctgaatgtttattaatttagttaaaaaaagtatttaatactgtattaggaaaatttgataatccccataaaatctcctaattctactcaaattcaaccactgttaattttttggatgagattgttagattacttttcttggtgatgcaaatacaagtcgtgct

SEQ ID NO: 48004 - DNA, 3279 bp, Cannabis sativa
gaagaagaagaaggaggattttccatagctatagttgggtacgtatagaagaatattatgttaattaatattgtttgcttcattcctcttatatagtaaaatatttaaaattataattataactgaattagaataaaaataaaagacataataaattaggtttaaacttgtattttatatataaaaaaagatctattaattatttaaaaaacaaaaaagatattccgttttttttaaaggaaaagatattatattattgtaggataaagtttaataaattcagatttttttgtcgaaatggaattgaccatatttctatttttgtgtatatttatatttagagagataatatatattattaatgtatcgtcaataaaacaaatttccaaaattttcccctacttaattatatagttatcttataaatgaatttaaaaatgaaaaagccactaaaatatattatttaattaaattagaatttaaaatatcgttttaaaaaaaaaagataaaaaagagatatattatatgaaagtaaaaaaagatattttacgttttaaaatttattattatcattcatctttttattttttaattataattcaattatgattatagaattttaaaagtcatatgtctaatattgtttcactatatatttattagagtcattaatcattgatcaacttatagttttatttattcagtcaaagccactttctcttaattttttcttctctctctttacggtaattatatttctcaattatattttgacttattaagcttgtgaaatatttgagatatatgccttattattttcgaaacattagttataataaacaatcattggtttaaagtcttagactttatgatttttcttgctatattttataatgtccattattataattggtttttcacaattataacttattgaatttttagttcacgtcaaaaaaaaaaaaaattgaatttttagttgtagttcatatatatactgcttttgttcatctaaattgttttgatagtttagtaattaatgttgtgtcaaatttcatttcacattgaagatggtgttaagctttaattttattaaaattctaaaccctaattttaaatatattgaccttataaatgtatgttttctctatataggtagctttgagccaacaacaactctatatatagtttcaacaacatggtaagcttcactatatcatcatcatcatcatcaagtgttttctattgagtatacactcttatatgtaatttaattgctttcattgtctttgcagtattccgaccaatatggatatgaatatcgcgggacctcgttcaagcatatgtatcgatgctaccctccatcctttttggataaggttcacttttgttaatcttgactcatgttttgttaatttcacgatgattcattatgttaagtaatttttattaaaaaagtgttgttaaatcaatctgttaattctgattgagattattctcacatttatttttgcagccacatctcgagaatggggataaaagtaagtgttttatatcttctcacttttgtggttaaatgattttgttattatatctttttctgatgttctttgttgcaatgttcagttataatgcctccatcggctcttgacaagctcggttagtgtttttttagactcttcaattttcatttttaagcctttatcttgttcaaattcgaggtgttaacattttaagaaaattctgcagcatttctacatatagattatccaatgttgtttgagcttcgaaataattttgctgagagagtctctcattgtggggtgttagagttcacatcagaggaaggcattatctgtatgccttgttgggtatggatggttatttttttcgtgttacatttagcgtcttttgttacatactaatttagtacttttcaaaattagatgatggaaaatatgagattaaaagagggagatttagtgcgtttaaagattgtttctcttcgaagaggaaagtatattaaattgcaaccgcattgcagtgactttctggacatttcaaacccaaaagcaatgtgagtctccaatccatctttatcataaatactatatcataatgggaaaacttgtgttattaattgtgtgaaatctgctctatgaactacagtttagagaccaaactgagaaattttacgtgtttatcaactggagacactatcatggttgcttacaacaacaaaaaatattacataaatattgttgaaacaaagccatctcgtgctgtgagtattattgaaacagattgtgaggtggattttgctcctccgttggactacgaggaacccgagaggcctatccaacatgttccttcaagcaagccatctagtcaaggtatatatttcttcaatggattttaattcaatttagacgttatcgttacatttggttagacgtaatgaaacaaaatagaaatgaaataatttttattctattctagcaatgtttagttgcgttttaaagttttaaaatttgaaatataagaaatttcattcattccaaccaaacatactctatattgtttgctcttgaaaaaatttaggatatgactctctccttgtgattattaggcacatgaagttattatttttgtcatttgcagatgaaaaggttcctgttgaagaagaacctaaatttagcccttttactgggttagcaaggtgcttaaatggaaaaactttgatgagtggaattgcatcttcttcttcagagttgaaaggcaaacaatctgatgttgttggccatggcaagtcaaaacagccttctgtagggtctagttctccatcccctgctcgtaaatctcaaggaaagcttattttcgggtcaaattccaaccgtacacctacacaaaaggtgagtttttcttctttatgtcatacctcttttcactatctagtttttctttaaatttacttaatggtttcttgaattctataggaaactcctaaagaatcgaaaaaggaagaggcagagaagaaatccgagcctaaatttcaaccttttactggaaagaaatactcattaagaggctaaagctcaaaatagacattcataatagaaaaacagtcaaaacacttagtcaaagttagttgattacttcgttagttaattagttagaagagatttgtatttattgaacaaaaacacaattatttatttatttattcattattattttaatacgacattcttatatggatttatcacattcaacatatta

SEQ ID NO: 48005 - DNA, 828 bp, Cannabis sativa
atatatacataaacatacacatttatagtactgtacactatatcatgcttacgttgcaattatcactcatgctttacccgacaaagttttaattcactttgctttattggattcacatattatcaaagcgtgcacgaagagtagccctgaaaaagcctactgatctcatatatattatctgttcaaaaccaaacacttataagaactcatatcaaaatcatactttatttattaatgttttttgatttcattggtcttcaatggtcatatcaaaagaacacattcataactataataataaaattttgcatcataccattttaagaaaattattttaaaatttcagagtatgtgtattcctacagaatgatagttacaactaatgaggatgattatacatatcgtacacaaatatattgtgtgtttgtaacaaggttaagtacgtaccatcgaggaaggacatttattaattgttggtactttgaccacttaagagccatctaataatcatgtaaaggcaagtttaggattattagacaatgagtgtatatgggaagttcatcaaattgaatccaaatagtaatttgtgatgtaatttaaatttgatagctcaacttcctcagatgtcctcaagtcgggtctggtctattttagacatagttgcctatactaaactctaagcacctagggctagtgtttttactggttttcaagtcctttcgtttcatttttagttgtgcctgatactggtttttcaagtttcaaagtctctcagtttcaagtcatggagaaagagccaacgggtatagtgaatgttccagtggatgt

SEQ ID NO: 48006 - DNA, 1523 bp, Cannabis sativa
tgtcaaagttcaggggaaaaaaaatcctaattagccttaattttaattgaattcatcacaagtttagtccaacactcagccccatcacatgctagtaacaagttaagtgaagagatatcccttacaccttgagcactaatccattgatgaagagttaatgaagaaaatgacaacacatcctccactctccttcttatttgatgccacactatctcatggtccaaatggtcctacaaagcatcacagatctccccaatctatcctcatctaccctactcgtcaccgcaccaagtcagacaaagaaagaatgaaattcaaggcctaccaaatctaaccccgctgcgacccaaaagctccatgaaaacccacacgacattaaacaatagaatgttatttcactacaaacatcacaaaaaggacaagtggtgtccatagagattttcttatcacaaaaattcatcttaggaggcaaacaatgggaaaccgctcgctaaataatatctttcacttttggagaaccttttttcttttgttgaaaaataagaggatcatgtcatgcaaatctcttccccactccttaggtagttttggccattctaagactatgtgccggctataggggctttataccttatcctgtcttagttgaatcatcggtatgtacttcatgagggttctcatccttaaagatggcatcgccacggcaagctagcctcccaaggccaagcataatccatctcaatgaggagttgtggtgagattcgaacatttgacccaagcaaagaaggatgtcagtcaaaacttctctaccactacatcacacaacacatggtcacctttggagaaccttgagttgccataatttcttccaaaagcccatgctatcataactatagttttcaattttcggagacagaaaccacctgtaagcactctttacagaatagactctattagtctctttctcctaaaaccaaaaatcctccccatgagataaacttaaagaatgcctaagatagttgtatgcacctaatcagatcctcatcacactcccatctcttcaaccaaaacaaactgcacgccataagatattctagttcaatagaagaagaggtaacatatagatgcgaacccatcaacactcgaaggtcacaacaaatagaaatagatgccccaaacccaacccgatgtcaaagtccatctttaagagtacattggatttccttcacacatctccaaataaaattagaattcgaaccccaactcataatgcaagaaatcacaagaaaatggcaagctctaaaaactttcgtaaccaaagatgagccaaccttatttctcaagcacaaacaaattaaaatcatgaaaagactaaaaccctagtgtttatgaagcatcattccgtcccaattttaaaatcaactgcacaagatctgtacacatccccacagaaagtaaaaagacactcatggcgtatgatggtaaagattgaaccacactatcaagtcccttcaccaggtttg

SEQ ID NO: 48007 - DNA, 1903 bp, Cannabis sativa
  modified_base (1782)..(1785): a, c, t, g, unknown or other
gtcacgaagaagatggaggcttccgtttttcttggccagtatttttgtaattaacaacttttagtttctatttttgtttatttcccttttttgggccataaatataaatttgttccatttttagtttattatagaaaaaatccctattaagaatgtacacaggacggagaattagcggagagtgctcccgccgtcctcattctttttaaggattttaatcactaccttgcttattcaccattggaaatgaggcggagaatcccctataaaaaagtaaattttataataaaagtttaaatatataaaaatattaaactacataatatattaaaatattacaaattaggaatgtacacggggcgaaaaattaacggggagtgctcctgctgtcctcattccttttaaagattttaatctacatccctgcttattcactatcgagaatgggatggaaaatcccctataaaaaattaaagtttataatatttaaatatataaaaatattatactacataaaaattaaaatattacacattaattattattcaataaactaataattatccaaaacacattttcaaaataaataaatacataaataattatccaaaatacaactttttttttttttgacattggggagggggaatttgatcttgagatctcctctttgtgagagaagtgtgaaatcactatgcatatgaccactccaaaacacaatttaaaaattcttcattaggatactaatatactaaaaaaaataggcacaagcataaattataaattataaattattattggctaaaaatataaaataaaatactaaatgagtctccgtcggggcaaggagtgtgaaccctgtactcactccgtttaatattcagggataaaaagtaattcacgtccttttcccgttctccatttattagacggagaaatcatgttccttaaagagtgatccgcggagcccataattttaataggaagactagtttatatatgaattattaactgcaggtatggacccctcccaatttttttcttaatttttaataaaattactttgaaaaaaaatatattttagtcccccttaattcttttttagcatttaggcccctaattgatggagctgcattcgtccctaatcatctaatcaattaaaaatatattgaattgttttgattatgaaggaatgatctatatatctctctacatatataaagtgatgaaataatattctagttataaattatttttatttttttttaattctctcaataattcactcatttttttttttaatatgtacataaatattaataaataatacaatatgactcattattttttggacaactatatggacaatatggagaatacccattagagttggtctaattccacactactccataagtggacctaattatcaatacacaaaataataaccaaaaaaaaaaaaaaaaattaattaagatcaaattgtgattacaaccatggagaagagaaatttcaagaaacaataagccaaggtgtatcacatcttcaacaatagcccaacacccacagcttacaagtttctttcttttcatccgacatttcacgtcgtatttcaaatcgattagaaaatgaacggtaaagccaggatttaagttgaggatatgttaaaaattaatacttagtattttataatagtaaatataatataacgtaaaaacaaatagcattaaaaaaatgattaattaggatttttactaccgaattttgacatgtaccaaatcnnnncccttgaacttttaaggtcattaatgtaagcctttagcttcccttttttcaacccaatttataaaaagggaagctaaagggaagctaaagggggtgcattgacatttagaggcggttt

SEQ ID NO: 48008 - DNA, 762 bp, Cannabis sativa
ttactctaaagtaaatttcacaagagaaagcatgcatttaggtgtaattataaatttataaattaattgagtaatatttttttaattttaaatttatttattatatattttcaacttccaatattatataatttttaattttttcccatacatttaagttttattattaaaagaaattggtctctattttatttgatttatgatttagtgatgattttcattatgaagtaaatggtcaataagacaataagcatgataacaaaataattgttgcaaaataatacaataacagataattgagtaattatttcaattatttgagaggctacggtaataataccagctttagatgaatagaatgtgccaataaggaagatttacttaacaagactcatagcaaagtgagaagtaaaaagtagaaagtgatatgtaaggtaggagaactattcaactatttaattctctatttacttagttatagagaataattatttgtttcagatctacttcatgaaggaaaaaaataaaaatatcaccataaactttaaataattttaaaaaaatcttaatttataaatataattatttaacaaaaagtaatattattgtataacaataactaaagtttgaatgataaatcaaaaatatcacacataatttaaattcaaaaataattgttgttattttattttttgaacaacaaagtgaccattgttcaaaaatattataattattttagggatttttttctttttatatttt

SEQ ID NO: 48009 - DNA, 1098 bp, Cannabis sativa
ccttatcaaattaccatctgcagatcaaggtaactgaaattaagtctagaatgccggtggcgaacagaactttggatgcttgtgtgtgtgaacttgctgagggcggtctagggcgctcttattatttatttacgctattaagtttatgtcgcaattattttaattattatttattaaactggccgttgtgaacatttttaagtattaaataaaaatgcgacattatgatttttcgctttaacgcttgtaaataattaacgcttgtaaataaaattaatatttttataaaagtacgggcgttacacgtagaagatcgtcagctttaaaagtcctagcttttccattgaaatctatctttgacacttgaatgagatttctattcattagatctatcaagtattctttcttgatttcacaaaatcttcagcaatccattggcgaattaatcgtctacatctaattgagtagttttgaggaaaatatcccgagtacaagaagcaggacttaagataataaggtagattatcgtaactaagagaaaggatttttgttatgtgctttcgagatcgatgtttcattgctttgtaactctgatcgcttagacttctaagcaattttctcccctcatcaatattattagtatctttaatttgttgatagaagaccggctataacaacaataatcgcaagtggtaatccttcacatctttcaacaatttcatgtgacaacttatctaaatggggtaggcattaaccataattatagtgaaaaactattttacaaaagatagagttcccatgacttttctggagagagatgttgtagataatgaatattagggatgttcatcaaaccgttcaaatcgccttcaccgcgccccataacaatttacatagacacccccatagcaattaagaacaacttaaatcgcagttaaaatcaacatagaaaacactgaagcaatccaaaccataaatttaaattgttacgggggtttattttttaacagaaaatatttattcatttattaagaaataataagactattgtcaattagaaaataacaacacattaaaaacatttattttaaaaattaa

SEQ ID NO: 48010 - DNA, 2107 bp, Cannabis sativa
  modified_base (1435)..(1435): a, c, t, g, unknown or other
atgtgcatataattagtggtttgaatgttaatttagacatccaatcccaatgtactcaaaatttgtaaaatatcccttataattatattatacattgtcaaaataaaaaaaataaaagaaaacataatttattatttatgtaccaaaaatattaaaaatacctataaatgattagatagtgattaaaaacaaccactacgtaacaatttacatttcttaaatatgtaatactagtaataatatatatttaaagaaataacactttctattttgtttttgttattggattattataggtctttctaaatttgaacttatttatttatttatttgagaacaaattttaacatattttgaattgacaaaataaatactttaataatgatgtgaaatattgtaattaacatttaaatttttcgttataattaaaaatacttttttttatgttttatttacaattttacaatctaaatatttttatttataaaaaaacttttgtaaagttttaaaagataaaaatacattttgttcaacaaaagtaaaaaaaacaactaaaaaataataagaattcaaactcacaacaactataaataaattatataataattagaaaaataaccttatgataattataatacaattataactaaactataaaacaactaaaaaacagcttattgtttttacaaaagatatatttttatatataaaaaactttaaaacgtgaaaataaatttttttctatgttgatatatttttataatttttttcaaatgtatattatttaaatttttcatgaataaaatactacttctataacttgaaaataaaagttttgaaatattaattaaacatttaattaatattaattagagattaaaattatgcttaaaactaaataaaacataaaaaatggataaaacaataaaatttaattttggtaaatgagtattatgtgcattttttaatttaaatttttaatatatccaaaagaagtaaaagaaaatactagagtattttatttttataaattttggaaagaaaaaaaagaaaaaaatcatttttttttattttagtaaaaaaaaaaactatcaaaggaattgaaggcgacttttggcgtgcaagttgacgttgcttcacctggcaaatagtatccaataattattatttattaatgcaccaataaatgaccactctaatgctatcttgttctgttaataaattatttaatacgacaacggatttaattataaccgaccgttaaatattaaatattttattgtgatcagattgaattgaatgttatttttaaatatccaattaaattaatggatcagatgttagatatagtgtccaaaaatttaatacattaaacatctaatcgaactaattagtatttttatttaagtttgatgagtaattagattttatattnttatacgtaaaatatatatatgcatatataaaaattaacatttttttttgatcggatagatcctatctaatccaatatataatagacctaaagtattggatggattcgatctaaaaaaaatactagatctaaaatattgaataaatccaaattaaactaataaatatatatataatacatccaatgaataaccgatccaatccacgattaaatgattggatcgaatcggatggtaaaatttaacattcaataaataattggatcgaatatgaataggcttaaaaaatactaaatgtgctccaataaacacccgtaaacataagcataaccacgactaaaacctagccaaaaaagtttctctaaaaatttagggagttatttatcataaaatatccccaaacaatcctaaattccattaatatgtagattgacagaatccattacatagtaattgctcataaaacaaaatcaacaaaaataagaagacaaagccactataaaggcacattaacaaaataacccaacacagtacataactactagaagactgacgtcattgatccgcatgaacaaaaaataggtttcatcaactgacattatcaatccagatgatcaacctaactcataactttattttcatcctcactaattctctgtctgatcatttaagta

SEQ ID NO: 48011 - DNA, 2009 bp, Cannabis sativa
tattgtaattgtgttactatattaaataaataaataataataattgaaaacaaagtaatttagagaaattattatgaatttgacgtacgtatttttaatttgttttttattattatttttcaaaataaagttaagagacaaaatcaacacaccacagtatattaatttgttttttatatatgtttttgagagagagagagagggtgctttcattaattctatattttacattagtttatatttattcattcatttaatgtaaaactatattacattaagaaaatgtaaatatttttttttttaaaaaaaaaacattattatactcgacggtgaggatatatatagggagacttttatttttggcagacattttaagaaattattataagataatctatttcatatatataacggtttatgtccagttatagttaaaaaatttcacattattaatgtgtgaataaataaaagaatatataaaatgaataaattatatattattcttattattaattggttttgagatcccgaattctaatagttacatcatttacattttatcatgaatttttttaaataatttagggtaccaaaatagattagagagttaaacagtagaaatttcaggaaatttgaggaggcaaaatgtgataagtgtgacttagttgttatcccatcaaaatcaattatattcaaatggtcttttcctgaaataagtttatatataagaataagatttcatgctcaccacattatataaatgtttttatttatttatttgatgtattattaatagactctctatgcatcaatttataattagtttctctaattataatagttcatcgtttaattaaaggacatgttttgtaaaactatgagttgtagaattcttatcgcaagtcatatgagacaaaattatttctaaaagtttagacaataaaattataacattttcaaacagtacccctaatttattaaaaaatagcattcctttgttgatagctcttaccaaagaaaatgaatttgaataaatctcactaattagaattctgtaagcctaattgagtcctccctaaagagccaaagtttcggcttatagtactgaaatattacttaaaaaaataacaaaacaacgtcaaaaaataataagtattagaagaaataatttttgagttaaaaataataggctaaactcagattaaaatacctaattgaattagtctaaaactcaactacaaaaaggaaaggaaaacctaactaaaacctaaggagaactagataaatactacccagtatttatttatataaatttatatatgtgtgttttgcccttttagctcaatatatattacatataaatacacataaattattaatacacgtggacttgatatgttttgtttgattaatgaaatttcattaatattgagcaaatccctcaaaagcataacataatttcttcttgctaaatttacaaccaacacataatcgaaattatttcataaaaaaatgtgttcgattagactgtttaataaaatataaaataatttattttttaaaataatatttattgaaaaaaaaatattaaaacttgtaaactattcgtatatgtactgaaaaacaaacataaattatttaaaaatttcttttataagctcgtaaaattgatcatttcaaaacttattttcaatactataattattaaagtttttacaaaaattcttaaaaaattgtacaatcatatacaccatcatatatatatatatatatataatttcttcacgtgccaaaaattaaattgtactaataaaatcgacaaacatgtcctactaacctaacaaatagttttagtatatttcacttgattttacactgtaaaagtcaaacactaaacacgttcgagctaattaaatggctaaaatattaaaataaatagctatttttattattcttactccaattatactccccactttagttaattaatatttaattattttaataat

SEQ ID NO: 48012 - DNA, 2787 bp, Cannabis sativa
  modified_base (36)..(72): a, c, t, g, unknown or other
aatgtaaggttttctaaacccttatgtgtttatttnnnnnnnnnnnnnnnnnnnnnnnnnnnnnnnnnnnnnatacttgttagtaaatctaggtccatgtaaaatatttccaacaggatttttcttcctcttcacacacttaacccatgcaggtcgtgcctctatcgccaaaatatcaccctgggactccctgtcatcaatacagataacacttgcaccgataggagtaggtagatctccctcataaggatcaaacccgtcaggaaagacctcctcatcttgtagtgagggtgatgcagctggtagtggggtagatgcatctgttggggcctccggtgctgaagttgtcgttggagtacgatgcaacatgctcaatatagttctgagctgctccataattaggttctgaccatccttcagctctacatggctattctcatatgccatctttagctcggcatgacaagcgtacatacccttctgatcagcctcgatcctgtccaacctccccaataattcattgtaatcggcaccaccaaggcctgatgaagatggtgcactgggctgagggtctgaaccagtggcctgaaaaaatatatcccaaaaaaatacgataatcatacggtaatatcacagaacaaagaaaacagaaataatcaagttatacaatcataaaaaaaaagttccaaaaattggtacctgagtatctgcctcagcctctttgtcatcgacaccatcatcaaccagtttttccacaccatcgtaagagatggtcctcacatatgcctcctcttttgtccgtggaagtagccccttcaccacttcaagatgctgtttaaggttcaaaagatataagagtaaaacgattcagcatttatgttaaataattactctaaatataagtgaaactcataaccgtctagaaaatattatactgaggtctttcttccctatatcacccttgctcgtccagctaagcattctgggaaaccgaatcccatgattcgtgccatacctcttcccaacctctaaaatggcctcatacgcccaatattgtactacaggtgcaaagccataagctttgtatttgcactcatgctgaacatccaaacttagtttcttctcgcagttggctttctattttaacatgtccttttgaagcgagtgtataagtcgggcgaatgagtgcttcccccaaggaatctagaagaagaactcgagatcttcgacatatctaagtatgtcaggtgtaatcaacgtgttagcctcacgacccagaagcactgcctcaacaaacaagcacaagccaagcttgtacaagtcttccgggttttgacagtttgtgaacctatcttggagtgcttttgtcttcacattatcagactggttgaaatatttgttgatcaatcggtctgaccctgagcgagcaacctgcgtagccttctcctcttctgttggccctgaggagaagtccaggcctgtaatgagggcaaactcaaccactctgaatttgagctccttccgaccaatgtaaaactgcattttcaactcctcctgaacatcaaccttcatcttgtccaacatgagttggtaaaataacaccgaggagaatgtcaggggtacaacattccaaaagttgccaaaacggctttcttttgccgtgttattcaaattgtactcctcaaaccaagacttgatttttgcaaaatttccagtgcgtctatatgttacgcggacagtaaaatgctcggatgctggaattatgagtttgggagccatctgaaaaaataaataacaaagcaatattactatcaaaaaattataaaatggtcgacatcatgtcgatattttgtcaacattatcaaacagtaaacaattacataattttgtcgacaaaatatcgacatcctgtcgacaacctatcaatattccaataatatcatcacacctattcagcaagacaaaatcatcgacacatgtcgacattcggttgatattatcacactcaaaaatcacaagaagcaataaaatatcattgtcgacaacatatcgacatactgtcgatatgctgttgatattctaagaaaatgaatcacatctactggcaaatcaaaattttcaacacaatgtcgacatcatgtcgatattctgtcgacattataaaacttagctatcaaagaaagcaactatatcacaatgtcgacaacatatcgacataccgtcgataaatggtccacattttaggtcaaaaaataaatttaatcgactaaattagtgtgtcgacatcctatcgacacacctacgacatcctatcgatatacattaacaacacagacaattctaacagtcaaactactttcatgtttgctcaacattatatcgataacctatctatatagcatcgataacattatttaaacaaacaaacagacataaaaaatatatcaatatcctatcgatatttcatcgataccactgtagaaaacacaaacaccattgaaacatatgcaacatctacaacctatcacaagaaagagcacaaaatctacaaaaattctactaatctcaacaacatgcaataattggcattcaaatctatgaaaaatatatatttttttaaaaaaaaaaccttacctttgactgttcctgcccgtggtggcgacggcagttcctgcttgggtttgggtcgacggtttgctgtgggtttgggtcgaatttgagagcgacagacctcggtttgggtttgggttcgcttggttcgttggtgttcgtgggtttggttttgtt

SEQ ID NO: 48013 - DNA, 1113 bp, Cannabis sativa
gaataatactcaattggtcctaataaaaatgtaaatgagagctagatttaacttcccaataaataaaagtgcctttgttggacattatcctccagtggagggtggtaaacattgggtccagttcaagtttgactttttaatattactctgttttaagtgtggcttctggggtaatgatcagaagatttatgctaaagtaacagtgatggtggaggaccttatgggagatagaagggtgatgtatggttataggcttaaacgagaggatgatagaagagatggctcaatcttagctgctactcatagtaatattcgtattccccaattgatcaaaactcacactagtttcaatctttaggcccctcggttgagagtcaaatggtggcagaaagggatgatttgtaccaaattcgatagctcaacatcctcaggggaaagaagaagtcaatgggacataagcttagaatctaaatttggtaggaagggtggctattgagaaagccacgatttatcagaggacagttggcggatctattaggatcacaataggaaagcctccacctgggttgacacgtacacctattggaaattgtttgttcaaagttggtgggccaaattatgttgagaatatgaatttgaataatttgacaagtggtaatgggctgggatctttgggtcgggcagatgggctgcaaaaaggaattatttttagactattgtgtgttgggaattttgggttggcccatgctagtgataatatggaccaagaaaaccaagtgagatctcattagataagctaagtattttaaggggttcgtggaatcaattatctcgacctaaaaacccacaagctctcctaatagacaagtttgacgatgttaaagggaagaaatgagagggagatgggatgcgttatgtgatagagattaatgatcatggtgagaagaaaatcaatctgagttcttgaagagtgggaaatgagggcggtgatggtgatcttccattgggtgaaggttttggtgggggtttcatatggttagcgttggggttactccaagagaggaaaagactagcaagaaaaaaggatcaatcaaggataaagcttgccattta

SEQ ID NO: 48014 - DNA, 1409 bp, Cannabis sativa
atcatctatttgatgcaacatattctttagtatctttagattaaaaaaatatgtagaatgtattcttttacttttaaaaacatttaaaatattttaaagttaaaaaatatttaaaaatataaagtgcaaaaattttaatatagaatttatttagttacaaaaaatattaaactaaagtaaaattaaaaatttatacttagcatactatgatttcagacttctctgttgtctcaaatttaccaaatccaccatagttgtactgatcagattcaccatggttgctcagtacgcagggatactgaagaaaggttttagtttggactgattgtaagcttaaatagtcgcgatagtaataatcgaaagaagatgatgaagaagatgaaattcttctttttgtttgtttttttttattttaaatattggattttttatggatttattttaattatgtttagtttaaattttaaaattttaatatctttttcttgaaattataagtttgataaaaagattatacttttgtttaaattttattcggctattattttttatgaaaaattttattcggcttttattttttgatatttgattgctggtggcttattagatttttagttaaaatttctgttaagatttcttttttactataaacagtttgataagtttattattgttgattttgctccctcaactatatatttttatgtagtagattttgtccaattaatatattaatgaaaaattttatttttctctaaaaaaatagaaaataataaaataaaataaaattatctacacaaattactcaaaatagaaaaattctcctttgattttcatgaacaatataaataataaaaatagaaatatgtagcttcatagaatcattattggtgaaaagtagaactcatcttagccacaacttttttttttctttcatgtacggccaatagaaaaaggtacccactagccgtacctttgtcttttactattattgaaaaaaacacaaaaaataataataaaggaatcacttttttatttattttttcatgtcaatgaaatttgaaagatttgagagttttagaaaaacaaaatagaagaattttgagggattcaattaaagtgaagagtgtttgtgtcaaagtttttgttttttttgttaatttggttgttagttttttatattttttttttttgtttttttatagctcaccattaaatcattattagaggttagtaataacaagttatctgtacgactgagtgggttattagtggttgggttaaatattttatacaataattgagtgctcaaattatgagattggatgaatcaataatgtgagagataaaatagaatataaatattttaaagttaattataatactgcaatctttctcgtttgatttta

SEQ ID NO: 48015 - DNA, 1827 bp, Cannabis sativa
aacatcatctgcaaaactgagatggtttagctgaagctccttgcatctgtcatgaaatctaaagtcatgtttcaatccaattctcctcatgattctagtgagatactccatccctagaacaaacaatagtggagagatgggatccccttgtctcaaatctctctttgaagcaaagaatccatgtaaggcaccattgaacattagagagaatttaggtgttctgacacaattcatcacaatgtgaatgaactgaggaggaaatttaaaggccactaaaatttcctcaagaaaaccccattctaaagtatcataagccttttggaggtccagcttaatcatacagctaggcttgtttgctttcttcccataatgtctaagaagatcgtgacaaaccattatattgtgtccaatataccttcctctaacaaagcctcttgattctgagcaattaaatcagggaggataagtttgagtctagtaccaaggagtttagtagccaccttgtagatcacattgcaacatgcaattggtctaaagtccttcactgtattaggttatttccctttcgacaccaaggttaagactgtagaatttatctctttcataatctgactagtttccaagaaagataacacagcctcactgactacattccccacaatttcccagttatcctgaaagaaggaactagaaaatccatctgctctaggagccttaacccaagggatatcaaacactacctgtttcacttcctcataagtaaacttaccattcagaaacgctgcttgctgttgtgtcacagtaggccccaacttcataatcttgctttgtacttttcttctattttccaatgtagaccccaacagatccatgtagtatgccaagaatgcatcagtaattttaccaggctcctctattctagtaccatcttgttgctctatagatagaattctattcttccttcttctccctttgatgctagcatgaaagatggatgaattatcatctccatgcttaatccaagtgattttggatttttgctgaagcatggattgataatcctcctgcctttgcataaactcctttctgacgtcaagttctttgctttgtaaatctgcagtaagaggatcatttctgagagaattctggcatatctccaaagatttcctggcttcgagaactgcagaatgtacatccgagtacccttcctggttgaagtctttaaagatcttctttagttctttaagtctacaaacaagttgatacattttggtcccatggtagtgtaagttccacacttctttcactcttctttcatagtctttatgagatttccacatgcgaaaatatttgaatgttttttccccagtattcatatcaagatgtaaagataaaagtccaggagaatggtcaaaagtaccttcatttaggaagaggacttcagctgtagtgtaagtctctagccaagcttgattagccaagaatctgtcaagcttcgaataaattcgatcctccccttgctgtttattattccatgtataatagcagcccgtgtatttaacatcttccatattgcatctttccacacaatcaataaaatccctgtcaggttaaaacttaaccctcataccgatcctttcatccttagtgagaatatccttgaaatccccacaaagaagccaattctcagtagtgaaacactcttgaagctccttccataacaatttcctaccctgctgatcattgaatgcatacacaaatgtaatgtaggaagtaaatttcccccccacattctgaacaaaaaaatgcattgattgactcgagcac

SEQ ID NO: 48016 - DNA, 1555 bp, Cannabis sativa
agaggtaaaaatgatagactttaaaaaagaggataaaaataaaagaagacaatataaaaagggtatagagtgtaatttcttcttttagaaggctctttccaaatatattgaagcccaaaattgtagcatagaaaaggataagttgaggaatattttttttttggtatcaattaattaaaaatactctcatattatatttcattaaaatctacccatttttatgagttgtctaatatacccttaccctctagtacagcacatatagttttttttttttgtttaaattcttataactatagtgtgctatttacattggagtcgcgacaaacaattcagacgaagccatttatattgaaaccgacactgttagtttttctttattatatatatataattgttccttatatgtaaatttttttttataatatgtaatgtttataatagatatattaatattcttaaaatattatatgtgattatgtgtgattttttatctttttaatatatattaatattctaaaaatattatatgtgtaatatatttcatataaatctgtgatgtttttgaaattgtttagagtgtgtagaataggttttacatttttagatagggtaatatataaatattatactgtcaaaatttattaaaaatcctcaaataataaaaaaaaaaagttatgttaatttaataatttataataactattcataaaatttaatgaaattaattttaaaattaagtaatttaactaagattttttttaaaatattttcttaaaaaataaaaacaaataagtaaataattaataaataaatctaacaaataattaataattaaataagtaattaatttaataattaataaatcctcaaaataaaaaaattaataaataatttaataaaaataatttaattaatttattatctaattatatacgtattaaaatttgatgtaattacttttaaaactaaataatttatataaataagagtttatattattttattcataaaaaattaaatttaaaaatagatttttaatttaatatttaagaagtacattatttatatttaagtattatgcaagcaaatagacatattataagtttaatttattaaatgtttcttttagaattattaaatcaatatttaaaataaaggaagttttatttgcaccccataaaataataaatacaccgtattatataaaaaaatataaagttaaataatttgtaaaaattactcataatatttatttttaatttttttcttcacattattttatgttaattacattacttattttgatttcattttcataattttttctaactcttgtatatatttttttattttttccaaagaaaatttcatataattttttattttaatttttttgtcacaatatgtaaaatataatttatttttgtttgatagatatattttttaagaatataatttgtaagggtgaaaatcggtcggttgtggttggtttttacaattttataaccgatcgtttagaaattataaccgtataaaactgaccgtacggttt

SEQ ID NO: 48017 - DNA, 2455 bp, Cannabis sativa
tttgtggccatgtttagagataaaactggatacaatatcgtggagcctgcccatatggtatggcagctttagttctctatgaaattaatctcaaatttgtaagcttttgccaagtatttattctgttgtttttatgagacaaataggagttggcagaaccatcaattaaagattcatttggtaaatgtgttcaacgaggagcaagtcgggttattgtgagtccatttttccttttccccggaagacattggcatcaggtagtataataatcataatagcaatgatgatacttactttgtagacttcaaaagctttggtaagatgaattttgtttgatgtttacaggatattccttcactaacagcagaagctgcaaaggagcaccctggtatcccctatatcataactgcacctcttggtctccatgaactacttgtggtattgaaacttctttattttccatttcttacactattatttaaacataggcttggttttatggtcaaacatagttgaaatgaataaaaaaaaattgctatttattttataatattgtacaacataaattaattccctgtgatctaactagaacaattatgaactgaaaaacagcagacataggatcaagtgatcaactatctatggtttcttagggtagatttttacatttagttattagtaaggctgtatttagtaggtaatatagtgcttgttcgcagaatgtggtcgatgacaggattaaacactgcttaagccatgttgctggggatgcagatgaatgtgctgtttgtgctggaacaggcaagtgcaggctatattgatctacaaaagagagtgagctgtatatttactttgcattccctgaattcataccaaatgctactcttgcccaattccagagtcttgaaaacttctccttttctattttcttacttgcataagtgcgggcttcagcttgagcaggggtttcttcttcatatgaagctgacaataagccacatcagtggaaataccttttagtatacagaagagagtattatgcacaattgaattaagtattgactttagtaatgttccatttcagttaaaatggcccttaatgaaaatttatactgtttggatgctggtatctattggttttctgctgttccagttgtttgttgaaggatttagctgccataaaaacatttttgggtctctcccaccctcctccaaatacaccatagccttctttcggctgaggtttaacaaggaactcaagcatcggtaattcttcactgtccacccagtgaatgcaattcactgggcatgaatcgaccgatacctgcaaattttatgaaatgttacaatttgtattacaactgagcagtaaagcttgtgtttatagttggtaaaatcttattttccgagtttgacgatcacagtagaactttcattctttgcttcttgatgagcaggatataatagaagggttgagctgtttcatatggcataatcaattgcttaaattgtgtgagcttttattagtagattatgtttcatgttcatttgagagttcattatttctttaagaaagctatactagttttgtgattccaaattatagcttctttacctcaatgtttcggtcattgtccccaaattgtaccttaaccctagcacatccaagagtttcatccatcatgaatgtcttacttgcatggtgaacacagtctctgcaccctgcaaagtgcgaattgtgagaaacttgggaagctaaaaatggtaggtggaagaatgatcatcaagaattcaaccaagtttaaataaacctatgcatgcattttcatctacaaacaatgcttgggatcttaagggtccattccaagtactgtagtaatccaagccaggtctatttctgctgaagtttcttctattactcactacttcaccaattgaaacatcatacttgcacctttcatcctctctcatcagaacattataggctttattcagcataagagtgtactcatgcccctacaaaacaaaatacgtattcagaaattcactcaagcagttagacacaggaataaaatatatataaataaatatctactttataggatgaccttttggccagcaatatctgggtgatacttcttttgcaaattcctataagcttgtttaatctcatggggttgagaatcaactgaaacaccaagcaattcataataactcttctctttcttcactctcgtccagtcttttccattacagcatctgatcacagagtacttctgtccccatcttaaataataataattataaatttaaaaaaaaaaaaaagttttaatttgctgaatagaatcaaaggagttaatagtgaattttggacagagttatggtttaataatgaacaataatgcttagtgaatgtcactataaactgcaaccaaattgagctgtgaaaaatctg

SEQ ID NO: 48018 - DNA, 2092 bp, Cannabis sativa
ctttttgccatatagataatgacgccaaactttcagtgcaaaaacaactgctgctagttcaatatcatgagtaggataccgctgctcatactctttcagttttctgaatgcataaacaatcactttccagtctgcatgagaacacagcctaacccctatttggatgcatcacaataaatcacgaacttttcatcactgacctgtaaagttagcacaggagcggtaattaatctttgcttcagttcctgaaaactattttcacacttatcagtccaaacaaacttgcagttctttcgagtcaattctgttaagggcgtaaaaatcttagaaaacccctcaacaaactttttgtaataccctgctaatcccaagaaatttctaacctcaattgctgacttaggtcgaggccagtcccgcaccgcctcaatcttcaccggatccaccaaaaggccatctttattcaccacatgccccaagaaactcacttgaggcaaccagaattcgcatttctcaaacttgccatacaacttatgttccctgaggcgttgcaacaccatccgaagacgtctttcatgggtcttttctgtgtcagaataaattaaaatatcgtcaataaagacaataacaaaatcattcagaaagtctttgaacactcggtttatcaaatccatgaatgttgtcggggtgtttgttaatccgaaagacatactagaaatttatagtgtccatacgatgtacgaaatgctgtcttgggaatataacagttctggggttattgggtgtgctcaaaataaccgcgtttttgagtgagtcatctgttgtatgactcagtgaacaaggaatcaactgtcgtttgactcaaggtgaaaggtcagttttaatcataggtaatacttgatttaatctcttgttgtgtgtaggttaaaaggtaaattccttcatatatttatatatatttcatgatgaaacaataagtgtatgacattgtaattaattgtaattacttaggtcagagaccgtttttgattatacatgacagtgtacgacttatctatatgtattcgcattgatgatgctttaactgggaaattacacatttatctatacatagtaacaagaaaaattaatgatccacctggaaatttataaataaatatatacaatttatatattaatttttaataaacagttaacggtgatatttagctgacagtataaattaaaatataaataaattttattattaattatttttaaattaatgaactaattactaaactatatgtcttgtttttatagtttcaattacttttatataattttttaataattacatatataatgatatataaaaaaaattattaacttgagttattaaaattaaaaatttattattattttaattgacaaatatataattataattattattactaaatcatcaaactttttaatatttttttgcttttagactatctatttgtatttgtcttgcttaaattcatattttgcatgttgtgttatactaatttaaaataatatatgtgcttaaacacatatttttttataccaaatctttgctcgtgactctcaaacttataattttattatgttgtgtcaaaaaaatccagcctatagtgatagagagtatacatccctttgattcaaaatttaacttttatttacatgagtatgcatgtatatatatttataccgtcgtaatgtattggattgtgtatttgtatttttctcaactatgtgcaattgtgcaaaaatatatataaagatgtaaggattattcaatatttatatttaaatataattatgatggttatattattttatgatttgctataatagattattaattggtaaattaaaattttaattttaaacttaattaattataattaactatatatttaaaataaattaatttttttaattaaaatattttaaaagatatttttataattaatatttataaatgaataaataaaaaaggttagtattaggttaatgtaatttcttcattattttttattttaatttctaaattaatggcaacactgtttaacaatgatccaataac

SEQ ID NO: 48019 - DNA, 1669 bp, Cannabis sativa
agaaattggagcttctgttacttagcgtttttctataataccatctcgtgagcacctccgtctagtttatctctctagaaactagagcttaaacacttagctttttcttttcatattctcgtgagaaataaaaaagtcaaaatagacgtagctccattaccatcgtgacatggggagtgaactactatacattttgtgtctctctctacattatttactttaacttattaatcatcttgccaatctagcgagctgatgttggctacttttcagcgtcagcatatagttatgaatttatttcacttctaagaatgagtaatatgtgtataattagaaatacataaatttataaattttataaatctatgattatatgatcttatcacatcgataagaagctatgcaataaaaatctaacaataactcaagattgctaaagaaatataatttaaatattttcttcaaaataatttaatatatattatttagacaaataaataaattcatatatatattcaaatgaattatattagcaaaataattatcaataaaaatataattttatcttataaacaagtataaaagaaaaactaaatgaaattatacatatattacttttaaaataaaaaagtattaaaaattacttttaatttttctatgtgcaaaatatatgcacattattatttaagctttataaattaacaataatgagaagaattttctggttcctcaacaaaagttagtcaaattattttataatttattgtgtatgattgatcatgtcaaaacaactcaatttataaacttcaagttcactataatttgagactaagacaagttgtcaacgaagcctccttgaagcaagttgaaaaaagaggtaagttcaaagttaaacaattttacaattctcatttatgaccaatacagttacttatgctgggacagattggaataaactcattatgcctaagcatagatttatctactggcaagtggtgaattctcaacttctaacaagagataacttgagtcagtttatgactttatcttctactctttgccctattttttaatacaaaaatgaaaatcacagccatctatttatgaattgcatcttcgggaagatggtctttaatgaaatcagcatgtggttgggttttgttgactggcaaagactattttagagttgcatcagtggtgttcttcagctatgaatgatcttaaaagtcaaatttgtaatactattttctcttcagctttgtattgtatttagaaaaatcgaaacacttgtttgtttgagtctaaatgtagcatggttgttacccttagctgggagataaagaatttgattaaaagtatagtattgggtttgggtattcataaacttagcaaagagaatgtatacatgaaatcggtcattaagagttcgtaggtggttttggaggtagttcccttgttaggggttgcttttattctctgtgggatggctactgctattgcctttgtttgtaccttgtttggtttttgaatgaagttattgccttgttcaaaaaaaagttcactataatttatatttcaatggaactttcgtaggataatttataaaacaactataaaatataagtaattattacaagttttagtattatatatacgaataaaataatta

SEQ ID NO: 48020 - DNA, 998 bp, Cannabis sativa
atctcattcttttctaaattatagttatcaaacgtggacattccccactttttatatatctacaaataggtgggaatggtttacaatcagtatttgtaatgaataacaattattctatgatccagacctttatcacgtttctaccgaggagctcctttataacattttactcctcaaagaacacactgagtgattgatgtatgctgaatgcagaccttctcacgaatcactaagatggagtaatctttcttattgattggtgagagagggaagtttggatgaagggttcctctccttgcaagtaaactttttcaagttgtacatcttatgtgaactgagtcgaatgcattcaatctcatgacgagcttggcttttctttctgtgtagggtatgccttattcctcgtgatatgcaagaagtgccttattaatgctatatacatctcgtcagttactttgacatacttgatgatcaccgagaagattattatatgttttctctttgcgagaagatcatttaatgtccctctttttccacgtgtcatatagaagaccttttttcaccgctcaaaatacaggtataataggcattataagaaaatctaccctattttattaatacatttaaataaaatttttatcaagaaaataattcattaatcaataccaactaattacaaactgagaaaggttatcatctcataatacaaagactacccttacaattgatataataatctcaaaactattctatccctctttgctacttttcccttgcttataaatgcaactcttgctttgatacacatttttatcaatttttcaatacaaagtatagtaatccctttaaaaacacataaatttctattactccaaatactataaactactgttgtcaatgtagcacttaacaatttttgcatcaagctttttaattgaggagagccaacccaactcgtccatttaaataattatataagggataattacataaggtac

SEQ ID NO: 48021 - DNA, 2569 bp, Cannabis sativa
gatcaatcatggatgtgtagcatggaaattacatgcaatgtgaatcgaacatgcctatttccaactggtcctccttaaaccaaagtgagccaataatactacttatgatcaagtagtctaaaatcggtgtgcaaaatctaaccaccatattttgaggaaatattagactcacacattactaaggtaaaaaaatataacaatatatataaaatttaagaactataccatcctagctagcgttccccaataacattactcatagacaaatgtaaagggcatctgtttaaattatagtgtcattatagtatgagaaatgttaaagggcatctgtggtatctagcactctcctacatattaatatcgctattggttcaattaagtatcgagtcccatataatttaatataataatttttaggaagtcgctaaccaatcacaatgcgacatgtcaagaaggtactaggcaccactagtacttcataacaatactcttatagtattatctaaaacttctaaaagtagagttaaataatggagaggagatagagataccatttgtagttgaagatgcacttattatgtaacaagattttactcattgtcattactatgtatataaacacatgtttttctttttatattgttttgacaagagtatgggatacgtaaatacgatcttgttcaggcatgggatcctttgacagctaacattatttccttttccaacaaaagtgtcttcttataaatacaagcaccagtaataaaaaaaattaactaaataaattgtcttcctataaatcgccatggcatattagtatttagtggtttacaaaaacttgaatagcacttcatgattagttagtgatatactcctaagaactattattctaaggtaagcatttagttgagaggaatgaaaatataagaacatgaatggaaatgagaatagaagttggaataggaatagaaatggaatgaaataaaatttaaaatgcgtaaaaaaaattattaatttttttttcttttgttacattagaatggtcttttcttcttttttaaaatggaatactcattctatcaaaatagtggaaagaacatttcattagaatatcattccaatactttaaaatgcaaccaattaacaaaagaatggaatgaaaattgtttcttttttattccatttggccatttcattacctccaaccaaacatcacttaagttatatggaatccgacatttaattacacaaataataatatgatactgaggaggattaggcaccagtggtctcttttactaattcttttattatcttaacaagattttaataaatatcataaaaagagtgctactgtcaaccccctaatataattttttagtcaacttctatgttcaaaaacacatgcaaaaatactttttttaaaatatttttatagcggtattcattatacttacaacatcattcccgtaaatttttgaatattttacagtgccgaaaatatgtttaaaggtttttaaacgcgcgtggtaaactagaatatcgaaaactctatttttaacattgtaaactattcgaaaatttttcaaaattaattgacaaagatgatattgtaactataacaaatctagctataaaaaaaaaaaaaaaatttctgagatgtaatttcgagcgttaaaattaactaaaaaattataataagagattataattatccgtcctaatatttttttagagaatcgttactttagggagaagagaacacgtgcttctttctatattgttttgatagtaaattgaaacacgttcttccttttccaacaacttgtcttaaactataaatacaacaccaatactaaccaaatttatttaacaaatcaaactaaattaaattatgacatcaattttcttcttccttctctctactcttgttttcataatctcattctcagattcagaagcagccattgttttcccactcaccaaaaacataatcaactccaccaatcactactacagcaccaaaatccaagtaggcactccttcaaccaccatcaatctattcctcgaaatcggtgtacaactcacaagcttcacttgcgacgacacaggttacgattcctccacttaccgtttcataaattgcaacaccaaaaagtgtggacgtttcttgggacccaaccatttatcaggcggttgtcttcagtgtgcttctcctaaaccatggcctcattgctccaatcaaacttgcgctttagcatttggagataccggtggattaagcgaagatttcttcaagctcaaaacgacgtcgtcgtcctcctccaatctccttcaaaattctcctcgtcgtcttcctttcgcttgtcttaactccgatttcacaatcggtttcatgaatcgtcttcctcttggtactaaaggctcacttggtttaggaaagaacccattctctttcgttgcagagctttcttcggcttttaatcttcctaagaaatacgccttttgtattccttccaatactaaatcaactgggaatgttttcatcggcggagcacctcataatttgtcg

SEQ ID NO: 48022 - DNA, 2874 bp, Cannabis sativa
ccatgtgaccatgcaaataggtcccggtttttctttagaaaccttattagtaatgattttatttatggtactaaacccttcccgatcataagtcttttagttggaaaagttggataaacctccatttcctccaactcttctacatgtccaaatctatctataggctccccaaagtgaggatctatatatgcgtccctactttaggctggacttcattgcccttcgctgggctcttcttcaaaactcttgacaagcatagtctctttcgtggctttggacagggccaagttgtaacagtgatagacagattgttggtctctctttaaacatcctaccccatcccttgttgggaattttaggcagaggtggcagatggatgttaccgccttcaggtcgtattgggctggtcagcctatcatggcattgaaagtggagggaacgtctattatgacaaactgtgccatcaaagttttggtggttggattttctccaacaatgaggggtaatctgatatatccaatgaatgcgatgcgtggccaaagaagccatacatcacttgactgtagggtgccaaatcgataagttggagacctatctttttgtatgttgatttaaaaagaatcttagaggaggctccattgtccactatgcatcttgccatagtcatattctcgatttgtgcagtgatgaccagtgtcattgtgtgagaaactaacttgggtagcatctccttctatgaaagagatcgtgggttctccaagatttggttgcttatagactatatctttgacaactaggatgtcacttttcgggtcgtgacaaagtgcccgagcatagtgctccctagctttgcttgtctcacctgtaatatggggttcaccaatgatgacccctaagtgactttccactaatggtggcatttgatctctattttgggcaccttgtgctggagtctagtcggtctgcacataacgacgtaggtggggattattcttccttatgaagaattcaatccccctcttcaaattttgacactccttggtgtcatggccaaagtcgttgtgaaacttatagaacttcgacatgtccctcttgatcaattcccttttgatgggaaggggctttctatatgggactattccttgagtggccgtgaagatgccctcaggtttctttgttaagagggtgaagcatgtatacttctcctccttgtcctactagttttgtggtgatggagaattgttatactttctctttttgccaccatttcttctagagtttttgttgttacgctttcttttagagtcattgccactggaggtttgggcagaaatgctagtacctgcatgtgtgcttggcaagtcatggggctacaagatgccttgtgactgcctatagctgacttgccctatcttggcttgtcggagaacttcttctagcttaataaagttgttagctttattgaggaagtccttcattttgttagtagagatcctctagataactttccagaaatcactcaatggaaggatgccccaagtatagtcgtatatcggccttctcttataaggcctttgaccttggtggcctcgaccatgaacctctggatgtaatccttcaaaggttctgtttgttctcgtttgacttcgacaaggtcttctagctgtgatggtatgagccttgaggacgagaattgtgtgtaaaattcttaggaaaactcggtctaggaattaaatcttcctaaagcaagtttgaagtaccattactaagccattgccgaaaaagatactgagaatatgcgatgtcacacatcaccagtgatcttttggatatcgagctgcatttggaagtacttgaggtaagccgatcggtcatctggcccagtatgcatcttccataccgtcatctttatcttgggtaagggtaagacatttatatatgctgagaatggtgatccccttaaccggtctagcttaaggtctgaaggttttggaccagctaggcccttgatcatgtcccttatttggtcaaactgtgcttgcacaaaaggatccattgctacagggacttgactaattggccctccttggaggggctgcaggctcgaatgtgctagggtctagccagccatactctaggagagtgtatggtcagccatccctgtattaggtagggcatggctgcctataatcccctaattggttgatgtagtcagtgcattgataaaaggtagattgcaccaatttttttggagttaggtggatctatatacctgaagtgatcagtcatacttcttcaaaaattttgggcatttccacccattctcggctctagctagttaaagattggcctttgggtttcttgttctcagatgattcagggagggagctcattcccctggccgatcaaaggtgcaccagtaggtagctagctggccaaaggttggccatcgagttgctattgttaagctcgagatccctggctggcccccaagtccactagctgtcgggatctagttgttctcgccattagacctttgtggaaaggcctatcctcctttggttaggggaaggtttgtcctagttcctaaagaaccgagttggacatctcgtcaatagaccctccccaatctctcgactagtcttccttggagtggatctctaataagatcctagcctcttttagtagttctttgattaaaccaccttatcaggtcgctagcttctctattgcggtgatctagctccacctggtgagatcagaggatgtactcttggtcatccatccatcttaggaattcacgtctctactgagcgaatccattgcaatcagcagtgcatggttcttcagtttggatagctcggcagacgacct

SEQ ID NO: 48023 - DNA, 1254 bp, Cannabis sativa
cccattcaacatgatcaaaagccttggccatatcaagctttaatgccatccatccaaggcgacccgatttacggtgggaagggagtgcataacctcttgaccaatgataatgttattggagattaaacagtttggaaggaaagcactttgagagggggagattatgcgactaagaattggtttgagacggttgaccagaactcgagatattattttgtagaacgtggagcaaaggctaataggatagtagtccgttatctgctcagggtttggctttttagggataagaacaacgagcgtattgttgatctcccctatgtccgcatctccattcagaatgctttgggcggcgttaatgacatccatacccaacaaatgccaattcttttgaaagaaacaaccattgaaaccatctaaccccaacgctttatcgtttgcaagttggaatgtagctttcttaatttcaatagcagaaaaagtggcctgaagaagttcaacttattcctcagtaagacactctgtaatgcctgataagaaagagtcgatgatatcgtcctcaggtaattggctttgaaatagttgggaaaaataatgctcaatggttgacaaaatagaagtagtatcatttgccgtggaaccatctgagcgttggagagaatggattttgttagtttgacgtctcatgaaagcgatacgatggaagtaccaagtatttttatctccaaggcgaagccatgtgatatgggaccgttgttgcaagtattcttcctcctcatgtaacaagctgtttaattccctttcgagagttcttccccaatctaattggtcattagtgggccgagggaaagattgaactagtttgacttgagattggatttcacgaatttgagtagcaagaggaggtcccaaagatttcttccaatgtttaagacatgaagagcaattatgcaatttttcagtgagtccaatcaacggggtatgattatgaatctggttgttcaacatccaagtgtcacgaagacaatcctcaaaaccaggctcagacatccaaagcttatcaaagatgaatctgggggcaggattagcctgatcagctgggttatgcaaggtgataattaaaggccgatgatcagagccaaaaaaactccatgaagaagacgaggattagggaaatttatatcctaatcagtattggagaggcaccaatcaaatctctcttgggtgtgagatgactgtttttgtcggctggtccaa

SEQ ID NO: 48024 - DNA, 1752 bp, Cannabis sativa
aaatatatgtttataaataaatagatactaaattatttaaattattttaatttaattgtatattcagttaattatctaactattataatttatttcttattaattattaaattctttatatttatttattaatcatctacttatttatttttatttttttgaaaaaatataaaaaaaatatcttacctttttacattattataattatatttttttatatgattataaataaaaatatatttcattttttaattaattttatatcattaaataattatttaattatctatctatttattatttgctaattacataaatctttattatttttttttcaaaaaataaacgaaaatgttttcttgtttacattatttaatgttaaactttatttattaaattttttaaataattactaatttaaaaaataatcaattttaattttaattataactttaaaataattttattataaaattaatagttaattttaaattatcaaattaacataatttttttattatctcaaaattttattaaaatttctacaacataacatttacattttttaatatctaaaaatataaaaatctactctaaatactccaaaaatttccaaatacatcacacttttatactatttttacataaacaaaaattacatcacagttttattaacatttacaaaaaaaaaaacttacatgcataatcagattttaagtttaaaaattataataaatctgttttttaaaaaaattatatacaaaaattatttttatttgtaaaacaatttaatatattacaaaaatgacaaatatttacaagtaaaaaaataaatatataatgataagtataagaaaaaaaacaacccttacagtgacgattccaatatggagatatagcctgagttgcttatagatagtaacacaataatatctacaaaaacttcaacccaaaaaataaaaataaaacattaaaacaatatataaatacatattcaaaaaatagtatataaatataaccaaatatacatattacatataatttttaaagaaaataaaaagacattacctgaaaatggcaatggtgaggtggttcgatgactttaaggtggcggtcgaaaggaccccacagggtggtggtccgacagttggtggtgatcacaatgtgttattcgggttgttgaagagaatgattttgatgaaaagaatgaagagaaggagatgaagagaaggaggcgaagaggaaaaaaattaaaaatggctttactgaaatgggggaaaggtttttgaaggggatcaacatcaatttttttaccaatgacatgccaccaacgacaatgtcattggtggctgccttgggggaaaactggcgccattttgcaacgggtataattcaaaactaatcccaacgacattgtagtgtcgttattgataatggcatcgttgggattagttttgtcgttgatgattgtaattttgaaaaaaaataaaagtaccaatgacattgtagtgtcgttattgataatggcatttttagtgaggactttcagccgttagtaataggggcgttggtatgtcacttggcagaggcggtgacaatgtcacttggccgaggcggtgacaaggtcacttggtggaagtggtgactgtcatattattttatataatataatatttagattaaataattaagttgtaaataattaagtgtgacaaagtattaattttttcaaattgtaacatacattatgga

SEQ ID NO: 48025 - DNA, 1411 bp, Cannabis sativa
agtgatcatttggagtttcttctaaaaaaaagttttggctccatgaatgctagaggaattgaacccaatctaaaaaagataaaagctctgcttgatgatcatgccttcactaaaaaatcataagaagtccaattattgactgaaaaaatggcaggactaaacagattcatttcaaaatcaacagataagtatctactattttttaacgtattgcgaggcaacaaaaaatttgaatggactgaaaagtgtgagaaggcatttcaagagattaaagaacacatcaaatccacccgtactttcaaagcttgtgaccagcgagatcctgtttttgtatttgtcagtattagaaagtgcaataagtagtgcaagaagaaggaaatgccagattgccaatatattacgtatgtaattgtttactggggccaatatctagataaccacctcttgaaaaactcgcatttagtctaactaatgtctcaaggaagctaaggatcttattttgaagcactctcaattcatgttttgactaatcatagggacccacggagtcggttattttataataactgactctatagggttcctacatcatcgattatttttaacccctatagtgtcacctagaacaacgtcggtagcgaattttgtcaaaaccgacactgaaagaccttaaaaactgcctctaaagcccaattatataataatagtatttcaatagtgtcttggcttaaaattgagaaattggatctcttaataagaatgaggctctttacatacattcagcaatttattctcgatcgattaacaataagttgttgatcaaaatgatgcaggtagattattctagggctagacatatgagtactaattctttgtcaaagaaatgaccaaattgacatacttccaattttcattattggacatagactcattgaccttatcagcaaacctatcaaacaattcatccattatagtttctccaaattgtgtcaccaaaataggctctgcaacagctcttatgtaatcagacacatatttcccactgttatgcttattattatcaatattatcactatagtgatgaagcttgcatcccaatctcttttgaaagtattcagcttttgtcactataagaaatgagagttttgccagcacaaaaatgtgctggcaaaacttaggtattatgctggtaaaatataacatacttttgtcagcatatttttgcgctcgtaaaaggagttggcaaatccatgttggtattgaaacttttgtcatcacaaaatgaaaaatgctagcaaaaatcactttttccagcgcattttcgcgctagaaatagttcaacttttgccaacacataaatgcgctaagaaaaatcttacttggcccaccaatgcttaggaccgactctgat

SEQ ID NO: 48026 - DNA, 1640 bp, Cannabis sativa
agatgccctaagacataattactgtatatgttgttgtatgtaattcccaacatacgtgatcattatattttcttaaggagaaatccaaaatttaaattttggattacaatattactcctctaactgtcattatgataggtcaaaaattattttaaactcttttagccatttttactcaaaaagaaaattagtgcaacccctattttctcctaaacccttcaaagaactctctaaccgaaactcgatcactagcaccctttcaagcacatttacgaacttccaagccatgagtaagttctcttttttcttttcatgcaatttctttaaatacatgtaccattattttgaattgctttgcgaaatcaagattcttgaaattgttcttcgatgattcgagacttaaacttcttgaaatgtagacttggacccagacccaaacccgaactcggacccagacccggactcagctccagttctagacccagtccccaaacccgaaccttggcccctagtccctacccaagactcagacccgaccttggacctagatctcgaccccgacctcaaatccagactccgacctcggacctatatccagaaccaaactcggactccagtgtcaaacttgttctcggccgcgaaccccagccccgaaccttgatctctgcctagggcttagatcctagccctaatcccgactcgaaattcgaccctaaacctgttccccagacccagacttggattcggaccccggctccggacttagactttggcctgagtccaaacctagaccccagactcgggacccaaactcggacctagatctgacttaaataaaatcaagaaaataaaaatgaactttacagattatactttaattttttgcttttaaaattaaaaaataaaagtagttatagaacacatttttgtttttaaaaaataatttacaaaaaaaaaaaaaaatctactttcattttgtgattaaaaaaattaaaaaatacttttgtcttttaacaaaataaaatataaaaaaaatctgacttaaataaaattaaaaaaaaaaacgaaaatgaactttagagtatacacttttattttttgtttttaaaattaaaaactaattttttttatagaacgcatttttatttttcaaaaataatttacaaaaaaaaaaatctactttcattttgtgattaaaaaattaaaaagtaaaagtgttactaaacgcactttaattattttacttcagacatctttccttaactatacctacatttagttataactatttatgctctaaagactttattagacatttataggatctccaaaaaagactccattcgatgggggtgtctcggagtcaattagaacgtgacacgtcatttaataaatgtgtatttttttgagcgagctacaccaaattattttgaatatctttttttaatattatttttgaatttgtttttaatattttattggtcttgagaaataggctacttttttacagaaaaaagaatcaggagagagaaaaagtgttcttaattataagtgtaatttgcgccaaaaccccctcaactatcaatttacttgcaaaaaaccatccaacctcatattttggtgggaaaaccctccaaagt

SEQ ID NO: 48027 - DNA, 1229 bp, Cannabis sativa
attttagaaaatacatagttcattttgttatttaacaaaacagagggtccaattagtaagtccaaaataatatttatccttctcaataagaatatatagtgcaaaactaaaagaggttgatcaatgaatatttttttctttgataaaaaaaatttattgtctatctctatataacataaattatatttttttctaaaataaattactttcttatataatataagtccatatatacttaatgaaattggtgtgcattattacccatattcaaatctctcttaccctaatgtgaaaatatacatatatatatatgatttttttacaccagaaaaaattcatattcatctattaaattatacaaaaaaaaaaaaaaaaaaagttatgaattcattaatctacttttaattatttttttctgaaaaatattaataattagaacccaaacacatcattcaagttacatatatataagatgtaattaagcctatatgattaggattagggttagggttagggttcagtatatgaacactgtaattactaatatcgatatatataattaatgtggccttttaccagccgaaataggaagacttttgagaacaactaatgtgcctcgaccacacttataataccaactcaatatttaatttatataaatatatattaattaaacaagtatttttatatgtaacattttataattggtagcgatattttttaaaaattatttttttaaattatataggattcaatacttaatcatattaatagttgtatatgaaactaaaatattatacatcaataatatcttttaacaattctctaattaattaaacatgcttgacattatttcctttaaaaaaaaacatgcatgacatataataaataaaataaataaataaacacatgctaaagaagagatcatttttgttagagtagacttaatgataatgtccaatcaatttaattagattattaattagctataatatgtcgaacccacttaaaagaaaaagtaacttttaaaaaaaatatataagaactttcactatattgcactactataattaggtatttttacatttctatctattttggcattcgaaaaaaaaataatctacttattttaatgatctggtaagttataattttttagagtctcatgtgtaaatttttaaaaaactctaagtaatttacaatatcgaaaaataagatttacatatttt

SEQ ID NO: 48028 - DNA, 1245 bp, Cannabis sativa
atcatgcactcctctatgttatagaaactctaatcaagactccaaatcttcatcttgactactctttgtggctcactcgaaatgctttcaagagcccttttcattttcaattgcggtctttgcccattttggtttcttatcatgcttaaaactatgttttctcttttaagtagacactctattttctctttaagggttctcaaatctatgcataaacactagtcgaggttagagatgttacatcttctgactattcttcaaaaaatattggaatatacacagtctaatcattttatgttttgtatccaacttaaaccttgaaattataagtacattttgacagttgactttgaatcatacatagtctcaaagctccatgtaccaaatttccattaattctacattccaattgttaatttactcaaaaacctaatttactcacttaaaataaactaaattaaaaaaagagaataattgttatgatggaaagtcagaagtagctggttggaatatcataataaaattgatcaattggaatccgaacgatttctttcatcacccaaatccatcataacctttaatcccttttttaatttcaaaaattgcatctttaataaaataaattacatttcactaaaaaaaaaatatataatactattaaaatttaaaatacttataaacaaatgttctatttctataggctcaaaaggctcaaactttaacaaaataaaaggcctcagagatcttggtggaaaaatatcatcaaatgggtgaaaaacccatcaagagtagcaaatattaagaaacatcacaagcccttttcttcaacttcaaaaatattaaaaatcaaatctttatcaaagcataaattcaaaaaataaataaaaaactaaaattggttatgatgaatagtcagaagtagatggttgttaatatcataatagaaaattgatcattgggaatccgaatgatttctttcatcactccaaacatcataaccccaaataataataataaaaaccctaaccctagaattgaaaaatcaaaaatcaagattcaaaattgtatcaaccttgtcaccgaataattcctgggaaaataaaattgaggaagaatcggagctaaaggttgaaaatacatacagaattgaatgtatgtactttggctttactctagcctaaggatagattctttgacctatgcatattaaatactagatcaaagaattgcaatgttaggcttttt

SEQ ID NO: 48029 - DNA, 1020 bp, Cannabis sativa
cggaaaggtgaatagcctaagatggtctgtataagcaagagaggatgaaagatggtgcttgccttatttgtccttgatttctttttagtcacatcgagttattcctcaaaggcaccctctccctcgtctgcaggcgcctgcgctcacgccttctccctcgcctgcatgcgcctgtgcttgctccctcgcccgcaagcactcgctcccgctccctcgcccacagtgcgcccgtgcctataggtgcctgctccctcacccgcagacgctcgcgcccgcgcccgctccctcttccacataggcgcccacgcccgtgctactccctcgctcgtaggcacccatgcccgcgctcgtaggagcccgctccctcgcccataggcccatgtctgcaccctcgccatgcacccttggtcgggcctctcaccagcgtccactcctccaaagacgtcaatactctgctggttcctctttccttgctgacaccagtaaacttggcaagaaagtatcaggcgagataacaacatcactataagtataaataacggggacacactttattttttctaaagcacaaaatgaaaggggcatttttagtgtaacttagaatttcagaggtgtcaggtcacttaggatactgtattgtaatgggtgaaagtgacttgatatagtatgtattgggatatgttgggggtacaaagagaggagagctcactataaatagagcccttgaattcattgtaagggaactttttttttttttgagaaacatttgaatgaaaaaagtgatttttctagagagtgaaggttgtaagattttgactttaagtcttctattaagatttgaaaataccattttgggttcttgttatttcgttgacgagttcttactgtcaacactttcttaaacatctttgtagaaaaatgctaagtgttgagtgatgatgcatcttgcaatcttccttaactgtttgagtgaggtataagcaagattgttactttaacgtgttaagagcgagatgaatg

SEQ ID NO: 48030 - DNA, 1525 bp, Cannabis sativa
gtagtagtagttagccttagagacaaatctagatcattagaatctgatgaagctttccttttcattgaagaagtagaagtagtagtagtgctaattactaaatcagaatgtgtaacattattattactactagtaagaaaatttgtgagctcctttggtttgttcacttgaagatgagcaatggagttttggtcaattagggggcttaaagaagaggaatgatcatgatcaataatatctttgatgatgagtttgttattatgaactttatttctccaagatgatgagtgttgatgattattgatgatagaagaaatagtactactaatgttgtaattttttgaaggaataaaattgcaagcattattagtattattaatagctaagatgttcttcctttcagcctctgatgaagcataaaatccagctctagaatattgccttaagttgccaaaagaactagttgtacttatccatgaagggtcaccaaatccatatctagggggaatataaagaaactaatcaatatattaaatatatattgtaaatttaattgatgtttatcataattaatatttacctgaagcttgaactatggctaatttgtttgtatccttgaagcataggaagttggctgaaattgtaaatatttctatctccacattccactagatgcctatgatgatgatattgatcatgtgagccaataactgtgtcaaaaaacaaaatccatatataattaggatatatataaacctaattaaacccatttctttcatcaaattagaccttaatttaacttgtagtaaaaaagaaatccatgtaattatgtgtgtaccttggcctgcatcatcaatcttcttgcttctatacatctataatatgaccaatcaaaaacccaattacaaggaaatcatatatatgaactataccaattaaaatttgtaaaaaaaaaaaaaaaaaacttaaattgatgaataattaattacctgtaaatggctcttgacatgagcaatacttaatcctttaatattcatcaattgaagaaccaacttgggtgtagctcctatacatatatatacatattaaaatcaaattaattaacaaatcaatatatatgtatatatatatagtacttactttcttgtccaccgagtctttcaacagcatgaacaaaacgaagatgaagatctggagtccatcgaagtcttggcatcttggatctaacataaggcctaactgatgaagatgatttattgaccttattattatcattattgtcttcctcctccactgtgctattgcttgagctcaatcctccattaatattagccttattctcttctccactttgataaacatgatcttcatcttcatcttcttcatattctaatcttgtctttgaatactcagaatcattaccactactactactactacttattgatctactattaatactgctactcttaatcatcatgtaaagattagatctttaattaccacctaataataacaagcctta

SEQ ID NO: 48031 - DNA, 937 bp, Cannabis sativa
gacaagaatagtaagtatttccatgctatggctagttctagaaagagaagtaataagattcaaaaacttctcaatccgaatggtgtttgggtcgattggaatgggggtttggatcaattgattacttcttattttgtttctctttatactgctggttcggccaatatcaatcaacttgttagtggaattgtgtcttcggtttcaccaactcaaaatgctgatttacttgttgtgccgttggataatgagattcgaagtgccttgtttcatatgcacccggataagtccccaggacctgatggcatgggaccgggattctttcaaaagcattgggatattgttggtggtgatgttatcaatttagtgaagaatttctttgaacacaaagttcttcctggaggtttaaatgacaccaatatagttctaattcctaaaaagaaaaatcccacagccatgggagagcttagaccgattgctttgtgtaatgttctctacaagattgtctcaaaagtaatggcgaaccgaatgaaaggtattcttgatcatgttgtttctgagactcagagtgcctttattcccggaagactcatttcggataacattatggtggcctttgaggttatgcattttttgaagaggaagacatcgggtaagaaaggctttatggccataaaattggacatgagtaaagcttacgatcgtgttgagtggtcctatttgagagctatcatgatcaaaatgggctttgataacaggtgggttgagatgattcttcattgtgtttcttcggttcaatattcggttgttcatggggatcatgttatggggcctataactcctacccgtggcttacgtcaaggagatccgttatccccttctctgtttattttgtgtgcggaaggactctctaatttaatcggtcagtttgtgaggaaca

SEQ ID NO: 48032 - DNA, 1042 bp, Cannabis sativa
ttcgggtctaggtcccgagtccggtctggtcacggtctagctcgtatcccatctgagtccggtctgggtctcggtgagagattgaggttgaccccaaatcttttataaatattataatacaaaacataatgttatttatcatttaatacaataccacctttaactgcctaccaaacgacccctctaatttaaaccagataacaaacactctataagtttctgttgaacttgatgactaaactccctctaattcaaatcgcataacaaatccatatttgaacccaacccaaaatgtataggaatttttttttcttaaactaaatatataaggagattttaagaaaaatatgtaaaaggtcaatattattttagattttatgtattgccaaaattattgaatggattctttattttgtaaaataacacattatactctaaaaaaaattaattcaagatactcttgtcattcaataaaacaaattgtcatttatttcctagctcattttccggatatgagcaaattaatttggtaattcaaaatccttttaatgtaattgattacaaaaaggattttccttagcacattaactcgtaacactattaatatgagttgactatatgataatccctttataacataatataatataatataaaacgccctatattaaagccaaaattaatctatatatattataatgcttaatttccaattgtaataatcattaattaataaaaaaaatcatatttcacgagaataatttatggacttaaattcagaatattatagattcgtgataaacacacaattatgccttaaaatatatgatcaccccgaaaccaaagtatccaaatatatatttctttaatttaataacatttattctcaaattaattttaaaaaaaatcaactacacatacacatatatatctttactagcaaaacgttacgtgcgaggcacgtatactaaattttatgctagtttttttttacgttattaaaaagtgatataattacaaattaaaaaaaatatatattatt

SEQ ID NO: 48033 - DNA, 1097 bp, Cannabis sativa
aattaggcgacggtttataagtgtggagaatttttttttttaaaaaaaaataatgcactattcccgacagtttaaaaacgtcgggcaaaatattagccacgattttaaactgtggcccatactttgcccgacagcttaaaaccgtcgggaatggggctaataaaataaaaccctcttcactctcatcaagatattagacacgctcaactttcttcttttctcattttcttaatagcacccactcctcctcccaccatcactactcaccaacaaatagttctctttttcatttttcttcttctcaacttctttctctttttttctaacctaaacgggtttgctcttcttcgaacccagccacgattgttgttggtttttcctctaacccacttcaacgccgatcttgaacccaggcccccgtgctatcgttgttgtcatttgtagtcaccaccgacagtgtgggtcgtcccaccaccgacctcagatccctcccccgattctcactcccttatttcttctcgatctacttggatagttggtaatttttcaaaattttatatttatttttctgtattttgccctaatttttcaaaattttaaaggatttttatttgacttaggaaaaatagggattgttgtgtgatgttgtggtgtggaaattttcttattcttactatgattatctctttgatgttatgatggtggtgataatgatgtgatggtagtagttatggtggcagtagtggcgcctcactctgtcaatctcattctctctctctgtagctttaacgatcaaagatggtttttttattttaacatttttgttaaaattggatcatgtggtggtggtgataatttgattcttagttttagtttctctaaactaacaattaacaagcttctagcattatgtttagaggataactatatgtttcagattagtttactggtgatataatatgctctattttggtaaagttccttgaactgctagtgtgaattgggcaagatgtctacttaaatgaggcatgcattcttttaagacttgtatatattttaactgagtgccttgtgagtattactaaatttgtatcata

SEQ ID NO: 48034 - DNA, 951 bp, Cannabis sativa
atactttctttaaacacccaaggacctgaaacaaaagaatcaagcgtaaaatagccctaaaactagaaacaaagagtgaaaactaaccgaaaatataacccgaaacttaaactaattttggcctaacaacttgaaaaaaaaaagtagaaaacaagtgttattctatacaaaatgaatataatcaattaaaacaaatctctaaaaacactttataaaatgtacctaaactagcctatcatggggagcgacctagtggactggtagcggggagcttaacccgtggctagacacctccttgcactgggttatttactcatgtggggttctatcgtgtgcgatgagcccccttttttccctttgacacacctttcaagtgtgttttaaaattttttcttcgtttaatttagaaatctaaaaatttacacgtaccgaattttggtgggggtgaacacttgcctcaagtatataagaatttttttaagtcctagactgagtttggtgagcttcatcctcatcgctcggttctgtggtcgcccctttaggcagttatgccctgaggtccttttaaatgtcctttcatgggagagtgttggctctttgagctatctcgaccctttttgttgcatgcacacttgttataatgggggagtttattgccatttagaatttctagacatctttacctacgtaacttttccattaaaggagtattgactcttatagcagtctcaaccttttcccaagttaccattgaatgtaagggagcttttagctccttaagcaacacttaactttttttgagataaaagattttattggaggagtaggcagcgcttaacgccttctactgcatttgtggtacttagaacgcatcttgaatatttagaattttgtactctttctagagaagcatccctcttatatatgtacttacgtttttttttttttttt

SEQ ID NO: 48035 - DNA, 1847 bp, Cannabis sativa
aaattttgtaagatgtctaaaataattagtcgactataaaaaaattagattaattttttttcctctaaatatcaaaatatataagaggtacattgatgaacaacttttaagttgtgattatagaattttttaatgttatttatttattttatatttttaaaaggtatgattgtaagttctgtttcactccaaattacgtgttggcccacgtggagaaatgccattcacatagacgagctgtggctcgcccttttgctcctggttcgaaccaaaagttcgaaaccacgattaatacagaacagagcttagcttagcttcaaaaaatccttgaaagctctctatagaaagcttatttaaatcttactctctttctctccacaaagccatggcaagcacaagtacactaatgccatttacaaagctgaataataggtatctttttcaaagtgccacacagaagaataacatttgtactccaccttcactgaatatactttttcgtagaccaaacaaattttatgggataaactcagataggtttgttgtattttctcgtttcaatggcccaattgacgataaaagccccttgctcaacgatgatgtctttatttcttccagcaatggtagttcccagctcaaagttcattcaaggtaatttagtactatggttttgtatttggtctaaattacattttgggagagagaaaactagaatgactacatacttattttttatttttactattatatgtactctgatttcatatgtggaaagagtatgatgggtttagattggattgtacttttttatgttttttgtgttgacaacatgttggaaaattggaaaaatgaatcaacatattataataattccagccaatctaactggaatagtataatttaatatttaaatttgatttataattaatccaactaactaaataagatgaatgaatatatgttacgctcattaagatgtctgaggctgtagaattttgttaagttctcaaaatttgatgttattgaataaatgtcacattatcttgaatttgttaatgttgtttaaaatgttcagcaatgatatctagactttgtttgcttttcatgatttgtaacctcatttatgtatgtttcaattatttttgcagtatgtggaagtggaggggttattcaatccgatatcagtattcaggaaccagtggccctgcattagtattgatccatggttttggagctaacaggtccacattttgtttcacttagcagacaaataaatttctctttaggtattttgtgaattaaattgctcatcctatacatctatactatatctatatatataacatacacaatgaaccaaaatatattaagttttctctctactataactgttttgaaaaatgcaatcattcaactaatctccatgtaattctggaaagtaagtttacttacatgtacgtaccatattcttaacataatttttctttgagaagttaattcatgtaaaattaatgactgaaaataatcacattacatatggttcatttttggataaagtttttgcattacatatacaaaactgttgtgtgataagctttacttagttataatctttccttatcttagaacacaaacaatgactgaaattcccttgacttcttattgataaaaaccaaagaaatcacattagaagctttcgagaggcttgctctctcctatttccaatagtccgagagattaggattctttacgatgagattaatctctaatcattccataccccacatgaaaactgttgacatctataatagtctttggtacatgttatctcagcctaatatcctaga

SEQ ID NO: 48036 - DNA, 1520 bp, Cannabis sativa
cttgattactttccattgtgttgatgacacaataaataagaatatcagtgtgataaggatttggatgaaatattaatcaaataagtaaataaatgatcatatgaaccaaattacacattaaacaagtaataaattattgataattgaatagaaatgattacattaaaatagagttttatttagggcacaaagcccaacaaagtgttgtggaatctacatacctctcttaagattacaatataagaatggatttggcaaatctcaagtgatggaaaaagtctatgcatgtgagagaaaaacagaagagatgactgtcacttagagcttgagagttagaacagatacttaagacttagagaggtagggtttgactaatgctctttgtatagtagagattacatccgtcacatcccttcaaaataggtaaataaagctatatttatataattaattaataaagttcaaatgactaaattgccccttaaaaattgggaagttgctgatattttctctctattttcgtggtttgtcaaggctcaatttccagcttcacttacagtccacggatgaatgctgcgcaccaaaatcatgtcatgcaaaagctggtcggccacacagtacttggaagttggccggcctatgctggccatagggccgaccaggtttggccggccagtccccttgaggtagttggttcttcaattcgtcgtctctcttaagtactaggacaccttgttggtttaagtgctgagtagatggcttgacattcttgttggtgagttgtactctcacgtgatattaatattggtcatatgaacatgccacgtcaggtggtcaaaaatttgaataacatcctattatacaattgtgatatatttagtgttgcgattactctcacatctaaatatatatataaatatatataatatatatatatattgtattttaggtgttgtttatagctttgtgttgtaattttctttttctttttgttatttttttatttagtatttgtattattatctcatcaatgtctttatcttatattatatgttattcttgtcatagagttgtaattcttattttggtatttttattgaagtacaataattttccaacaccccatggcggaggctgtaaagaccataagtggtttttagcatttctcattttaaatacatgacttataagtgttgcgctgcccatttatttatgtatgccgactccacaacgttatttggaagcatttcattatttatatgcgtacagcgtaattaataagatttatagtatattattgtaatatgcatatataaatatttgtttatttgatgtatgagttggagtacgtcacataatttttattaataatccagccttatatatagtactcaaaatatgatagatattaataatttgataagagaaatcgtggtcggtcaacacagccagcaggttactttcatttaacaaacttcatgcaaaaataaaaactagaattttataataaatacttgagc

SEQ ID NO: 48037 - DNA, 1680 bp, Cannabis sativa
tctctctctctctctttctagtctttctgatcttccttccctttactctttctccttcttctttctatgtttctccattgttgtttctttggtgtttcagctatgagtagaaggattaccaatcgtaatatggtatcaaagcttaatttcccccttgaatgctaacatggcgactattggagctcaaaaccatgctaatccgtcgaatctgggaaatacagcaaactcataccctacttctcgaggaaattgcaatcatgcgacaaagagttctctcctgtgtgtttctcccataatctttcggttaaacttaacgatcacaacttcttactttggtaacagcaggttcttccagcaattcgtggaaatcgcttgctcaaatttattcaggatattgctccacctctgcagttcttgtctgatgaagatcatgcatcacaaatgtacaatcccaagtttcttgattgggatgttcaagatcagttgctggtttcgtggatcttatcatcaatgtctaaaagtctgttgacacgaatggttgcctgtcacacagctcaccaaatctggtccacccttgagaaacacttcacatcgcaagtatcatcgaagattcttgaattcagaacgaagctgcaacatctcaagaaaggcactcaatccctcaatgattacttactcaaggtgaagcaacatgttgacttgcttgcctctgttggtgaagtcctaagtgactgtgatcagattgcaaccattttcaaaggacttccgaaagcattgcttcttacttgagaatcaagagtcgaaaagactgatcaagaacctgaaattaatgctaaccttgctgtttttgatactcactagcagcctaaagccaatgttgcttatcaaaatcgattcaaagctagttttcctcccagaaatccattttagtttggtacttatgcaccaaattttcctaatccaagaggcagttctccttctcgaggagctcaatactactatcccaatggctttgttccaagaggatatcactaccaaatgcctcagtacaactcttcccaacctccttaagctaatcgcagaagtgctaacagaggaggcagagttactactccctcaggctgcccacaatgccagctttgtcacaaaatagggcacacgattgttgattgtttttacgaattcgacaagagttttactgatgttcaaccaaacaatgttgccctttctccccaagccaatctgatgcacacttcgaatcacaatgacattaattggttatccgattctggggccaccaatcattgtacctctaatgctcaaaatctggcctcaagttccacttatgaagggtctgaacaattgtttgttggagatggtacaattttttctattaagcacattggtcattcctttctctctaattcatccattacttctcctctcatattgagtaatttacttcatgttcatgcactaaccaaaaatttgttaagtgtgtctaaattcactagagataacaatgtgtttttcaaatttcaccctgatatttgctttgtcaaggatcaggttcatcacaaggtgctacagtatattgagttatctaaattagtaattttaattaaatatatatatatatatattaaaataagtatcaaatatacaactctttaaaataat

SEQ ID NO: 48038 - DNA, 1724 bp, Cannabis sativa
attgtcagactatttttgtcttacgcaacgcccgcggttttgttctctagtttagttatatttatacaactacaagtttgattaggaaaatgccaccaagatcaaattgcaaactgccaccaaaatcttcatttaaccatatagactcatacaaggaaaaccaggaacaagagagaaagtaataaaatatattttgaagcaagaagaacattgtgtagtgtagtgtagtgtagctaagttaaggattagcaaaatcccaacccaaatgaagaacccttattactcctttctttgggtttcggcctcccttgcaatcctcctcctagctctttctctatcttacttctccaaatctcaatggaccttctctcccatgcccatcaccgccgacttcattctcaccaatgccctcatattcaccagcgacgaaaccattcctttcgctgattccatggctctccgccggggaacacttctccgagttggcaactactcctctctaaaggttactatattgattctgaattagaatgttaattaattacatagaaatgtactaatttctatgtatttataggcggtggtgggttctggtacaaaagagttgaatctaaatggaaaaattgtggtgcctgggtttattgattcccacgtgcacttaatctcgggtggactacaggttacctctcctcaacctccatttcatagttgaattctattccaaactatatatatatacattatgccttctagattaaagttctcttactgtgtggtttcaaatttcaattactgttttttttggacaaacagttgagttgatattgcttgtcatgagctttagttgacattcttttccagatggagtgacatctagtgtgattactttttgtttagattcttgtcggtcagagtttacgaattttctccattctatgttagtttggatgttaaattcactaggggctactttgttacgcactattgtattatactgtattatatttgaatttaattatatatcattttttttatataatactgatttcaatttatactagatattatatatttaggtactcgttaaagtcaatacacatatagctttacataaaaaatattacaaaaattactatccaatacaatacaatatgatgtaatacaacgtactaaatgaaacctaattatttacttggttaaacagatgtgtttgatagtgttgaaaaatatgagtatttatttttcagattctacaataccaaaataatggttaattgtctggattgttgttacaaagcttcaattttatgtgattttgataaattgttaagtgttgtcatgtaacaactaatatttatatatatatttgatggggcaaatgtaagaattaatatttgattttactatatatacggttttttgaatgcagttgatgcaattacaattccgaggtgtaaataaaaaggacgagtttgtgaggagaatcgcagaagcagtacaaagtaagttcaattcaattttggtagttgctgattgctttggattgaagtttgtactatagaatgacagtgtggaaattcaacttcttatgtcattaatttatgtaaattaagattgtagtcaactcatgttcgagttgtttgttgatcaatttaatcttaaaattttgatgattatcgttgtcgaggtctcattttaacaactaaatcttaagctgtgagagt

SEQ ID NO: 48039 - DNA, 1585 bp, Cannabis sativa
aataaaaatgtgttttataactacttttgattttcatatttaaaaactattaacaaaattgcgttctgtaaattttatttttatttgctgtttttatttaagtcgggtccgagtctaaggcgagatcgggggtcaagtaaaggtctggggatggggccaaggtccgagtctaggtttcaaggcttcgtctaggttagagtcagagtctaaaatattaattaagaaaaaaatttaaaaaaaaaattaaaagtgatttatttttttcaaattttttaatattttgattttcaattaaaaaattaaaaagtaaaaataattttattaaacatgattttaaaaaaaaaattacttttttaattaaaacaaaaaactaattaaaaatgtgttaccaaaactaaatacaccattaattatttattatgtggaattcaaagttcaatattgaagcaagtagtaaattatttcaaccctattttggtcatcctacataatttctattatgaaaatttatagaataaaataattataaaaaaccaggcaaaataaaatttttcaacttcacaatcatttatatatttatttttgaaaagaaagaaataaacttaattgacaatcattttacttgatcatatactaccaacttttggctgcaggccaatttttgggagcagagagggatgaattattggtttattttgtccctcactttcatgatttatgttcatatggtataatgcaaagcatgaccaattcacttcatccatctctaactaaattctgtccccatcatcaatcacttcacaaaaataaataaataaatatgtacccacattgccaagaaagaaggaaataataataataaaaaaaaaagcttcttttgtatttgtaatctttaataaaatttgttaatatctactattccatggagatggttggttgaaaaaaattaatggtgtaaaagaagaatcatatgaatgagaatggaaacttttgtagtgagaaaatgagaagtatctattatctaaattctaaagtgtttttggccaattttgagaaaaatgctagtgggcacatgttgttgaacaataaaacaaaaggtaacatattgttattggtgcaatttaatatcaaatacatggcgatcctaagtaataatgggcctaaaaaattttgtatgtatgttatatctaaagtaaagtgtgaataccttacaagaaaaaaaaagtaaagtataaatattattgggtctttttcttacaaaattttataaaaatattgtattttcaatgtaaaaaagtttactatataaaagttttgggcctggttcaggtgtgccctagctacgagcttagtttgccttagcccaaggttgggcctgatcgagtcctataaatttgggaaacttacaaaaatactgtttttttaccaaatgttttcaaaaatattgggacaaggcaaacttcacatttttactgtccaaaccttttttatttcttttatactgtccaggcccaatatatttacatttatactgtaaacactaacaaaacacaaacgacacctctcctttgcggttggggacgga

SEQ ID NO: 48040 - DNA, 2498 bp, Cannabis sativa
actggactccacctcctcaggattagatcaaactaaattgtgatgttcaatgggcttagagagtatgtgcacagctattgtagcaaggaatcatatgggcagggtggttcggatccacacggctcggttagacttctcaaacgtgtcatatggagaagcagtggcctactgtttggctgtttcagtggcgttggagctaggtattaagtttgttattgtggagagtgactcaagaataactatcaaagctctcaatgggaaggagtctcattggacgcttgagaaatatgtctcattttgtattaagtcttctccttcttttattagttgcaattttatggaagttaacagaacttgtaactttatggcccataatgtggctaagtgggcttttacccaccgaatgtactgctatattccgacctccttcattccggagaacttgttttataatgaccgagaggtctaattttgtggtattaatggatgattacgcttattttcaaaaaaaaaaataaataattacccctttttaatattttattttaatttttaatattttgaatatcatgtaatttataaatagaaaaacaaaacacaaatctctacgattcaactttcctttttatttgatcagtcatattcattattctccaatctccatgcctagattagatagaaggttaatctcttcttacttcattcttccttttctctatttttgtatttgtggattatagttgtatcataaatacgatagtcaatatattagtatctagtagcttaattttctttctttatctttagttgaatgaatttcttttcctagaaaaaatattttgggactaatatattttagaataatgcttagatagagtcatgaaaaatgtctgtacttatagatattttttttattatgtgtcattgtattgtttaataccaataattaattaattccttttatattattattattattattttgaataatttcatgacccttaataaagaaagttattatatgttcaataaataatacccctaataatttatctttatcttttatttttatttagaaaatgtactataattttgaagatatgaggagacgaactctagacctttgactaagtatgggagcatattcctaatgtgctaaaggttttttaatttgattttgttactcaaattatatttgaatatgtcttgctagactttacaaaaaaaaaacaaagaatatgcctactaaaaaagttttctaggtctgcccatgctgcctgccctacatacaaagggatctcttaagttgtatgtttcaatatatgaataataagagattttatattaagctacattatgaaaactacctaatttaatagttgtcatattctcacaatatatactacattgatattatatatataatatatatgtaaatcaaacaattagtagatacaattttaccccttcaaccattcacaagaaacttatgtgaaaaatttaaattcttgtaaatcattcatgtttatttttatttgttatatcatctaatttgtagactatttttttaaaagaataaaactaaattgcatatgtcttttgagcatgaaaatatgactgattcccaagtaattgaagataacatgaaaggatatttataatatttttttttggaattattaggggtactatttattgaatatagtaactttcttcattaggagtcacaaaattattaaaaaagaaataaaaataatataaaaaagtattaattaattattggtataaaataatagagtgacatataattaaaaaaaaaaatatctgtatgtacagacgtctttcgtgactctacctaagcattatcctatattttatatacataaatttatatatataattaagcaaagtgacttttatacaacattctacttgtttgattttaagtcatgctaccaatattcatcaaagtcaatgaggttagtgtttgattttaagtcaatataataatgacgtgtataaaatatatgtgtaaaattagatatgtggttactaactaaatgtgcaagaacaagaataaaaataagacatatgtctatattatatatatatatatatatatatatataacacatgtatatgtatatatgtcattgtaagaagatagaaaaaagaagagagcagaaataaaaataaaaattgaatcgtattgattttttattcattaaatcatataatatttaagataatataaaataaaatattaaaataagagtgaactagtcatactacaaatgtagctcattaaatttaaaggaagagtacctcctatataagtatgggtgcacttttaatggacattatccattaatgggtaaaattagaaagaaaaaaaatgtgttattatacttaatttttctatctaattagaaaaatctctcacttttatatcatatgggctgagattgttctatcggttgaaaaaaaaaattaaaaaa

SEQ ID NO: 48041 - DNA, 1485 bp, Cannabis sativa
ttttcgggttatttcggtttgtaatttttatcggttttttcggttcggtttgggcgggttattcggtttaggcggtttacaaatttttttgtacagccctaataagagtaggggcagtggcttgggagaaggtgtgtcatcctaaagctgaatgaggaattggttttctaagtattagtacttggaacaaagcaaccttgatgaaaaacatatggacactagctacaaaaaaggacaatctattggttaagtggattcatagtgtctatttgaagaatagagattgttggtgccacaaagcttccatccatagcacctggtattggaggaagcttgtggaggtaaaagatgaaatggtgagaacttgggataccatgcagtttactgcatgaacatataggattgcagatggttataaaaagttacaccagcctctggaaaaagtatactgaagtaatcaggtttgggctagactcaataatcccaaacacaacttcattctattgatggcagtccaagacaggctcaaaacaagagcccgattgtaaaaaaatgaacacaacagcaactgatacatgttgcttctactgcaaccagacagaaaacattactcatcttttctttaactgtagtatcacagaaaggtgtttgtaataggttaaggtctggttgagttggaaggctcgaacatcagatctgaattctctaatcagatggattaatagatcaaaaagaagcaaattcaggagacagattttttcagcagctattgcagggctggtgtacttcatttggatgcaaagaaatgacaagatttggcatgctaattccagctcaagtcaactaccaatacaggaactaaaatggcaaataaaaactataattacttgtataatgccaaagaaagttgatcaagatgataggagttggtttgaacacttgtaaatattgttatgtatagttatattctgcatccttggaaaaggagtgcttagattgtaaaaaccagtttgtgcaatgaagctctttgattcataaaaaaaaaaaatgtgtagatatcataaattaatttataatttaatgagggtccaaattataaatactcaaaactgattttataagccgtctataaataaaaggtagttcctttgtattttctcattccccataaaaaatagtttttttttagaatatcaaaacctttaatgaaatcgccatcaacggtttcagtttagtattttcgttcatatttcatattcatctttttctttcatcaagtaaatgatatatagaaatatgatttatgatttttatattaaaacactcttagtaacatgattaagttttgggatcatggctgaatagcacaactgaagatgcatgcatgatgacacaacaatatagaaactaggaatcttcatgcacatccacctagcatgtaatttgccataagactaaactaatgttactttctcttccagttca

SEQ ID NO: 48042 - DNA, 1212 bp, Cannabis sativa
agttcatatttaggttgttaatcagcatacttgtgagtagatttaagttcctggtaaaataattccaacacaatcttgacggaaagggcaatgtccaggattacctctccgctgataaaactgtacttcctattctcattatcgtactttattattgttggtctttggatttatgtgttatacaagacaagactcaccattgcagatacttcaaagttggggcctctattctttataaaccagcaaatcctaagaagattggtctctttaaaattttatatttcattataaagggaaattaaaaaaaaatacattcatatttcacaaaaattaattgaatcagaagaattgtaagaatcagccctttggcatttgagttatgtccaggtgcattattgctcaaaacatatgacaaaaagggatcctattgtgaaagtgattgtgaaaaaactcttttaccaacccacaaactcctaccaattccttcattgtcaactgctacaccatttttgacctcaacaagctttctttttttagaaatgaggggggcttctaaaattgaagaagctattttttgtccctatagaagctattttcaataatcgaaaagaaaggggaattttaaatattttctcagtattcttttatgaaaaagaaaatgagaacaaaaaatttaatctactacatacaattataaattaaataatgttgactctagaaagtcatatagatatagccacaaagaatggtctctgtgactctgagcgatttctaatggtctttatgactcaatttctttatgattaatctggtagtgatttgtggattcatggctacggtaatggccactagttctgttgatgagattgtgcaattgactgataagttgggtatggatcaagaagaggaatgggaagtgaatgaagaacagacttctgagtttagagacaagtccttggttgggagaataatttccaaacaaagtttcagtttaggattgtttaggacaatttttacaaggatgtggaaagcacttggagaatggaaagtgaagatcatggaagaggataaggaaaacaattattttggattatcatatcagagcagaggagatgcgaagaaggttctcgagaagcaaccttggcttttcaatcgaggtttcttggttcttgaggaatggccaaatagtgggcagtggagagatgctcgatt

SEQ ID NO: 48043 - DNA, 1032 bp, Cannabis sativa
tgagagatgtaagtggcgctttcagaccgggtgttctaactgcactaataggagttagtggtgcaggaaagaccaccctaatggatgtattggcgggaagaaagaccggtggctatattgaaggaagtataagcatttcaggctacccgaagaaccaagctactttcgctcgtgtttgtggttattgtgaacagaatgacatccattcaccttatgttactgtccatgaatctcttatatactctgcattgttgcgtcttggttcggatgtgaagaaggaaacccgaaaggcaagttgctttaataagatgtttttgtgaaattcctatacatatttaagcttagaataagaaaactcaagaatcaaaacagattacactgtgttcatggggtcaacactcaacccataatcttaacatcacaaccaaaatgccaatagacacaatcccaactagttaaaaactcatttgaataaactattaggttgtgtttggttggaggtaataaaatagaatggaaatgaatcgaattttattctattcctttatttgattacattttaaaatattggaatgtcattctaataaaatgacttttccaccaatttggtagaatgacttattccattttaaaaccgaagaaaagatcattccaatgcattttaaatttcatttcatttcattactattcctattggctattcccattctgaaaggtaacggggtcctcttcgagacaggacaaatctcccaattgaactaaagttctatttttcgcattccatatccaataatagctacacaataacatatttataggctttcacgctattttcaaattactaataagctcctatagtatttcatagtctaacagtttcccactcttcaaaatcaccttgtcctcgaggtggtaaaattaaaaaataaaactaaaaataatagctacattcccttttttatttctgtgttttcattcctcccaatcaaacgtaccctaatgtccttattcactcctctatctaaaaggaag

SEQ ID NO: 48044 - DNA, 1519 bp, Cannabis sativa
aagggggttttgccaccaaaaataaagataagggggttaagtgtataaaaatcaaaacataagggggtttcgccgcaaattgctctttttagcatgaatggatatagaaaatgtaaccagttttgtcataaaacctctatatcgaattattattaagttttattttgataaaaattagattagaatactatttaatactatttgaaaaatacaaggtctaatttatcaatttacaaatcaaagagtccagttaattatttgtacaaagtacgagatccaaaataaaacgtaccctaatgtttattaatgttatgttggtgagcatgaaatattgatgtaatggtttcttttttttttttttgaaatatggatactataaagtttgattacatgtgtcatagccctatttttattgtttggaaacttcccattatttactaaaaataaagaaacaaagaaaacaaatcacatcaagttttcggtaaagtatgatgagtttatttttaatgaaaatgacattaacatgtcattgtaatgatcatgactactttgtgaaagttacatggtttaaattctttctaatatatgtttgtgaaaatgtgattttttttttttttttcaaaaaacttattatcttatggttgtttatttagaaattttaatttaataagtttgttttctcatatttttgcacgaaaattggtttataccatagttttactcgtaattaagtacttttctcataaattcttcactatttcaaacttcagtcataaaattttagaataatattctgctcatatttttgcaaataataaatgtaaaatatttaattgtgacagtatgtaatcccgagatctgtaaagagcaatattggataagttgtataattccacctcgtttgaaaaatatcaagggtgatgattctgagactgtgtatgtatgagactaaaatagattgatggatactagctaatcaataaggtgtattttgttttatagtagcccatcaattaagaactccaaagttaatcgtacttgactgaagtaatcttaggatgtgtgacctcctgagaagtattctcaagcagcgtgcgagtgaggacaaaaatgttgaaaaacacttgtattggtttgcagaaccaatcgtcattctaagaagcagccaaaattacatacccatgtataagagccatatatccgtaggaaaagatccaatgaaaacttaaaacgaaggtattacaataatttaagagtaaaatggtatttagatataacataaaagaattgtttaatctcatatataccaagataaaaattttaggtgatgatctacttgttgtgtgactgcctttagggcatgatctatctcttcctattctaaataattcttatttgtcctattagaggaatattcttctttgatttttgttctttttttttgtaatcagcataatctttcgtttgtttagtcacctttttatgagatttgtgcaatttagttgtaacaccctaacta

SEQ ID NO: 48045 - DNA, 889 bp, Cannabis sativa
ttgtcatttaacaaaacacagggtccaatttgtaacttttgcaaaacagagggtccaaaatggtatttaccctaaacttaatatatatttttccacaataaatgaattgggcttaaattaaagtggagtcaatatgacttgagtattgctattaggtactagtggtgtttagtactttctcgacatgccatgttgcgattggctagcaatactttctaaaagctattatattaaattatatgggattcaatacttaattgaatcaataataatattaacacataggaggatattagacaccactcacgctctttagcatttctcaatatgacctatatgtatactcgagaaattcgtttgaacctatttatccgtattctcttgactccacatggaaaatgggaaaaatgggtcctattaacattaattatccatagccattaccttccatgtcatttctattttttttttatttttttataatagttgtttctaatattttaatcattcatatctttcacaattgactgtagaccccaaaacgtgtatcaaggcacacaaaacaaaatttattttcacacgtgatccgatcgaaagtctgatcaaacctcttacttaaaatatatatactaaatagtctactcaatgtatgacatgttcatagttccaaactgccaatcactaggaactgccaatcactaatttttagtatattcaatgtagctgaagactctatacaaaaaataaaatagaaatagctaagactgattaatgatgaactaatcctcttagaaattcattatttatttatttatttatttgtttatttattattttttttcattacatgttatcccaaagtccggggatatggctagttgcttattga

SEQ ID NO: 48046 - DNA, 1676 bp, Cannabis sativa
tatattattttataataaattattctatttttttttattatttttgtttctattttaaattatattcatgtgtttttgtgaatttaatagctagtatatagtaagttacaactccttaacaagttactaatttttaatcctactgatgtatttttattactaactagttactcattagcaacaagttaataactacttactcattaataactagttacttataaattatataataaataagtagtaaaataaagaatttataaattttgtagtatttttttacattgtagattgtgaggtcaatttgcaaggatcccgcttatttggtgttgatcagtttctagctagcttgaggtatatatttactaacttttattatttattaatcataaagacttagtagagtttgaatatcttatatattcatccgtagtgaagtaggttttgcgatatattatactgctgtcagataggtggaataatatgcatattagatgagtttgcatatcttaaatattcatccatagtgaagtactaggttctacgaatgcatatactgcggtcggatgggtagtaaatttttgtattgctaaatatggttgtgatttttttatattattttagaatgtattttattattaataactttaaatttttgggagacattcaattatagtcgttatgttgctgaaatttcggtagaattaggaatagttactagttattaatttagtatactatacttagttataagttattaattttgtaaatctcgaggcatttgatgagtaagccacacaaattatattgaaataatattgggcttttttctataatagatatcttagatctaaattttacatttttagcttggtaaaggaaattaagtaaaaaagaaaatctgaagtttttttttttcaaaaatacggattgaacggttcgcatcttcattcccagccataccagagcattctatcgtccattttccttttcaatcgaggcacgatttcaactccaaaaaaaaaaaatccaggctgtgttataacaaggccacaaagtagatctcaacaaccaaatgattaaccctacaaatccaaaaatcaaaagtaaactagtaaaaaagaaggaaaacatatatttctaccgcaattaacttgaaaatacataaaaataactcaaaaataataattagaattgtattgtacagataatttgatagcaacacagatagagggaaattgacgcttacccagaaataacttggaagaatctaacaaaaaaaatacaaagtactaatatttttagtatttttcttcataattaggttgttatttagtgtttgtcaatcagatgaagcataattcaagggtaaattggttgatttgaagaagttaatgcaattaatttgcaattagacaactacaactacatttaagttcatttgttgtttatattcagaaaagttatttatatgttatttttattgattaaaatagttgtttagaaatactgatactcataacaaatataaaaatttgaggatatatatggaaacctcttcaagtatttgtacagagaaatagtcattgggatgaaaacatgcactatgttgattatgaatcatgtgcagaattaatatcaagagatcatacttatgctgaattagtccagataaa

SEQ ID NO: 48047 - DNA, 1708 bp, Cannabis sativa
cgaaaacctcggtcaacaatgactcttcctaattgtttctcaagaatatttcgaaagattttgactttatcaaaaatgtcaaatttttcttttgattaagtaggtaaagccatctcgagaaaaatcatctgtgagagttataatatagtgttttgtcatacgtggtggaataaggtccactgatgtcagtgtcgataatgtctaaagtatcccaaccataatcatcaagaggaggaagaatttcagctctaatgaatcgatcaacccttgcttctgaaatatgaagcaatcttttgtgccataataataaggatgttacattaatgtaagatctcttacccacattattcacaacactgaaagaggaagctaaggaagtcaatgataatttgaaaagaccatcagagtaaaaacagtttccaattattcagagtcaaacatgatgtcaacactataattcgcaaaatgaaaagaaatacattgtttaactaaaagctgaagcgaaactaaattacttttaaaagtaggaatcaagaaagtactgttcaaaataatctgaacactacacagtaattcaagaataaatgtgccaacatagatagtgtcaattctaacataagtccccactttaagctttgaatccctctcacttggctttttgagatcccttagccctcggctgtattttttttataatttttcctatcttttgttgggcttaggttgagaaacatagtgagaaaatgcattcttctcttttcacagcttactttcctcagcaataaactgagaaaaaaggtcactaacactccatgttatactataagtgttgtaggttatcttgataaggtgaaaagaggcagaaagtgcatgatgagcacgatgaataatgtaagaattaggaagaggaatagtatgatcttgtaacttggactgaacattcacaattttcaaaataaatctcacactcctttaatttatcatactaaatggttgtcattcgatccatacgatgtccaactacagcgttttcactagtgtcaaatagtttttctactgctttgaaaaaaaaaactcattagcatttgtggtgtttggcaaaccactaaataaatgttcatgaattgaacttttcatagtactgagactaagatgatttgaaattttccattgtgcatgaagagttatgtaggcaacaatgctcgtatcagcatgatcaacaaattttttttttctcgcaggcataagtccaagtctattatgccttaagtaattttcgcatctcgtttccatgtcttaaagttagaagcattcagaattcagatgaaaacgttattgttattctcagaaagaagaccaaaaaatttaaaaattaaaacttgatcaagctatatgagccaagcaattagaaaatattgtagagtcaactggtcattataaactcctttttggagttagaataaaacacacacatgatcaaccttcatgaaattaacaatgaagaaaaaaatacatatcaattaagaatttattaccttcgggcaaataaatttcttaaataatatatcttaattcaagacaaaaataataatgaatatatatatttaaattattacctttcggtaaataagtaaaatatacacatttaatattaactcacttcatggaatgtgaactaatatgtataactactacctttgggcaagta

SEQ ID NO: 48048 - DNA, 1574 bp, Cannabis sativa
atttatatagaaaattttaatacccaaatatttataaagaaaatttgagtttctatacttaaaaatagttgtaataacaaaataattcccctataataaagattagaaatttatggtaatctttatctttattccaattttacttttggcatttcacaaggttctctatctctctaactcttttactctttcttcctcttttagtctttcggttaacctctcgcagccaaacccaaactttgagctccccaccattgaaaccaccctcatccaccatcctcaaccacgaacccatttttgtcaactcacacgaacccatccttgtcgactactcatgcaaaattcatccccatccctacccctatcgaccaacgattcccctccatcgtacatatatattgagttattttgaaccaaatctatacatttacttgtctattttgttaattttatgtaaaaataattgactctgcattttctcttttatcaaaaatcatcgaaaaatacaataagataaatcatatcaaaaatatatcaaaaaccatcaaagattgtatttttttgatgattttcgatatgatttttctgattaaccttagattacatttttttgataattttgatatatcattcaaaacactagaaagcaaaaaaatctagaaaaatgaaaattcttttttttttggcacaaaatcaactaaacagacaagtaaatgtatagatttggctcgaaataattcaatacatgcacggtggaggaatcgtgggtctaggaactgacccaagatttaagttgagaggagcatactttctttttctatatgatatacattttaaaaattaatgcaaacttgtattttttttatagtattaaattaagaaaaaaaaaaagtaacaataaaaatcttggcttcaatgatcaaggtacttgatacaaatcttattggtaaatgttcaaaaagtaaactttaaatattgaaaaataaacatgttcttgatgggatttgaactcatgattacgtcagaccttgaacataaataggctaggcttgtgcttacggcctacctagccaaggggctaaaaaaattatcctcttttaaaaaatacatatttttttttactaatttttttttttctaaataagggcccacaaatattcacaaatatttttgggcataatttttttttttaaaaaaaaaacacataagcaacaaaaaaaactacaaaaatatattatgtgtagaatttttaacatttttacgatttcttagattttatttacataaaattttgatgtatttttaattgtatttttgttatttgtatattattttttatgttgttttgatattattattttttatttttttaatgttattttcttgtatgtttataaaatactgtaaaaatgaaaggaaaaaaaaaccttgaacataaaaaatgtaaattttttataaaaatttgtgttttatgtaattattctcattttattctatgacccactaaattttaagactggctctgctcacgacgtctattatatttatgtgtgtaagatagcttaactattatt

SEQ ID NO: 48049 - DNA, 818 bp, Cannabis sativa
atcgacccttacttacgattatactaaaataattggaagtattggaattgaaaattagtaaatttgttgtggcttacgacacgcatcatctacctaaatttctagaaaaatgacatctcctagaactgttgaatgacttcaccagattgaaaaaatggactaagtaatctcaaaatattgctaaggcataaaaaaagtctgacacgttttcctactcatacagggtcgaggttgacatcagaatgtcaacctgggcgctagttgttaaacaaccttcagtaaaacaactataattcactcaatattgatccaattgatgcgattcaacttgcattgaaagctcttttcaagatatttcaagtcatttcttacaataatatcgtaattctaaagatttcatttccaaattttttccccaagacaagggcaactttttccacaaattacccaaaaaatgatccaataactgcaatccaacctccgaaaattgataatcaacatctgaagtcctatcttagcatctcaactattggttcacaatcaatggtcaaaatcactctagatggaattttccaataatattcttatttttttgtactattttattattattttaatggacgtccttctctataaaaggaccaatagctcatttttcacattcaaaaaagtccctacaaagtcagagcatctctcactagaaattgaagctcttgccttagttaattctcttgtaattttcgtgagaaattaaaactcgaactagacatagttccattactgtcgggacatggggagtgtgttggaaattattttac

SEQ ID NO: 48050 - DNA, 1145 bp, Cannabis sativa
agtgttggtgggttcatttttagagcaatagccaaaatatctaataaattgaaatattaaatagttagtttggaatatatatttatgaaaatcaaattgtaaataacctattgggtttaacatcatcaaaggtgttgcttctgggcttttgtatttttatgaagaatgggaacaagttgtgattcatagagatgtgaaatcgagtaatgtttgaatcgatttagatatgaatccaaggcttggtgattttggtttagcaaggattcatgatcatggtgagttgtctcacaccactggtgttgttggcacgattgggtatatagctcctgagttggctcgtgttggaagggcttcgacttctactgatgtttttgcttatggggctttgcttcttgaagttgctactgggaaaaggcctattgggtctggtcattttgtgcttgtggattgggttatggagtgttttgaaaagagccgtttgcttgatgttgtggatcagaaattgggcttggagtttgttgttaaagagatggagttggttcttaagttgggcttgctttgttctcattataggcccgaatgtcggcccaatatgaggcaagtgattaggtacttgaattgggaagaagagcttcctatgattgagaattggggtgtgtttgattctggacgtaagagtgaattagattcaaagtttatgcaaggaatttctaatgataaaattagatcatacaggtcttcatctcttggtgctatctcttacagttctttcgatgccggtagataaataataataataataataaaaaagaaaatggttcgtacattgttgctatatttattctctttttaacttaaattctttctcgtgaaaattcttttctttcttccataccataaagtctttttttgttagatagatttatatcgtaacagtgttgttcagatgttacatgaatacgattaattgatgttaataacaccatatgaaaagttgtaccacaccatctccatactgtattattaataataacttcgatgacattttttgggatacttttttcaagtacaatatgtatatttattatttgtcattagaaatcataacatttcagtggaaatttgtgtggttcgacaattactat

SEQ ID NO: 48051 - DNA, 686 bp, Cannabis sativa
ttaattaccatggtaattgtagttgaagaggtgtgataattgtgaaaatgagtgaatcttggcattgagaagaagaagaaaaataagaaagatatattaattggtgaagaggttatagtaatttgctgtaataatagagaaggtgtagtgatgaaaaatatgatcagaattaggcttcaacgtgtcaaaggcaatgtgaaaactgtaagaaaaacactgtgatttaccaaattaaaaaccaaattggtctgagaaacccaagacaagaaattagagagagaaagagagctttatctaaaacattttgatttgggttttcattgttttgctaccaacatacattgggtctatcgataccccttcctctactgttataaatgtttattgtgaagtgtttttttattttgacaatgaaaatattttttaattaatgtcaatatttattgtaaaataaatatatattttttttgtttattttagtttgtatgcttatcttttttccaaattttggttaatagttgtatattttttttaagaaacttatcatataagaatgaattctcttatatcatgatatcatgatatgtcaggatttggtgaggcactatcacaggaaagcaaacaagccaagctgtatgataaaacttgaccttcagaaagcatatgatacagttgagtgggagttc

SEQ ID NO: 48052 - DNA, 1956 bp, Cannabis sativa
cccaatctctttttattttaggctttattttaatttgcagaaaaggccccgaaaaaaattggcatgtttttcaaattttgtttgggcctcctaaaagctagagaggactctgccacaaaataaattataaaataatacgtatataattagaaagagaaatgcgtaaatacattattggtacttagtatttttctcgatgtcatactattattagtgcaattatgtatcgagtctcatataatttaagaaaatagattttaggaaatatcgttaactaattgtgaaacgtcacctataaaaagtactggcaccactgataatcaataatgataatcaattaaaaattaggaagaaataatagcacacaagtattaaagaaaattgagtttgaaaagtgaaaatataataaaatattaatacagataaaggacattaaattaaaatgagtattattatcattgtaatagtaattgatgcattattatataaaaaaaagttgagagggagggccacccgaatgtagtggctctaccctaattagcattatgataatgcattttgaagaataaaaaaaaaacggtcataagagtgctctaataagttactattacatcagaatattcacaataggtgaggtgaagagggattgtttaatttttttttttgaagaaataatctaaaaatatgctacatttataaaaattattattcatgttatatataataatatttattactttaagtatattttattaattgttttatattttttttatatgtgaatagattaatattatatatttgaaatgagtgaaatatattaaaaaaattataaaaaatgaaaatttgatgatgtatttagaaaaggctaatgttagtataatgtaaaaatttaaaataaaattgggaaaatgaaattttaattatgtattttaaaagatattgtatatatagaacttgttgggagtattcttgtctttttaatttttatcaaattggtggcacatgctatttagtagtatatataataatatcgtgacctattcattcataagctgccaagatgatacaaaatgagagataataatggttgtagatacaatataaatatatgtagcatatataattcaatgcattttcataacaaatgcaaatggaaatataatctcatggaagtacaatggtttatattatacatgtaatcagggcctgagattagagctgcacgcaaaagatagagtaggattactatcagaagtgacaagggttttgagagagaatgggttgtcagtttcaagagcaggagtctcaacagttggagaagaagcagtgaatgtgttctttgtcagagatgcctcaggtaacccagtagacaccaaaataattgagacacttcgaaaagaaattgggcatacaatgatggtcaatgtgaagaaagtcccaacaagtagttctaaggcagctgaatcagccagtgggtgggccaaaacaagtttcttttttgggaacttgttggagaagttcttgacttaaactgatgatgatgatgattaactgataatttccatatcaatgtaaaactttgactgcaaatgtacagaataacatcaatctgctcagtaccttatttggatagagcttgtgtaattgcatgttcattgcaaaaaggtatgcttgtaacttgtgatcttttgtggctcggactttcaaattagtattatgacatccattttggcagaggccgagttgtccagttttggattagaacacctctcagatattgagtagtctataatttttatttttgggaatatgttaaatatccaaaattaatttggattgtgaacctgccctattttaccttttttaaatttcccaagtctcaacaacatttgtcaaaacatgctggtattaagcaaaattaaagaaatacaggagtttttttttttttttttt

SEQ ID NO: 48053 - DNA, 1809 bp, Cannabis sativa
gatttatatttcaacacataatgtagaaggtcaattagtattagttagttaactttcagtgatatagataatgtttatatataatatatcaagctacagctagctaagtagcaatcaacctatttggttcaatcataaataggtcttactgacccgttacctaatatctaatcatatctataagagaaatatggttaagatagtgcatgtaacattattattctaatttaattaaaggtttttttttctttttttattgtagtcttagtaaaatttacaaagcgaccaacatagtaataagagtaatttaaatcgcaattcaaatctatttagcaatccacataaaaattataggaacaatacaaattgtaaaaattaaaaactattatatgaataatataattcctttttaactaattaatataaatattggttaaccactcataagacgttacacagagtaccaagctaatatatatctatgattaacgaattcttctagtttatttatatcaatgattttgatcacagctaattaatcgttaagcaaagcaacataaatttatgtaatagtattttaattctgtagattgctttttattaaaaaagatatattatatattatcgatttaaatcctgaatatttttcattcaaaaaaaaaaaatcctgattattattgtttaggaataaattctgtatgttatattatataaagatgccatcattacacttttttagcgatacagagcatatatataacagcataatttgaaaaggaaaaagaataagaaaacccttttatttatagtgtaagatcttttcatccctttgtctatttgcaaggaaaaagaataagaaaataaaaatcctaattttcatttcccatatgccatttttttgggcttatacgtgagagtttcggtgagcttcatttttttttctcttttattaatgattagtctttttagatcgtctataaatatatacatatggatctaaaatcaagacgatgatgatcatctaaatacgtgactattgactatattaattatatatattaaaaagaagcaaattatatatatagtttcacttgttgtttactgaaagatatgcctttactaaagttgtgtgaagcgcagagtcagctaaacatccttcgattacttcccttcgaaaaaataaaataataattaattatgtatactaatagtaatactatatgtgtacatgatacgcatttcaaacaaaaattatattaataagtgtacatgatacgtaaacctgaacttttttctcaaaaaaaaaaaaaaaaaaaaaactaatagtaaacttttttcaaaaagagctatatttcgtattttattgatatattaatttattataaatataatatttggggcgcatgtgagatataggtgattctagtctgtacttattaactatttacattaattaattgatagattaatagcgcatgctatttctaaaaatcttctcttcttcttttagggataacctatcaaaactgatttaatttttttttgaaagaaaaactgatttaattaacagtagaaaatagagtagaatagatgagataaaaatgactgaaagccttccattaatttctcaggacttcgggttctcttccacaaaagttacaattactactaaaatccttcacacccaaaaaagagaacccaacccagggacggaccagttaagttattgtgggggctatagccccactaataaaaatattgtcttttaaaaattaaatttaattatttttaatttaataattatagact

SEQ ID NO: 48054 - DNA, 3991 bp, Cannabis sativa
taagatagcaagctcttaatttctgtaacaaaagtgttaagatgcagattgtgagtatcattattacaaatataatccaccaaaaccttgcaatctgaaacaatactatccggataaagagagtgagcatgacaccaagaaagagcaaagtgaagggcttgtgcttccattaacaaaggtgtattaattccacaccatggcattgccaagtttaaaagaacctcccctgtatttgtttgaatggacataccaaaacccattttgttgagttgtgaatcttgagcagcatccactgaaagctgatgggtgaaagtaggagcagaaagaacacttccagtggacagcaacgaatcttcttgaagctgtctagtagtggaaacctttttgttgcagctttggtattgctcaatgtagtgtgtaacctcacgcagaacctgtgctagagaagaagagaaaccagcatgtagccaactattcctgcagttccaaatcttccacaacaaacatacaaagaagtgataattttcagcagtaaacacagtggcaacaaggtgtaatgaatccaaacagtgaaaaatgtttagtaataaaatcatgaaaactagttaattcccatacctcctggagagcagggcatctgagaagggcgtgctagctctagggtctcatcatgatagtgacatcggatgcaatgtggagaatggatggttttccgtatgaacaggttgtgattggtagggaggatatcatgacaagcacgccaaagaaagtgtttcagtttggaaggcagagggagtgtccataactgtttccaccatgtatgtgagcgtttggtattcgagggtgttgggtcgttttgatgaatctgactgtgggctaggtggtaacctgagttgacagtgtatgtgccatgaggggtaagagactaagagtatgcatcaggtatggaaatgttggtgagagggatggtcatgatagcttcagaaacatctgtaggaaaggtggcttggataagggcatggttccattccttgttaggtgttaaaagatctgacactgtcatattggcatctgagtgatatgtaagataaggaagtttgccatatcctggaatccaggcatcgttaaagatggagatggtggtaccatccccaattgatcttcgaagacctgactggagaagttctttgccccaattgatactagaccaaaccagggaaggtctatggcccttgccagaaataaggaaactggattgtggaaagtaacgaatttaaggagggtggcaacaagagagtgaggatactgaagaagccgccaagcttgtttagccaacatcgcctgattgaaagctttcattgatcaaaatccaagacctccatggaattttgaaaagcaaaggaaagaccaagctttccaatgaatttttcggttatgctctgttcctccccaccaaaaccgagccatcagagactcaagcttagaatgaaaggaggtaggaagcctaaagcaagccataacatatgaaggaatggcttggacaacagattttaaaaggacttctttacccccttttgaaagaaacttggaattccatttatttagattagaccaaacacgatccttaatgtaattgaaggcatcctttttagttcttccaaatgtttggggaaggcccaaatatttttccatgttatctcgaacaggaatgccaagaatagtagcaactgtgttttggatttcaggggtggtattcggtgaaaagaacaaagccgatttcgtaaagttgaccaattgtccagaggcaagactataatcatgaagaatatgcttgatgacggtcgcagctttaggagaagcagagctaaagagaagactatcatcagcaatgaaaagatgggaaatggtcggggctcttctggaaattttaattccaagtgaaagtctgggtggttggcgctgttgagttttgtggtgaatgagagatgaaagaccttcagagcataaaagaaataagtatggggaaagtggatccccttggcaaattccccgggaaggcttaacttgtccaagaacctgcttgttaatggagaaggaaaaagttgcagtagattcacaggccatgaccaggttaatgaaatgctgaggaaaagaaaatttctccattactctacgaacaaaaacccattcgacgcgatcaaaggctttggccatatcaagcttcaaggccatccatcccaattgacatgatttatggtgggaaagggaatgcataacctcttgaccaatgataatgttatcagagattaaacggtgtggaaggaaggcactttgggtgggggaaattatgcgactaagaattgggttaagacggttgaccagaaccctagatatgattttatagaacgtggagcaaaggctaataggacgataatccgttatttactcaggattaggccgtttaggaataagaacaatgggcgtcttgttgatggtcgctaagtctgcatccccattcagaaagcttagagcagcagtaatgatatctttacccaacaagttccaattcttttgaaagaaacaaccactgaacccatctagacccggtgctttatcatgagcaagttggaatgtagctttcttgattttattagcagaaaaaggtggcctggagaagttcaatttcttcctcagtaagacattctgtaatgcctgagagaacagaatcgatgatctcatcctctagggattggctttgaaacaggtgagtaaaatactgctcaatggtgttcaaaatggaggttgtatcattagccgtggaaccatctgagcattgaagagaaagaattttgttagtttgacgcctcatggaagccatacgatggaagtatcgagtatttttatcaccgagctggagccatgtgacagggatcgttgttgccagtaatcttcctctttctgtaacaaactgtttaattccttttcaagattccttccctgatctaattgatcattagtgggctgagggaaggattgaacaaacttgagttgagattgaacttcacgaatttgagtagcaagatgaggtcttaaagattgtttccattgcttaagacgggacgaacaattagacaatttttcattgaatccaatcaacggattagaatgatgattctggttgttcagcgtccaagcatcgcgaaggaaattctcaaaaccaggttcggacatccaaagcctatcaaagatgaatctggggacaagattagattgatcaacagggtgatgcaatgtgagaattagtggccaatggtcagagccaaaaacatctccatgttaaagacgaggagtaggaaagttgacatcccaatcagtattggagaggcaccagtcaagtctctcttgggtgtgagacgactttttttgtcggttagtccaagtgaaaatattacctatacgagaaagagggtgaagtgcatgattatcgacaaaggattaaaatcacccctattttgtcagtttgataaaggtaatcattaaaatcacccataatgagccaaggttgtaatcgagaatttatgccaagtcgatcaattaaatgccaagaatgcagcttattttgagagtatggtgcaccataaaaagcagtaaaagtaaaagcagtaaaatttgggaaatttaagataacagtaaaaatgacttatattataagaaagtaaggttacatccacatcatgtgtccagagcaacaaaagaccaccactaagcccgacacgtgggacctctagagcattaggaaatttaagacgcgaagcaaatttatttaatgctccaacagggagtttagactccattatatacaaaagagttgggcggtactgcttcactaaaagggagagagaacggaatgctcgtttactccctaatccacgagcaatccaacagatgatgctcatggctctaggcgggtacgctgagcgtcacccgcctc

SEQ ID NO: 48055 - DNA, 1715 bp, Cannabis sativa
ttatggttgttttactgaaggttgttcatgacctagcgcccaggttgacatcccaactctctggttgacatatgacgtcaacctagacgttgggaaagtgaaaaaacatccaggggatgtactttaggatgcttaagtgatatgttgtaatcatttagtttgtttctatgttctgacaaagctggtcaccaattctcggagatattgctcttatgtgaaaatgagagactcgaaactcttcattttcgagtgagtttctcatgttggaaatgagaaatgcagtcataaatttgacttctctaacttcatggatcttagttattgtgaaaatattacacatttattaacattgagtacttataccgttataaaaatattaagtttacgccgcttacaaatataaaacattaaatatttatatcgatatttatgctaaataaaatatataaacttttcccactaactattttttttattagcaataattttattaaataaaatctataataaattatataaataaaaaaatgcaaattcaactactctaaaataaaccatactatttatcataggaaaaaacaataataacaaaaacaaaactactctaaaataatataaaaaattctatggtgaacttctatattacaatgatgcacttcaatctgttttgatattattgagaattttttagtttaatttttttatggtagtatacattgtagttatttaaaatatcttgtaaaatttagaggaattcggaaatattttatactctaaaaatatggttgcttctaatagtataaattcgttcaaatttctcaaaattcgttcaaatttctcaaaattttacaaaatatcttaaataactatagcgtgtatgaccattaaaaaattaaactaaaaattttgtattgctgcactctttttgagaatgcattataaaaacacacacaaaaatttatatctacatatatataataaataaataaattaaaacgaaactagaatttatgaaatagaaatgctaaaatatactatgtttagtattcttctcaatgtcatattattattgatacaattaaatatatatggagtccatataatttaaggtcataattttcaaaaaatatcgttaaccatcgtaagacatcacatttagatgctattagacaccactagtacttaaggccagctccaatgcaagctaccttagtggctgtattttattattttttaattagaatattaataaactaatcaattgaagaaaaaaaaaaagtgagcagcggtgctcaacagtagctacgcaccttgtatttaaggttgaaaagtcaatatttttttgacatttaatctcattttctgacagctacctcttattagagcatctccaacgagctcaataaatttggtgtcacaatatcactaaatttggtgtaaaaaaatattttcactccaaccacaacaccaaaaattacactagaaaaatattcattattattatattaattttttaataaaataaaaataattatggtattcctatttaaatttacacacaataaattaaaatgtacttttacaatacaccccttcaaataaaagagtcacgcgtgcaacagatagtttgaattttatttttggtgtgttaaatttatttgaattttgtttgaaattttacaggatatcttaaataactataatgtacatgacca

SEQ ID NO: 48056 - DNA, 1121 bp, Cannabis sativa
acaataccatgttagaagaatttctaatgaaactattcaagttcaaataaacgataatttaaattactgcaccctcgtgttgttctccatttctgtgtatttcacatatggccccgatattattttgatcaccctcctaaattcaaatcagaaaaattataataagagaataaaaattgatgtaaattacttggctgcaaatttctctttatggtagatcaaaatagcttcagatgtacctgaaaagaggttgcactgctggcgttctcgatgactcgtgcttcttgaggctccactaacatgtccgaattgtcaagttcttgcatttggtttgatttagcaatatcatcgtcaggggacaagttcttcatcttattcaaaggaagaaaaaaactaaaataagcaacattaaaatcagagataaaaatgatgtaaattactgatcaaaatcaaaagcatagtgcaaaattaagtctcttcacttatcttttatggtatatcaaaatagcgtcaaatatacctgagaagaggccgcactgctggtgttcttgaagactggtgattcttgaggctccgctaacgtgcctgaattgccaagttcttccatttggtttgatttggcaatgtgatcgtcaggcaggttcttcgtatttatatcattttcatcctccttaattcaaaggcaaagaaaactataataagcaagcaacactaaaatctgagataaaaattgatgtaaattagtgatcaaatcaaaagcatattgtaagattaagatatacctgaaaagaggccgcactagcggtgttctcgaagactggtgctccttgaggctccgctaacctgcctgaattgtcaagttcttctatatggttcgatttggcaatatcattgtcaggagactggtgttgcatattcaaatcaatttgacccccctccttaattcaaaagaaaaaaaaaactatgataagcaaccctaagatctaagataaatattaatgtaaattatctcaagattttcaggtatatcaaaatagcttcagatataccttgtaagaagaagtcaagtggccggtgttctcagagattggtgtttcgagattggtgcttcttgaggctgg

SEQ ID NO: 48057 - DNA, 1128 bp, Cannabis sativa
  modified_base (51)..(56): a, c, t, g, unknown or other
aagttcttatttaggatgttaataaacatacttctgagtagatctaagatnnnnnnaaaataatttccaacagtgtctacactgtgtctagacacagtgcagtgtaggtcctcccttgtctctattatgacgaggggtgtgtcttatgtcctgataactcttgtcttttcccaatttatttaatttaattaatttaaaaaataaattattttttacaaaataaataatcactattttgacaattcaaaatagatttttccaaactctcatacacatctattttctcttcctttgacagtgtttgatactggcgatccaggaccatgtacctataattctaagctccaataaactagagaactttatcaatcaaataatcttgcactactaaaaaactgggttttagaggcagtttttaaggactttcagcattagttttggtgaaatttgttaccgatgctatttcaggcgacgccgtagggggaaagcattaacataagatataaagagcccctatgccgtcggttattatgaaataaccgataatataataaccgatgacatagggggttatttgtttaatgacgcgcctttatggcgtcgattattagcaaatactgacgtcgtagtgttttatggcgtaggttattttcaataaccgatgtcgtagggtgttttctaaagctgaaaattaaatattttgtttatttttcacatattttatttttgcttatttttattaatttatttaaattaaatattaatttcatataattaaaaataaattaactatataattaaatgtatttataggtattattctaaataaatatactacacaaatattttaaaattaatttaagtggttacaagttattatctaactaaacatagaaaaataaggggaaaaatatttacaagttatctaataaaacatagaaaataaggaaaaaattcttatacaattcagaatcactacaagccttcgtgaatcaccgcaaataattattttatccactgtcgctgtaattcaatttttgcatcgtatgtcttcttatccccaaactgtaaaaaaaaaaaaaaaagtaaatattttttttagtatatatatatacattaaaaatgttt

SEQ ID NO: 48058 - DNA, 1630 bp, Cannabis sativa
aatttaccaaacactcagctcagcttttttccacagttctgctacagctgctttttcccacagcacagctacagctgcttttccccacaccacaactgtgccaaactgaccctttatgtgtttttattagtataatattaaaaaaaatcaagaatttttttggagaaagtatttagtatttagtattttaaattattaatatattatttttttttatgtaattaatttttttttatattttaacataattaataggtttggggacgaatgacactttcgctaaatttctcactatgtttgcttccttcttcacatttaataaaaatagtcatttgcataattcgaataagattaacaacttttttttattttttttttattttttaacatatatataaaaaaaaaatttgaggggaacatatataaaaattgtgttcatgtaaataaatcataaaaaagtactattcaaatatctttggtactttttgttaacaattttcaaattttatgatagtgagaccattttcgaaaatatatacttaagttatatatattttccatttttttttgtatgatttataaaattgtactaaaccacaaaatttttatacactcacaacctcatataggcctgatttttcaagattttatacatatgttttgaccatacatcagcttattctaattcttgtttcttcaatttcttttgtaaaataataagaattctatcaaactttaacacatttcacaattgtaggcattgtcatcactttttgcaaccaaaacagttcattcttgttctttcatcatcaccaagatgattgtcaatcggtttaagattttattaccctcatgggcccaaagcaattttatttttttggttgaatgaaatatgatcccatcttcttttctgattcaaaagaataagactcaggtggaatgaatggatctaagaagaaatcaatccttatatattaatagaatcgcattaaaggaagtgggagtcgtggagaaacccggatgaaagacttatccgaggtagttgaaatcaaaagatgaactttcagtaacgggagagggtagaacaggctaaaccatcatgaattgtcttttcgagtcgtaaatcaaagtaacaaccaccataggaaaattttgcttcttaaaaaggaattgttttgaccaaaagatccctctaagtagctattgaaagtggcaactaggagctctccaacccaactattttttaatgacatctaggtacatcttttgttgcacacactcaaaaaataagtaagcaacgttcttcctttgttgaccacaaactaaacaataattatcttaggtccaaggctgtctcaaagtgttgagagacttaaagcgaaatttaaagcaagatctattttttttatataaaaatttaaaataaaaatatattattcaaattttgatatcagttttaactcttattttatccctatattgtgacagtcagtagtcctgtgatccgtaaagggaggtgattgtgacagtcagtagtcctgtgatccgtaagggggaataccgagtgagttgtgcaatcccacaccgcttggggaaggtcaagtgggatgaatctgagactgtgtaagta

SEQ ID NO: 48059 - DNA, 2268 bp, Cannabis sativa
ggaatgattgtagtttgatgaaggtagtgttgaagaacttcatccactgaagtgtgaccgaaagcataaggattgtctgttggtgataagatgacaatggcgatttgagcgccgaacttgacacataattcacttgccttatggaaaagccctgtacgtctctttgagaaactgacaaacacattggagcactgtcctggtttttgttgttgttgttctccctcttcttccaaacttctctttctcttacacatagtacctgtttggagcttaaatgttagtgggagaagaaaacatattaactacaaagctaaagagatacaaatgaataaagcatttgttcacaacttctctaaacagtacattattagagtatgtccaatggagatataaataagtggtatatagcttgtttaacacaaaaaatgtgcttcaatggtgtgtaaaaagtgatgtaaatttggtgtaaaataaatgtattattttttcatttacatttatgttattattttattaatgtatttaactatgacattaaattataaaaaatttatattatttttttattttttacatattaaaataataataaaatagatcataaaattattagattttttttttttaaaaaaatagtaattagatattaaattttatcaaaatcttgtaattatgcattagagcacaaagttaaaaatttagtgaaaatttaccacaaaattacttttttatacttaatataacataactatattttaatttttcaccacttatttatccctccattaaagatggtctaactagaatttttgagctaaatcatattcatgaaaaactaaaggatgaattaatgaaaaagaaaaatacgtttttggccagacttggagagtgggactacagcagaggctgcctcaacctgtacaagtacaaagaaatcaaaacccagttacaaccccaaaaaaagaaccccaattgtatgaaaattaattcataaaacataaaatgttgatcattgaaatcaaacatcacattcctataaaatatgacactttatcatctacttaatcaaaacgaatgaatgaaaggaattgaagtgtaaacatactatagtgtcggattgattgattgagttgtccattacaagaactggtgtggtgtatgaaaaaaaagaagaagaagaagaagaagaagaagaagggaacccagcaaaaactcgagggaaattaaagcagaatagtaatgatcagagtggtggccttcatatatttatgctaaaatatttcaaatttgaactttttcttcatgaccaagttttttgggttttttttttaatagtttccttaattaattaaaattcaatttatgagtctgacatataatatattcttatttcctaatcctaggattctcgtttgggctaaatagtaaaaactagggcttttgcttttaatattttattattggtatacccatatttaatgtgacttactatattactcagtactaattaaatgaagggatcttaatagaagatcgtatacccatgttcaaagcatgtaataattaattattgtacacttggcaactacatattggtttaaaaattctctttttcaaataacaataaaaaccaacggtatgtttatttccaaatgtaataaacttagaattagtaaataaataaattgtgacatttcaaaaaaaaaaaaaatcaatacttgttagttcttaattaattttataattaaattaaaatacaataaacttaaataacaactaaaatattactaagaacctatttagcacaacagcatagttttgagaaaaaaagttaaaagttgcttttaaaaaaagttggtgataaaaaattgtttgtcaaacaattaaaaaacagcttataaaaaaatttatggagaagttacgtttaaaagttaaagttgatataactcaatttttaaaaaaagctgttataattaaaagactttatactaaattattttgtactaaaaatatatttaattatttacaatatattacaaaaaaataaaatattttttgaaagaaaaaaatatataaaataaataaatttttatatatttgtgattataatgaaatagattataatattataataattataatagaatcttaataactaacaacagtttaaaatttataatttatcaaacactcagttaaattatttttcacagttcggctatagctgttttttttttttactgcacaactacaattacttttctcata

SEQ ID NO: 48060 - DNA, 1584 bp, Cannabis sativa
ttaaacaagctccaagagcctggtttgctaaattaaagaacactcttctcacttggaacttcaggaactcaagggcagacacatctctcttcttctacatcaacaatggatgcatcattttagtcttaatctatgtagatgatattattgtgactgggaacaataataccaatctgaacagtttcattgaaaaactgaacaaactgttcactctcaaagatcttggggatttacacttcttccttggcatagaagttgctagagatgcaacaggtatctacctcactcaagcaaaatacattgaggacctattagagaagaacagaatgcaacatttgaagccttgccctacaccaatggctactggtaaatctctttccctcacagatggcaaattgatggaagaaccaacaaactatcgaagtctcattggtgctctgcagtatcttaaccataccagacccgatattagctatgctgttaactcactgagtcaattcctcaaggcacccacagtctcacattggaatgctgcaaagagaatcttgagatatctcaagggaaccagtacacaaggcctacatcttagctgctgtgacaagctcgatctgatgggtttttctgatgctgattgggctagcaatcccgatgatagaagatcagttggtggatactgtgtttatcttggagagtctttagtctcttggtcctcaaagaaacaatcagtggtgtctcgttcgagtacagagtctgaatacagagctcttgctcaagttagtgctgaactaacatggattgaatctctgctgaatgaaatcagattccctctcaatgcctctcctataacttggtgtgacaacatgagtgctagtgctttagcctcgaacccagtctatcatgctcgcactaaacatattgagatcgatatacattttgtaagggacaaagtgttgaacaaaaagctcgaagtcagatacattccctcagctgatcagatagcagattgcatgacaaaaccactctcacactctcggtttctctacttgattggcaaactcggagtgaagaactcaccctctcgtttgaggggtggtgttaagaaaattgactgattaatactctgtttagtactctgctattattacttttatcattagtttgttaattactgttttattggtgtttaatgtctttgtacggattctgttatgttgtctcctttggctcctacactagggccacctgtccacttgtaattcatcctcgtaattccttttcagaatataaatagtaaaggatgtacctcagcctcctttgagctgagaattgtcttcaatccatttctgtgtatatttcaacttggtatcagagctccatcggcccgtgccaatgtctgctcaatctcagactccccagggaacaaccacagttgcagcaggtgctgcaagctcccaaacacccaacatccagccaaattacactcagcctttcaataccctaaaccaaccctttcccttaaaactcgaccgtaagaactatgtgctttggaaaactatggtctccacagtgatcaggggacatcgc

SEQ ID NO: 48061 - DNA, 1831 bp, Cannabis sativa
  modified_base (314)..(317): a, c, t, g, unknown or other
acagcaggctcagccagtctacccatatcaatggatgatgggggcaccgacatctcagccgctacaaccaccacatacatcacagccggtacaaccaccacagacatcacatccgctacaacaacctcagacatcacagtgccatccatcgagtcatccagagttcgatgagaacgagagatcaaatgactttttatctcagttgtagaactaaaaggctactattatattttttttgtaagaactattataatggtggttttttcttcaagttgtcttagttactaaaatttgtaagaactatttaattttannnngttattgtgctacttattaatgaagtaatttaaatttgatattaattattatttttaataaattaaaattaatattttaagtaatataaattatatatttttttaatataaaaacctttaggcgcgacattgttgcccctaaaagtcaattataacaactctgacaacaccttttaggagcgacattctaggtattactaaaagtaaaacacgaaattcgtgtttaacttttaggggcaacagtgtcgccccaattgtcaggcgacttttttgtcgcccctaatggtacttttaggcgcgaacttttagaggcgacctattaggggcgacatgtcacctctaagatacattaggagcgatttttagttgtttaaggggcgacttttgtcgctcctaataaattaattttttgtagtgtataaacaaaatcatacacttataatttacactatcaaccatacacatatatataaattcatataccaattacaaaatttttcacaacacaaaaaataaaataccaacagaaaactaaaaacacgaacctcttaatttctggtagaaattttgattcctcctccgacgttccaaatcttcgttatatattcggccggtcgtacccaatacttaaaccaaagacaataaaaaaataattacaaaacaatttaaaaacaaagataaataataacaaaaaaaataatattataaaagaaacattacctatgcaatggtggttcacgacaatgtaattctggcaaaaaatggagaaatggctggagatagaggaggagaagagaaagggtggtggaatcgggtgggaaaatttgggggagaaatgaaaaatatttttagagtgaaggaggggtcttttataaagtttcattaccggcgggacccaccggtattaataggggttccacgggtaataaaaaaaggtcagattcccttactaataccggcggaacccgcctctaataatccgttggtaatagtcattttaaatgtcaaattcccgcccaagtaattataggcagattttctgccggtaatactcttattttgccggtattgctattttttgttaaatattattatttttttatttttaaaaagtaataccggcggattaccttttctgccggtaataacctaattaatactggcagtttggctccgccgatattaatttcgtcactattgctatattttcttgtagtgtatggattcgatcgcatgccctagagacaagagagagggagaatggtggtggacaccagtgtgggttcgtgggtgtgagttggtgtgattggactgagtttgtggtttggggctaagtttgtgtggtttgggtttgggaaggtttggggaggaggtcattgggctgccctttagacacgacattttaaaattgtcgagtataggattatatatagggaaaaaaacaaaaaaatacaaaaaaggaaaaaaaattacaaaaatactttgggtcggcccattaaacatttatacagtcc

SEQ ID NO: 48062 - DNA, 1560 bp, Cannabis sativa
gttcttgaatgcagaccatttatgtcgttattacaaatatgctaggggtatctggttctgatgttcctctacagttatacgtggcatttttgtaaatttttgtatcaatgtaaacttgtgggtataataaaattaaaaagaagaaatttgcacaagaattcacgaatttgtgttttgcataagctatgttttaaataagtgatcacaaattcggagacgtccaaacttcttagatcacttgggggtatactttactatcctcaaaaacatatgagtgccctactaattgctcttatctcatatcctaactacttttataattgattcattactttaaattttttttgtaaaaatggccaaactcccggtcaaaaatgttagttggcattttgatacgtcttcaaccctccttcttggaaggaggaactacttaaagtctattgtattaccaatttagttctcacctttagtcttggaagtgaggccatagtttggattccagcatgtcttcgacccaagaaggaggaactgcttgaaacttgctacatgcccaatttggttctcgtaaaagggcacaaccaatgagttttcaaatatgttccttgagaaaggaacactactcgaatacaattatagccgccctagtctggtgaccgtactgacaatttttttctacaggaagtgagaaaatagaagcatgtctggaaacccttaatggtcttgcagctctctcataacgaactcaggacaatccatctgagtgatgaatcaaccttgtcaccctaatcaaggaaggacagtttaagcatcacaacaagcccaaccttgtttccctaaaaaaagaacctggctagggctttgttgcatacctgatcctccttccttcactaatccaagaaaaaaaaaaacacacacacacacacacacacaataaaaacatgttgcatatccggcttgaggtgattaacttggagaatcatagacatggagtaggcttcgtaacttctaaagcaattagggaacacagtttgcaattcctccaggaaagaacgtgtaatattgtatgctttaaaaggttactgaagtgttggtcattggaaccaaacacttcaccaagttctaaaagtcaacctatcaagcaaaaaacaaacactaaacttgaaactaaattaaatataaaagccaaatgaacatttctaaggctattacagatggccctgcggttagggcattactaaaattgttcccccaaaatccaagttaaaacaaaaaaaaagggaaaagaagaagggtatgaatgaattcaagccccgagccttcaggtgctgctagatggctgggggaggtcccctcgcgcaatctctctatggtctcccatcgatgctcactaattacgcgaacgccttgtaggagaagggcttgttggcatagttgacctgtagcaactctttctccttcttcaagtcattgagatctctccttagagcttcattttcacctagaaggcccttgttggcagcatgtagttgttaattatcagattttacatgctcaagttct

SEQ ID NO: 48063 - DNA, 3116 bp, Cannabis sativa
ttatgggtaaagaaatagatttgataacacaattaaacatctcattataaaattaacccatttaataattgggagtgagcattatttgttatttaataatttgtcaaagagttgcacatcaatatacgtgcgaaaattttaataccatttgtaagattattgtgaattattcttcttatcatacacttcatcatcttattttattttctaaccaattaacttcaattataaactaaaagcaacaacaaaaaacaaaaaaaaaatctaacgagtttgataacttggttagagttgaaacaaaaattacctactagaaacagacaagctaatttaaaaggaaactaactgatgccctagagtgaggctagaatgaaaatacatggcatcaattatttcataataaccaacatcataataaagtgaagaattttaacgaaaaacacatatggcgtcagttattttgtaataactgacgccgtagggtttatataactctcatctcagctttcgtctttgtcatttcatctccctcaaatcgcaaaccagagccctttcttcctcaaaactcgcaaaaacctcgcctatttcttcatttttcatctgattttacttttttttttatcttgtatttttcatacccaaaaatgtattcccagagtttgatcgtattttgttttattttttttaggataaactgagcttagagatggtggttgtggtggttgtagctccgatcgtcgcttttgggggaaaaaccattaacgcttatcaatgtataaatttaatctctaataattttattaatgtaaattgctttatttttgattttgtaattttttttaggatttttctagattgttaagattgtgttcttatgattgtgtgtggtggccgaatttctataataagataaaagtctaaactttaatagttttgttataatttttttagatttgatattgaaatggtaataacactcacctatatttatatatataattggataagtttgggtatgtatatatatgcatacatataagcacatataaatgggtataaacagatagtatttggtgtggttggttttgggtgagagaggtaaatattagttattgggtgttctagttatagggtatattattttttatattaaatatgttaaatgttgtatattttaactgttatgtccatatttcaagccataaatataggcataatacgtgaataattggacacaaaaattatggaaaactcaggataataaatgaattatctcagagaaataattaagaacgagcaatatcggtctcgcattatgtattggtaataagatagcgagataagcaacgtatggcgagataataatgatagaagtcttctcggatataacaggtcgaaactgtgtcgctagaaagagtagataatgagctctttaagagctttgcaactcattaacccacatacttgtgagtatgttgaaagattaagagaaataatcaaagtaaaacttctctaattatctcaaaagacatagtccaagagtttccgtgaaaggctataggaaggacaaacatcttaactagcatttcgcagaatgcgaccaattattcttgagcactgttgaaatattttaccttgacaataaaagaatacttccagataagatcaaaaaatagttatcaacggttattttattttatccacatgttgtaaacatgaaactaaggtcgatcttaaggtatatggggtttaaggtaaaattatatatagtttaattaataattattaaaattatagttctaaggctttagtgtaatggtaaagtttttaaaaattcttaagagcttgaaagttcaatccttcatagctacatattagataattttttaaaaaatagaaaagtagagattgggaattgatcctgaactcttcgcttaaatgaaattatttaccactacaccaaataatatttattatattttcttcttatttaatattttatctatattaataataatttttttcacaatttcggggtcctgagcggtcaggggcccaaggcacacacctagcttgcatctcttaggcccggctctgcatgaaacgtgagaattgttcacgttttatgaatagataagatcgaaaagaataactatcatagttaaaacacctataaatagggacaaaacctaagaaaaaatatatcgatcattctgggaaggaaaaatcctgtgagattgagtgaatattcatagttattcttttgtaatataagtacattactaagaagtactcagaaataatacagaaataatagtgacttgtggagttgtggagtatgtagattttaactacaaaatcacgtaaactcatgatgtttcatatatatatatatatttattaagtataaatagttaacttttatttacaaggcttcatttattggtaataaaaatttgagttaacattaattatcaactcttttttttttttttcattcctattcatgtattttttttactagttagttactattagtaactagttactgattttttattcctattcatgtgttattactaactagttactcattagtaactaggtactcataaattatataactagtaagtagttaaataattacatttttaattttgcagtatttctttatgttgtagattctgaggttaatttgtaaggatatggcttatttagtgttgatcgaaatctagctagctcgagataattaattatgaatacttaaaagagtttgaatattttaaatattcattcaatagtgaagtaagtctgcgatatattgtactacggtcggatgagtagaataatatgcttgttaattagataagtttgaatatcttaaaggcctatcttaaatatttatctgtagtgaagtaggttctgcgaatatatgtactgcggttagatgggtgccaaatttttatattcctaaatattactgtgattgttttatatattgtttggattgtattttgttgttattaatagctttaaaagttattaactacttataatgggttatattaatatagtatttgacatcctaaattttaactaacaatgctcttacataa

SEQ ID NO: 48064 - DNA, 1205 bp, Cannabis sativa
aatatgaatagctataatagatagatagagagctcagtagatgggacccacagaatatggttgagttgccacgtggcgagtgtacggtgaatctgagtgcaccgaattatttaagctgccggcggtgattgtagtaaataaattctcgtgtaattgagtatgtaatcatttggttcactgtggtaaggcctacgtattttacggtgattctctttaactttaaccctttatctacgtggaaaatgaattttatttttatattttcacaagcttacaacaactcacttttttactctctttttttgttttgttttttttaaatattaatcttttaatagtattttatttactgtgtacttttttttgtttgtttatttaaatttaaaaaagataaaataaaaatagtgaatattcaatgcttgtaatttgtaatttctatataaagtaggtaaatacaaaagtgtcggtaacatggaaattctaaagagtatcctatttaatacaaatgggattttttttatatttatattttaaagtagttttttttttatttttataaaaatttatatagcaatttatataaaaattattggagtaatcccaacagtaaaaataaaaaaaaaaaattaaaaatattacataaaaaataaacatatgtaatcgtttaagttaaatatatacagctatagtaattgtcccacatatgcaaaaagtaaaaattaaaaaaaaaaatgtccagatgtgcatttacttacacttcggatcagatattaaaaaaaaaacataattaatagcataatattttcaactagcaaaaacaaacaatatctaataaaatagccaaagaaaatgtaaataatatctttttttttttctatatatatacttagaaaaaaaaaacccaaaaacgtaaaaatgattatatcttttatacataaatattttccaagatatataataaaataaatcaccaaaaaaccttatgaaacgattttttttatgagtaaattatttatttatttatttagataatgtaaagattcctttttctcattttacaatgttaataatatttaagattttttttcaatatgtattcaatcaaatacattgtaacagataatattgaattattctatatatattattctcgattgtgaatttaactaaatccaaacattgcacgtagtcaattattctgaata

SEQ ID NO: 48065 - DNA, 2662 bp, Cannabis sativa
gttgagtgtcctaagtttttcttttcttatgagagagttaatgattcacgaggtccttaaatatcttgtcttgaacattttattactatgtctatccaaggcaaacatatgttccatcaattattagttttgtagttattattcttgtctcgcataagactaaacagtaagcaagtttgaacatctctattaaacatatatttaattcaaacgagttatttttattgcatttaatgttacaatgtccttattatattcattgaattggttcacattctttctataggacacgtgtcaggttttggtatatagccgaattttgggtaaaataattgcctcctaaaaagtaatttttaattaaaaagacctttttaaatgatcataggggtataattgtattaaatcctttcgaaaattttcatgctttgagttttggcggttcataatttcgaggcacaccattgaacatttaatgctctgactgttcccattttacgattttcccacccgttagattagttttcttttgatcaaacggtgatcagtaattgggtataaaattgaaactggcaagcccatttcgccattcttcttatatgagtagttgataatctactacgtctttcacaagcagtttacaatctgcttaagttattcgcaagcagtttattgtctgccatatttgaagcaaacttcaaatattttgaataattcttttaagaactactttaaatattttttgattgattatatgaatagttaatcttctattcatattttagtttttgtattattttttaagatatatttgtatctcgtttacaatacatactataactatgtgaaccgtgatatattcaaataacatatagctttttatcgctttatgagaaagagcctcacttgcaactgctaatttaattttctctttaaaaaaaaagttttttaattcttgactttatactgtccaaagacaattttaatcaattatcctttctttatgacaaaaaaattaatttttaggtttttggcaatacaatatatatttcaaagtagaatctagttattatacacatatatgcttccaagtaattttaaaagaaataaaactttataattacttgaaaaaattcaatttaccaaatcaaattgagatgctaggtgtatctgcattagagttttattctcttggaatttgttcaattataaaataatcaaacttttccaagttcttccaaattttctctaaatatttagccattttcagacctttcgcttggtattctcccaagaaagtcaagattccataattgtaaattaaattcacagtcatctacattattaacttcctaaaataaaagttgtaagaatcatcttctattagaaactttaacgagtgaataaaaaaaactaataacatgaacaagagttcatgattacttaggattcataccgatctactaattatcatcattgtgatatgaattaggtctttatagtaaacaaaatatttgataaagacacttaactattggttcatgtcatatactacatgagcgatctgaatcaagattgcttgcatcgaataatgaacatgtaaagaccgcttaattttaatataatagattagcagataattagggtttaattatgaattagattattaaccatgatttatgaatttatggagatttatttgaattctaggtgtgttatttatgttttatatgaaatttcatggttttcatattttgtgctcggcaacattggaatgcaatgtttggccaatagaattacattttattatggtttagtattttagtggtagcaaggcaacctatacaggcattgagaatgtcggggatagtcgggattttggaaatgaccaaattacccctaagtggcatgtatgtttttggagtgtgcaagggtaaaatggtctttttaccttatattctttatgtccttttgtggatatactttaagttagtaaactgattttaatttaggtttaataatagagaaatttaggattatccttttacaagttagaaaaaaaatagtaaactcattctctctctcttcaactcactctctctttctcaaacccttaagaacttgcaggggattttgattttttcaacttcaattcagaggattctagcgggatcttagtgtttcaattcaaagtataaccccttaacacctttctctttgatttctaagttcttgcatgttcttctaaggttagggttttgtggtgttatatagtgtttgaatttgtattctaaagttaaattgaagttgtttgagttgatttgtgttaggtttgttgattgttttgatgtttgagcaaggtttgagtttaagaactcaagctttgctctctaatagtgtttttagtttctaagttgattgttgagttttattgcttaaattgggtttattgtggtgtaaataagtttttctagaagttcttgtgtagtttggggttgaattgaggtgtttttggtgtttttgatgtttcctgcactgaaccgatcgaccagttcagtgggacttataggaactaaaattttggttggtccctaggaaaccccacagaaccggtcttccggttggggcaattttgggaaccctagtttttcccttttttgcaata

SEQ ID NO: 48066 - DNA, 2290 bp, Cannabis sativa
atatcaaataactctttactcaagagttatcagatacctcaaattggtgttggacattacgggagcaggcccccataaatccgtatggattaactctaaaactttagtggctctattttcagataatttgaaaggaaaagcatgggatttcccatatttgcaagcctcacaaaacattaaattttcattaacataagtctttacacatgcactattcagcacttgattcaaaacccttgaagaagggtgacctagtctcctatgccataggtctttggaggaaatacaactttgattaactttaaaatgaggctgtgaactagactcaactaaaccagtaaacaaatttgaacaaaaaccagaaagttcatgactcgacaaaggtgaaccgattgtggaagtttggctttgagtagtgtgaccttccaactgatacaagtcgtctttaagtttcccttgcagcaccaccatctttgttgctagatccttcacaaaacacacatcagagaaaactcaacataaatttattgtcagtagttgactttgaaatgctaatcaggttctttgcaatattagggacatgtagcacatcagttaaatgcaaagaattaccacaatcagatttaaaaataccagaaccaacatgtgagatagcaagttgattaccatctcctaccgtcagtttgtccttaccattgtaggtggtcttgttggtcatgttgtcttgatcagaggtaaggtgattgcttgcaccagaatcggcataccacccttcatggtcaacaacttcaggtgtggcaatgaaagcactagggtcctttttctcttgagcaaaagtgttgtttcctcctggtgtgaaacccataaaggactcatcgtatctgttgtaacaataggcagcagaatgctcatagcgccaacacacttgacaagttggtttggtatttcttcctccatttctgcctcgaccacgtccagggttgttgcctcttccttgaccattattgttgtaaccaaaacctctgcctcctcgaccattgttgttgtgattaggatacccacgacctgttggctgtttgttggcaagcgcagtagagggaccaataccagccgagttcgaattctttccattagacaccagcaattttaggcgttcgagtttgctgtcaaaactcagcagagtctcttgcaatttctgccaggttaagccaattttagcttgagcttcaagttgacacacgattgttaagtactctgcatcgaggctacttagaacatttgaaattagatgagattcggggtaaggatccccagcaagagctaaactatctcccagtgatcttttctgtcgtaaataatccaccatggctttgcttcctttgcaaatagtctgtatttttgttcgagtatcgtccatcttggcccgtgagtgcgctccataaagattctccaaagcaacccaaagagttcttgctgatgtacatcccataacctctgttgtgattgcttcagtcatggacccgtaaagccattccatgaggagttggtcacaaacgatccaacgctcatagtcaggatttagttgttgctcgaaaatgtcagtcgactcttcatgacctccaggaatagcgataaattctgcacggtagaccttagttcaattgacatatccttcaagtcgatgtcctctgatgattgttgagaccatatttctccaaagtgtgtagttattcctatcaagtttgatagaaaatggttgtgtaagagtatttccaaagggtgcgttgctgaagcctgcagatcccatttgagcaccatactgaacattaccagtggtgatctaaggggagctaaactggcctggggtgttttgatttgcaccatcatcgacacctgtgtggtgttctcctcggcgtggagtttggctaccattagacatggcagtggcctatgccggctctgataccaagagagattataatgctattgagaaatacaaatgctcagctcaaatgagactgagggagacgaattgaatttatagctttagggttacaatcatttacagcaggggaatatactctgtctagctgacagagggaaaagatatgcaaaacaatacaatcataacagaattggataaggccaaaagcataacagaaaatagaacattctcagccccttctatgcataaggatgattaaacactaatcccctaattacccaattgatcatatcttaacaagttgttggatttattttaccgagatctagatttaataacaagtat

SEQ ID NO: 48067 - DNA, 1285 bp, Cannabis sativa
gttgagactcgtggccaaggcgcaccacagtgtctctagaaggtttgggccacatcccgtgcaagcggcatactgataagccaagggaaacgtacctattaacctcttgaagcttcttaaacgcactaccgggttagcccgataatgtccacgattactccaactcatggagacatataagtcccctcgtggtcctcatatgcccgtcctaccagtcccgctgactagtagtagctcacttagcaccaaggtgccagagggtggtggagagctgacaccagggtacccccttaaagagcattctgagcttttagccttctactatgaacatacatgattttggctctgtagacatacggccaaaccgcataccaaatcacatagttttgccaattcgattgcactattgtatatgtagacccaaataaatggtgaataccaagtcacgtcccgtttcggacaatattgaagatatttacgaaaatgtcactgcatacaaactaagcatcaccatgccaccagcatgcaccacaacatgcgccaccgcttgaccgccacttggccaacttgtgggcatcacttagcttgtaacgtgccatcttagcacgcacgttacattaggcaccacatacaccacaataaaatgttgtagttgaaagaaagaatatagtatttcttgaaatggtcaattatatgatttgtactcaaagttaaattccaacttgtgggggaggcactcttaatcatgtgtcatattcttaatagaatacccatgaagaagaatgagatttctccatatgagttacgaagaggaatgaaaccaaacattgattacttcaaagtgtgggagtgtcttgcttaatgtaagaagaccgaaccaaatagaaccaagttgggttcaagggccacaaaatattcatttgttagttacgccaataatagtaaggcatatatgctattggatgtggaatccaatgttgtcaatgaatctagagaagtggaatgttttgagaataagttgtatgaggacaactctcaaagctctacacctctatgtaagaatattttctatgaaaataatttcaagcctttacttctaaaaggagatctcaagagtagaatactcctaaagttgtagaacaacccattaaacctaggaaaggtcagagggttagattagagaaaagtctaaataatgatgacatagattctaaagaatttttatccacatggtagaagtagagaagaagtaataaggaaaattcctttaatacttcttattgag

SEQ ID NO: 48068 - DNA, 1276 bp, Cannabis sativa
aactatggttaaactataaaaaaagccatataaagtgtccataatcaattatgccatatttatcataaaaggtttaaaaaacccataccccacgtaaattctacttccttttaactgctgcttaataatagataccctccataatatttagaatttactctttaagaattatatcactatagagagcttattataaattcagtaaaaaaaatacctagcttatcataatatatttagtaaagtgatataattgagacaattgagttgcatttgcttcttttacagccgactttatgttgggcttcaggattcatcgttgaatttggaggcccatttaagaaaataaagacacaataatgacattattactgttgaatgaacacgtaggattattttacaaatatacaaaaacaactaaaaaaaaattataaaaatatagtacgtaattttaaatatttttataatttttataatttatttataaaaatataatcttttgatttatttttatgttataatattgacgttaatttgttgtagattttttgttatttttttgttacttttatgtagttttcttattattttagtgatttatctaattatccctattttactatacataagagctactcgagatataattctttgggagaatataccgtgaagagtggatattgaattgctattcgtctcatgggtttggatcgtgatgagtccttgtcagggccgtcctcttggtggaaatatttatggagcttggacattcctcctaaagtaaatgtttttatttggaaggcgtgtttggattagtttcctaattctaactcaaatcttatttctcataaagttccgactgaccccatttgtcctctgtatggctaagacgaggagccttcgtttcatgctttgtggggattgcttgtcttcgtctagtggtgaaaatagtggattttgtgctgcctgcttcttccttaccaagggtgaatatcttatctttctaatgagctcatgagtttattcttcataaagatgagatggcttgggtattggagctccaattgcgtataaggtatatcgtcgaaatgattgggtacatagtcataaattattagatgtggaaggtatcgtgggttgggattccacctttgctagtaatgatcaagaggcaaagtcgactttaagggcttgtttggaacgctgtattaggtcgtgttgtattgtattgtattgtattgaattgtattttatgcaatatttttatgtaaaactatat

SEQ ID NO: 48069 - DNA, 1814 bp, Cannabis sativa
ggtggtgctggaaactcgaacaacgccaatggtcaaaatgcttctcaagctgctcagccgcgtggtcagattcatcaagatccagtctattttaatcacagcatttccattcgccttaatgatcataatttcctgctatggaagcagcaggttcttgctgcaatcaaaggaaatcgcttgttaaagttcatcaaagagactccccctgctgaatttctcactgccgaagatcgagctatgaacagagtaaatcaagcttttgtcgattgggaagtgcaggatcagctcttggtttcttggttactttcgtctatgactgaaagccttctcactcggatggtcggttgcaactcagctcagcaaatctggtctacgttggagaagcactttactctgcaagtgtcttcaaagattctggaatttcgcactaagttacagaacctaaggaagggcactctaagtctgaatgactatcttttgaaagtaaagcaaacagtggaccttcttgcatgcatctgtgggagaggtctgtcttgagtgatcgtgatcatgtggcagctatctttaagggacttccaagtgaatatgacacctttgtcatatccacaaacactcgaactgaacagtacacggtgggagagattgaagctttgttgttggcttcagaatccagaatagaaaagtctggaaaagagattgatctcagtgcgaatttggtgtccaatgatcctgattctttgatggaggcaaacctggcatggagaaggttcaggcaacaatttggaagaggaaactcacaatacagcaacactccaagtcagaataatcaatctggaagcaggtactttactcgtggagataataactctggtggaagaggtaatttctatgctaatcaatttcccaatcaaggtgttagatctggtatgaatatgaacaataaagttcagtgccaattgtgtttgcgtcttggccacactgcaatggactgtttttatcgttttgataagtccttctcaggcctacagacaggttcaagttctcaatccccacagggagctggatctttgaaatctcagcagacacaggctaatctcaccacaaacagtgcctcctgtgactcaagttggtatcctgattcgggagctacaaaccattgtactccacaagctcaaaaccttgccaattgttatgactatgaaggacatgatcaaatgtatgttggagatggttcaggtttgtcaataaaacatattggtcaatccttttttactcctcagcatgcatctcactctcttgttctaaataacttacttcatgtccctgaaattacaaaaaaaccttattagtgttgctaaatttgccaaagataataatgttttctttgaatttcatgatgatttctgttttgttaaggacaaagtgagtcataccacattgctgatggggacacacaagaatggcctatatacttttgatcaatctcaacttggaaccttacattccagccctcatcccacccccaactctcaggttttccagcagcaaacacaattccaaaccagcagttctatttcttctcagccccaatcaaaatgtacttttgttaccactttgaataactcttcaattactgtgtcaagttgttccaagtgtaataaaaatgtacaaaatagctttactttgtggcacaataggcttggccatccctcggagaaaattgtccaaactgtacttaaagattgtaatataccagctatgaataaagattttcagttctctatttgtgctgcttgttgccttggtaagataca

SEQ ID NO: 48070 - DNA, 1519 bp, Cannabis sativa
taaaattatttttaattaaaaattaaaatcttaaaaatttttaaaataaaaaaaaatcacttttaatatttttttaaattattttttttcttattcaatcttttagacttcgaccaactcacacctagaccccaaatctagatccaacagtactgacccaacccccggaccctaatccaaacacaaactcggattcagactcggacccgaccccgactctagatcgggacttggactttggccctagacccgaatccatactcgagctcgaccccaaacttagacctcgaccccgaatgcagacccaacctgaacctagacaccgacccctggacctgtccctatactctgatcctggacccggacctcgacatcagcttcggatccgacttaaataaaattaaaaaataaaataaaaatattatcaaacgtcgcatatatattattttctatgtatgggctaaaataaaaataaagctaattaaaccctcataaacagtaattttaataaattttatgtataaagtatataaagtactagcatatgcatcatatcatgtataattaatatttttctctttatcttcaggaaaaaaaaataccttcatcaagaatttgattcggacgacacttcactcacccccatatatgttgcagatcgatcgatacaaatggaaattccatattttgttttttttttctaattttttaattttattttacgtataattaagctagctagggattttttttttaataatatacataatctatttctgattggaaattgaaatgtgtgccaacctcgtgttaaacttctaataattagattattttattaatgttaattaagggaattttttaattaatatttatttattatagctaattaatatttgttatatgttagtagtagatactagataaggatatggagaaaatcaagcagatggacatcatttttgctttttctactcattattatatattatcattattattattattattattattgcaataatattaattatatgctttgggataacggccttatatatctgtactctctctcctttacacagatgaaatgtagctacattggatcgaagactagctagtactagtgtagtccaacattattttagtatttaatataatataaataggattctctctccaaattttgattattattgtatatttttgtttttaacttttatatgttacaaaaattttaattagataaaatataaatatattaatagtgttctaatagtaaattataaaagtatatatatgtatattattttaaagctattatttgtaagtttaatattaataaattaaattttaaatagttttaaagttatttaataagtctttcctataattaatatatatgtaacttataactatataagtaaattattttaaaaaaacaagtaaaatataattaaagaaaaatatttataaccaattatataattttgagtaaatttttacaacaggaaaaaaa

SEQ ID NO: 48071 - DNA, 8663 bp, Cannabis sativa
  modified_base (6623)..(6626): a, c, t, g, unknown or other
  modified_base (6970)..(6972): a, c, t, g, unknown or other
agagccaattgtacaactctagcagcaggatgaccaagcctattgtaccataaagaaaacaaaggattgacagtagacatttggtgagtgtgggattgaggagttgaaggagctgacagattaatttgtggtgagggtggggcaagacttaattaagtatagtcaaatttgtatttcccattctcaagattcccaaccaacaaaatcttcttggtagcacgattcttgacaaaacaagaaaaggggtaaattttaaaaaatatgtcattatcctaagcaaattgtgacactcaataggttctaagttatggaaggaacatgcaatagattattaagagtgagttgttgagaagaaaaaggaaaatggataagagaactaatgttctcattatttaagtcaatacctttaccaacatacacttgttcattacctacataagatgtgcttgctacaaggttcatggaatctggtgtcaagtggtaagtcacaccagaatcaggatactagcactcatcagtaaaagtttatggagtagcacacatgacttccatctcaactaagtgagtggtggcaggaaaattagtgaatgattcaggacctatgaataacttatcaaaacgatagaagtactgttttacagcgtgaccaattttatgacatagttggcactgaggtttctgagaccattactggttctgaccacgaccaaaattaaagggaccaccacgttgagcaggaggaccatcgggattgtaaccataaccaccacgagccataggataccttgcatatccatctggtcgagggggaccaccatgaccaaagccaagtggtacagttggtgtaggataagcaagacaattgtatggattgaatccaatgggttttgtgtggaagagattgtcctatgctttgagaatatcaagattctttgatgtttatcaatgcaaacagattgagccattagaagcacttcaatctcaatcacaatgtactcatcttttaactgaggtgaaaaaaacatcatattcaaagggtaaatggcttcaatatgatcttgtagcgtctgtttgtgatcgatggtagcaagaagatcaacaatccctttaatcttgagaagatagtcattgagtgttcctgtcatcttcgtattttaaagttgagttttgtatagacctatattcgcaacattgagtacagtatagtactcataggagagcgataggtttgagcagtggtatcacaactggtcatacgattggtggtcttttctgacataaatgacaatagccaagaaaccagaagattgtcttgttggctcccaatcttcaaactctagattgatggtgttggatctttcatcttcagctgtgctccctttgatcaatgccagaacttgatgtctccatgataaatgggatgcaatctaagtaaaggaacttgttggtcgttttgtggttgagcattgttaaaccttttctgacataaatgacaacaaccaaataactagaaaattgtcttgctgctctcaatcttcaaactctagattgattatgttaattctagatcgattgtgttggatctttcatctgcagcggtgagcggagctcgagcatgatcaagatacttgtaaaggcaatgctccctttgattgatgtcaaaacttgatgtctccattataggtaattatgttcatcaagtttgatagaaagagaatgtgtgaagaatgagatacaatctaggtaaaggaacttgttaattgttttgtagttgagcacaaggttgcaagaatctccattgacgaaagaaaaaggaactctgacaccatgtgaagtttcaatcttttgagaggtaaaattgtatttggtgtattgattgtaaaaaagtgcaagaagagtttatatacacgagttaaaataacaggaaacatagcaacccttctaacaactaagaaacactcaactaacacctctgttagtaaacagaattaactaaccagtatccttgacaagaaccaacacaatttttaataagcagattgagctacatctacatgataaatataataactcaacatacagagccttttatcaggttggaagtacaaaatttagcacttcgcaggatttcattctaaggtccttcccataaattaaacataaaatagagcatgtacacgtttaaaattcatcatctgattcatcttcatccgaccaaccaaaagtagtgactgaagggggcttatactcaggcaagtttaccggggtattgtcggattgcaaatactgctttaacacaaaatttccagattgatcgagaatttcaacgtcaaacgcaggtgctaacggcaggcccagtacttgaatgtgggacacactgcagaattcattaaaattgtaataagaatgcataagtagagcagtggaaatatgactgaaacatgtagtcatgtgattcactaaaatttctagcattctaggtttcccagttttttctggtcagatagaggaatactactgtcatgaggaatactactggcaagtattctaatcaaataaacagattgtagtaatgaacgttatcaaaagtatcttatcctcaaatgcaatcgatctatgatctatcttgaaagaaagtctgtagacaacgactaaaaactaaaacaaagaaaacagttctacagggatcctattttgtccactacatgtagcagcaaaaaaaaaatatttgacctagaatattagcatctcttagactcttaccaacagagaccgtccacatagatatagagtccaaaacaacacagtaaacatcattggactatgctatttcgcatatttgaaactaaaatgcgttctttcctaatatcattttctgatccattccattaataattcatcacataatgacaagttcatactaaggtcttcggatagtaactaataagtgaaacctatgggtgcaagcttctccaaaggctcgtggcacttaaaacattttaaacccactcatgtattgaagcacatgttatgcaggggaatctttaagaaaatgacaattgaacaccaaatacatggtgatacgttggctcacagcatattaagaaatgaagaaaaagaatatggaacaaaccatatatagtacaagccatccaattcctgtgtctgtatcctacccagtagctcaatttgcaaatatccaccaatgcaaagtactggttttggaagcttgaacatctgtaagctatttttctgtaaatgtgtggataggataaaaaaaaaacaattaaacaggctaaacttatgatccaaaaaaaaatcacagctgcataaaaatgacaaggcaaaaaaaaaatctgtattgtctaattcgcagctacatttagacaggtgttcattatcttctaaaattgtagaactgtattgacaaggccaaaaaaagaaatagcagctacataaaaatgatccagcagctagtttcatgttcaaaaggacaaaggacacaaaaataatgacctacttgtacacaaaataaaaaaaaaaaatcaactgttcatcagagaaaatttccaaacaatgcacgttgtcattctcctgctgctttatttttatttttttttgtagcgttttgttcattcagtcattctaatgggaatggtgaaaacatgtaataagaatagtaacgggaatggtattataaattttggcttatttttggaatggtattataaaagtttggtttatttttggaatggcaatggtgatcaatggtctatgtacataaatatccttactaaagtataagcagtggcggaagttttgaacttttgataaattactcttatatagaaatttctaaataatttcagtttggtccccataaaattaatttttagtagttttatccttatataatttatattttttaatttttatttctaatatttttatatttatccccccatattttttagttttatccctataaaatttaaaaaaacttctccaacaaagttaatatgttttaatcaatatcctatttatataaataaaaatttgttgccccccctaaaacaaacagctggctccaccgtataaggatcattttgtttttatataaattgtgtaatggtgataaataggtatagggttgtatgtgtattgcttattcatataaaatggtgattacaaaattttcaaaaccaaaacaaacaatgaaatcataatggtgatttcattacggttacgattacaccaaaccaaatacagtatagcctaaagtgtgatctttgtaaattttatttttcattaaaagctttagtatattgcaacacttagttgtgttaccctgtacggatgttaatgagcggggggaaaaaacttcaaatgtaaattaaaagtcttatttctttaatgtagacagccaatgagtgagagagcacattatgagtggtcagggaaaacacaaacttaacaaaagacatagcaacatacatagaggaaactggttataacagtctccagcacagcaggccaagacatgagcaataatgccacagacacgtagccaatacaataaaattcaaaatagaaagtacggtaaagtaagtagcttaggcacaagaatatacctgagccatctgaaacacttccgacgtgtaggtccacataaatttatcatcacagggttctttcacagggaaattctttaagtcaatgggggactttggatggcctaatcgaaatcgcatacctctagctgaatatattggtagaccctcctggaagaaagctattgacagaagaaagcatttaatttgtcaacaaaaaaacaacttaaatccgaaaataaattttcaacaatacgaattttgaaaaatatgaccagataaaaagactaccttcaaatggcttaatgctgatttcggaaatcacacaaatattggaggctaacttgtatatcagtgtctcaggaacctcacaattacgttgtcctgtacttgaccaatatgagattctcctagaaattatttctctaggttctagagtattatcaatgctttcttcaggataattatctgtgctggatgcactaattgcctttgctaagcaattctcaggaacaaaagatgaacagcacttatttagaaaagcgtagagtctatgatctctcaccatgctttcttgttccgtccaattgcttgtagatccaaatcccatgccctcttctgtttcaaattgttttaccaccattgtatgggcaactctagataactcaacaaacattcgcaagcacaactgcttaaaaaagccattttccaccactgcataatattgcaaatttcaaaaactattaatgtcgctcaagtgaatgacttctcactaaaagaaatctaattttattcttaacctcaatatttttcattcactaagactacaacaaaaccttggaggggttcaagatacttcttttcaacacaatgtccctaatgtattaatatatgtgaaattacattgccggttcttacttagctcagagaaaagtactacatattacaaatcaaaataaaaaatctacaaacgaggcattctaagtttctaactcaccaaaatgccgccaggatcgcgacactgcactaatgctaaggagatcagaatgttcctccacataagtgagaatttttatcatcatgtcggtatcaagacaatccaacggatccaaacgagtatccatgtgaagtaagtaaatgaagctccgtctctaaaacctcaaaacctgaattgacattgtaaaataccgttcagtggacccaaaagaaatacaactatacctataagcaatgcgcaaaagctttaatccaatgaaagaactgttatattgtctatgttaaagcaatagccacaggagccaaatttaatagcacacgacacaaaactctaaaattgaaaccaacggagcaaacaccaaacactttctctcgcaccgcttataattaaacatcagattcaattgcaatgtttatgcgattacgactataataacattgtaaacatggttcaaattcatattattcgtaccgaaaatgcaattaactgattatgatattcgaactacgagagagagagagagagagagagagtggacctttttcttgagcagctggttggccccaaaaggaataaaaattcgaaaccccaaaccctagagagagagaatcgcaagagacgagagagtgggcggtgttagaattatgtattttgtttctggttgtaatcgttatcgtaagggattgggatggaaggagagtgtgacagacaaggaaggaacgaaggaagagaaaactcctttttcgtcattttttaatattctttaccaaataaaatatacaaaccatattatttaaaaaaatatatatatatattaaaaaaaataataacttaaattaaataataaattatattaggagttttttcatttttacactttaaaatagttttttttttacattttaattaaattctacataaaaatccctattgcaactagagctgcaacctaaattgtaacaaaaaatcgtataggaacgcctattacaaccagcgctgcaaccactttagaaacnnnnactgtaaatttgaaaaaaaaaagttaaaaacataatatatgttgtaattctccattatattatgttaaataataaattacaacttatatttttaaaaagtacaaaattaaactctgagcttaattttttttcaatatgaaataactgctccaataaatataatattgagatacatacatttaagccattttttaatataaaaaatagaggagtgttaattacaatgtcttattataatcttttagtaaatttctatgcttaaaatcacatgtcggaatatttttttgaaattttttttatagtggtattcgttataattatagtattatccctgtaaatttttnnnaaatttcaaatagtttacaatgtcgaaaacatgatatttcagtttaccacgcgtttttaaaaaagctcaaacgtatttttagcactataaactatttgaaatttttttaaaatttacaaagatgacgttgtaagcataacgaacaccgttataaaaaaaaaaaattaaaaaactatcccaatatgtatttcggagacgaaagttgactaatagaataagaaattaacgatagcactccgatatatatttaactagtctcgttataacaattctatattattatatttttatttaataaaaattgtgctcaatatattattttttttaatatgtttaaaaatataaagtctaaatgatcattgaactgactataaacaatttttttacatcacacagatccaaaaaattacatttgccctacttttaatttttgaaaatatattataatatttagatgggcttgaaatattggactacctctgaaagggtttttactcattcgttatctttcactctagctttggggttttctacacaataccaaaatgagtttgggattactttttttttatagtaaagttttatatctctaattttctggtaaggtagaagaatattgtagtgtcgtgttaacttattatttaccttgcgaaaagaaatattaactcattatttgtcaaaagtgcaaatttaactagattatgagtagcattattacaaaaatattttaagtagagttgcagctggaatgagagacaataaatttttaatatcatacaacactaagccccattgagaagaaaaacaagtagggcataatgtacttttagttaaaattttatattgatagcatgatgagaccttctatagcgtgttattaaaaatgtactgtgaatctgtgattatgctactattcaatgtataatcatataaatgacaaaaaacttcttgataattaatcattcaaaagatataacataaataagtttaattgaaatctataaatttattattaaaaattgaaatgtaacaaaaaattgacagaatttaactatgaaattttggataagaattccttttttaataatatatattatttatattcaattcattgtagtttacgtttgaaatattttttcagtaattggctcttattattcagtttatattataattttgttttaaaatattaatttctcttcagttttatatggacggaaaacttagcatgatgacaaattgtgaaagtgaaagtggattttttttttttttttataattgtgaaagtggtcgttataaaagtggtgtagagcatgttatactattttgtacaaatattacatttgacttttttatatataaaaaaaatatataaataattagtcatggcgatgcattctctcactgttgtacttaaaataataacaattgttatctcttttctaaccagactgagccaagctttgtcaaaagaaaattttgagttctttactactgttacttggtaattgtggtacgccaatgctgagtgtgattaacagggatgaagctggatatttctgattgattttcaaaatgtagagggtactaaggaatggacgtgtgtagggatgtaaccaattgggagacgcctgctgctgggtgctgtactagtgactacttaaggctagggaaggctgggagctgctgcc

SEQ ID NO: 48072 - DNA, 772 bp, Cannabis sativa
  modified_base (730)..(747): a, c, t, g, unknown or other
ggccaagctccacggatttgggttctccatcctcctaaaccccagtcatcacctcttcttcaattttcctttctcaccgacgatcgagatcccaaaaaaccaaggttctcggcgtctgtggtccctgttcgtggttgacggcgtttgaagctcgtccgtggttcaggttggtggtcgcctttgaagttctatggatcttagagtaaatttgaaaactgtaaggcttttctttttctagttaaaattgtttctcgatattgttgttattagttactagttactacacttgcagattcaaactcatctcaagatttttttcatgcccaaattctgaaaatattatttattcctataaattttatagtcatatatttattgaaaagtttttttttttttgaaatgttatttatgaacagatttttctttgtcaataatctgaaatgctatatatatacacacacgataacatcaaccaccacaactagcatactgcagccccaattcatgtcattaccagtacgaggaagtgggtagacttgatgttgaacatttgggtctgaaatgggagaatcagtaaatttcaggaacactcgattatctatttcaatggctgtgatgaacttaccatcactcttacgtttgaaggccactggtctattacgcattttgattatatatatcactcttaatatatcttttgcttaattactcttaggaggcgtttggttgnnnnnnnnnnnnnnnnnngaataggaatgggaatgggaatagg

SEQ ID NO: 48073 - DNA, 2680 bp, Cannabis sativa
tgtcaaagttcaggggtaaaaatcataattagccaaaaaaaaaaaaaaaactagtgtaaaatatgtaaagttagggatatttggagcatagtactcaatttagactctattagtatctttaatagaatatgtaagagcatctccaactatgctctttaaaaatcctaacaatgctatatgctcccgtgtgtgagctgagggttttttcttcctcttatctttcttctgagattattatacagacagactcgctttcattctccgtctaacatccgttggtggggaaatggcttctacagagtctaacgccgatgagatggtagctatggaggacaatgttgaactattacgacaacaatttctcgacgaagttactcttgaactagaagccgatttcgagatcagtgcagaggtggctcaaggaggggtcctggcaaagatttttggtgctcgtaaactccctaagagcagggtaaaacagatattgggaggcatatggacattgaaaggaaaatggcgtatgaaaaccttggagatggggttgtggggaattttctttgacgtcaaagaagacaaggatgagattttgaatagaaggccatggattgttgctaaccagttgctgaatctgagggactggcctgacgatggccattggcagaatgtggacatgtctaaagctattttctgggtggagatacatgggcttccaaccccttacttggctgctcaaaactcggctgtcatagggaagaaggtgggaacatttatagacactgatagagcatcaaatgtggtgatcgcttataagaggtttcttaaagctcaaagtcgaaatcctgattaatttgcagctacccgctggttttttcttgagcattgatcgagggagacgtgaatggattcaattcaaatacagaaaactgcccaccttttgcttcaattgtggactcatcgggcatgaaagaggaggttgtgggaagcagaaggtgtatgcctacccaccggtgggagaagcggttcctctctatggcccctggttgaaggccatgattcctatccgaagctgttttgatactagaaggccgaagtttattcgcgagatggacattccgatgagtcgtcgggctctggaaccggaggaggcgtctggtgactccgggagaaggacaaccacgttggagggaaaggacaagcatagtggtgatgttggtggcacaaaaggtactattcgtacacccagtacaagtagtggagaagtgcatggcaatggtacaaaagagagccagaaaatgccatctgtcaccaaaaagatgagtcctaggatttcaaattccaataaggaacattatgacccattacaggtaattgagaatcaccctatttctaagttgggctctaatccccatgatagtaatgttattttgagcctgatgccaaatgtgggccctacggctttgcaaatggtggagctccctcatgaagccatctgcaaatcaagaaccccccacatgcatcctgagcccataattttacccaagcccaattctgataagggagagagacttgttacaaagttgttgggctcctctattgcatcgggcctgcctttggaccgtgaggcccattcaaagaaaagaaaggctagtggaagtgtaacacctattgtctttgacaataatgagaaaaatgaagtgggctctttgagtgggctggctgataacctctctttctctgtgggaaaagatgatggaatgcaggggaacaaaagttcagagcgtaagaaaagaggatcgaagagaaactctacttctggtggatcgatacacaaaagtggtggaaaaatttacactagatcttccctagcccagaaagactcaagcaatggcaacgatgaatcaatggagaaggatacagtatctgggcagcatggaatggtcattgagattaatctggatcagaattttcacatgggcgaggaggcggcccttatcaagcccccctctacccaatgagagcaatttcatggaattgtcgagggtttggccgaccctcggcaattcaagctttggcggcctgggtgaagaggtttaaaattgattgcatctttttgatggaaacgaaagtcggaaaggaacaaatggttaagataagtagtgctttgaactttgattgtggggaattcatcccttctgagggcttggcgggtggattttgtctgctgtggaacaaacaatctgggattatttcggttaccaaacaccgaactggttttgaatgtgggatatgggatgctgatatctctgctcgatggacgcttcttgcgttatatggcaccccatatgaagaggagaaagatttgttttgggaagaatgttcggatgtcatcaagaattgggatgaaccgtgggctgttatgggagatttaaatgtgatttcgtcaagtcatgaaaaatccgggggccgagtatttactcgtaaggatgggctttatctcaatcgatttttgtgtgatactggcggaattgacctgggggcttttggagggaaatatacttggaaaaacaagagggggaatggaggtttaattagggaaaggctagatagggtggtggttgattcaagctgggtgaatctattccctaatggaggagttcgtaacctcccaattatagcttcg

SEQ ID NO: 48074 - DNA, 1412 bp, Cannabis sativa
ctgcagaatcaaaagaaaagaagaaagacataacatttggtgatatatgattagcacatatatagcttctaactaactaaatgaacaaaagaagaccatgatttggattacaattttcttgttaactacactaggccctccaagccttaagatacaaaagcagcccacatatcatctttcataacatttcatcccttttatattttttgtaaatatcaatctatacaacatttccttccaaagaggaatgtagctttcctggatcatgaaaactccctgatgaaaggagctgaagttaggatcttctcaggtacagcttaagtagaattattttcaggttattttcttgtcatctcaaagagggattgtcatgtttttgatgtttgacttctcatttaattagctgtgtatatatatggggtctgaccataggactatgtggcataaaatattccaagagaataatcaaagttcaactttcatttggccagttggcatagaccctgaaaatgcagcagaagaaattgcttaaaaccacttgggattatatcagatgaactttttatatgaaaaaaaagaaaaaatcaactattcagaccatctccatcttggctgctgggagaacttcttgttccaaagctcatttggacaacattgttaagttcatcttcccacacattcggtatctgtagttataagcatattataggttatttctacaacacagacttaatgaagagaatgatcaaacatagaactcaacaatggttgctaaaaatggccagtgttgcagtaatgtttgggtttccccaaccccaacagggtttcacactaccattgaagaatattatttagtaaatgagagaactataaccgaaagatgcctacctgagtaggttctttgaatcctccagacaaaggcgtcaattgggaactgattgctctccgaattacatcagaagtgcttcccagtccagcaaggctcgcctgaataagcccttgtgatggtggttgtaatgtaggataaggcatatgcatatccggagaaaatgctaaggaagaagaagtaccaactctggactgaagcatctgtcaagaattggagattagaatggtaatgcatctgtaaagaattggagactagctttcattcacaatctctaatgcatcaggctgaaatgcacaaattataacttacatcttttgcaaggagaccttcaatgttaaattctagtcgcggatttactgttgcgagtttcattgacaaaaactgcaagcaaggaaaacagaagtattaaatattgcatcctttaactaatcagaagagcacagaattctgacatcaaaaaaaggaaaggtataaaaattgaattgcgcccatgtgaaagattagattgtgatgttatacataa

SEQ ID NO: 48075 - DNA, 2024 bp, Cannabis sativa
ggactaatcggtatcaacctcaagtttttggggacttttgccgcaattatcccttatatatattaatctcgtattaatgtataatgtatcaaagtttaatattttaacctatcttatatataacatataatattcagattattcattcatttaaacttatataatataatcagattataatcaagggaattattccctagtatattcggtcaacaaagatgttaaaaagaaacaattttggttgatagacaaatttggatgacatgagcactaagaaattcgtatatttacaactttcatgaaggtctcaagggcttggctactcgtatttgtactcattatgttactttcattctctatccactccagcaataaagttttttttttttttctaataattgtaagccataaattgtaatttattgagaacgtttagttatattcttgtcacaaatttatataatcgatttgcaaggtagaataaatacaatgtaccttaatcataatgatgtgtagatctcgaatcttccgagaacagctgactgtttgagcaatggtattgagatggtcgatctttgcgttgtatagatcattgatgaaaaagtacaatattttatttgattttcttttcacttactacaaataaatcttttgtggattagaggcacttgagcgccagtttctctatatggcactactgtgtacaaataaccgcagtactcgttataatggtggagccggtgttacaattaatatatatagatagtaggtgtatttttaatgagtattacccataaataagtaatattagaaaaatttaagtttttatgtttaatttttttttatctaaatggacaaattaaaaaaaaaaaaatagcctgaaattgtttcatcggaagaaaaacaaaattaaaaaaattagcaataaaaaaataaaaaagattaagttcgatttaaatattttatataaatatatttttcatatatttttttttatttttttaattacgtacgtaagttaagcttagaaattcaaattattctttaattattcgttattggattaaatctaaagacttttttcctattatatctaaaaaagataaaaaaaaaaaattaagaatacctcttacacacaatttcaagcagcacaaacacatgaatcacttttctcatcctcaaagccatcgtgcgatcaaacgaggacaataacagcaaataaacccaaccagccgatgatccaccattaatttgggcaacgtgactggaaaaaaagaagaaattatttagaaaatcaatcattactgattggtaaacaacattgcatataaattggtttgaaacacaaattcaccatcaattacgattcagattccgcaaattaatcctcctatattcaaattacagattcaaaaaaatgtagttctgaacgaataatggagttcccaatcgatccaaaacaggtttaatctaaaatacacatatcaacacatatttgataatgtcataattgttgcattaaagttgttttccaaatttttaatcctgtaattattcaattctgatcatgacaataacagaaaattcgcattcatctagcgccacggatctggaaatattgatttaaatttttgttttttttaaagttcaattacaattgtctttttattttattcacgcactcataattgaagacgacactcctaaaatacaatacataatgttaacgcagatttttattaaccaaatatataaacctttacgtaataaatatactacataattaatgataataaaaaatgatcattagatatttttacataattttgtagttaaaatctacatactctacgagtctatcttattagggatgttaatttggatacagagtacaatcaatatcatagatagctttttctcataaatttgctgtcattttttaccatagatccaatcgcgatttatatgtgtacagggtggcagttattttcattggactttaatcatttataactgctcatgaa

SEQ ID NO: 48076 - DNA, 1329 bp, Cannabis sativa
  modified_base (1287)..(1303): a, c, t, g, unknown or other
ataaatatatatttatataatacccagatttaatgatctgatgatctcaagcttatatgattggacataaagataattaaattgaagcgaactctagagccttggtcactatgtatatatataatgatgtgatttttatatatactaatatatatcatccacaattaataagtttataaatttggtttgaacttgctagctaattactagtattcatgcatgcatgttaattatgatatttctttatctgttcgatcgcatgacatttactttaatggttaatatatatatgtagcttttttgaaccatgtacttctttaggttttggtcaacttaacttgaatggactgttttttgaagcttgaacttctttgtgaattgacttggtgaatattttttttaacaagacgaatgtattatttttaagtatagtaaaatagtagcttatttcgagtttcctcaggcttcggtttcaggcgatgctttctatgcctacactgattaatattgattcatacttcttttgtaatttggagaaatacctaatacatgattggaaattcatgcggaagaattgacttgattcctctagctggacgcattcttccttgacaattctagaggcctaactggaaaggttagggtggttggaggaagagttagtcgcctcaacggatttagagtttgtaacttgaaattggatttggtatcccagtactttggattccttcccattacaggaacttctctgtggctctggcaccttgttttgttcccttattcctcgatttcttttagctctacctcctttcgcacaccctcttttttcttatgctttcggcgaaagagctaattgctagacgatctctgctttaagtcatttctcctctttgtcattggaccaccagttcaagacaggtctctcatcatcatcatcctccccaacaataataacttattgggtagcaagtggaatctgctgtaaatggttcacttgaagagtttatgattatcatcgtaccacttcctcagaattactatatgtatatatattatatctaaaagaaatatatgaataaaaaattaacctctcgaagcctatcagggtattctcgattttttttgtatgtttgtatccttagttgatcttaaaatactcacattgtagtctttcgaatcttccactacacacaaggactagtgtgggctattataataatgtgtatacttgttgatgagtcgacagactcagtaagatatgcataacatattgttggaaatattttnnnnnnnnnnnnnnnnnctaccatgtatgtttcattaacattc

SEQ ID NO: 48077 - DNA, 1301 bp, Cannabis sativa
tctctctctctctcaaaatatctcaaagtcccaaccctgaaatggaagagacgatctgtactaatgggtatgacagccatgatcggttgtttctctatgtcagtgagtcaacaaaaatcccagccgtttcaacatcttcttctcccttcctcaccattttcttctttctatagttgttcctactgagggtaggcattagagttttgtgtgggtgtttcaccgatggctggagatgagaagaccgacatcgatggtgctgatttcgacaaaatcggcatcgtcaggattagggttttgacaaaacctaatggctaaaaagatcgaagccttaatttttcgttgaagcctagatcttcttcttagtctggcaccatcgcttcttcatctcgtcgaaggccagatctttgtgtcaatccaccgacaccttcttattcgtctcaaatcttcgtgtattgatttttaatttttaatatatgaatctaagtcacaactaatcatttttagtttgcgatctaaaattttgtgtactgtatcagttttttttttaaagctacgtgttttgaaatgtctttattatgttgttgtgaatttgaataagctacaattttaatatgatatggttatagctgcccaattgagaacttgagaatgaggaagaagacaaggttgaagagagagaaagtatttttattttaagtttcaaattttattattattattttgtatttttcttttaattttaaataattttttaatgaaatttttattcataatattttcctagatattaaataacacgagcctattaaatattgtcacatatatatttatttgacatatacagtaactgttaataatgggagtaatatgacatttattttaataacatggtatgccatttggtatattgtaagattataaatagaaaaatacttacagaagaagtttcatactaacgacagaaaatattttttttactactaccaaaaatacgacttaggtacttatttgttacttaaagtaaaacttaaatatttatatagtaaattattttttttatttattattatttccacaatttaacacattttaaattttgcatttggagatgagtaccaaccaatggaccacgtaacaactcttgtcaaatttaaattacaatgaaagggacttgggccctagtaagtgataaaattgaaacgtacaagtcaataattatgctgatgttgaaccaaaatcctaaatagtcctcaccccacacacatatcatcatctttggtcagtctggtgagatggagtac

SEQ ID NO: 48078 - DNA, 1182 bp, Cannabis sativa
ggcataaaacccaacactaacctcatgtgggactttttttaacatgactctcatattaccaaaagcataaaaatattaaaacatgtaaaaaaatgagaaaaaaaaaaaagaaaagcaaagaaaattcacataagatgccacatcatatctcttttaactttcctttatatatttatattgatattaaattaaaaaaaaaaaataaggaaatggggttagtttttagaaagatatgttaaatgtacaagtgagattataattataatatttttaaaatatgttgaaaacgattttcaaaaaatatatatattcaaaacgggttgggtcagatccaatctgcaaaaaaaggaagcgggcagagcgaatttgatctaagattcaataagtatccgaatatttcagatcagtaatgatccgtcggatcagatcaccgacccgactcgaataaatagatctttttgacatacctacttagcagactttgtaagggtctaacgaacttcttaaaaaaatactcacttgtatatgttcccaagactttgttagtctcctctacatggatgtacttctctgccctttcgtataaatcatctattgtagatacattagtgaatcatttttaagagagtgcacggtaaaaatatcctaatatattaatccatactttactagacattatgtatggttcatattatttatttatttgtaacaaaataataacaaaaagaaaagttgtgaaaacttgtaacttgcatcacacctaataggacataggatgttactccttacccacaacaattctttttcttgttatgagctttgttattgggtacaccgtgcccaatgctttttataagttatgtcctataattaattagtaatattctttaaaaaaaaactattttattaggttatataaggcatgataattatttatactaataaaagtataatactgaggagagtgttaggcaccaatagtatcttttagtatttttatatatatattttatatatatatatgatagagaaatattaaaaagtaccagtggtgcctagcaccccttatgtgttaatgttaggaatgccaatggggcgggtcggatctgatccgactctgatccaacctgatccaggtcatatacggatctgccccgccccgccccgctagattagatactc

SEQ ID NO: 48079 - DNA, 1465 bp, Cannabis sativa
aaaaaaaaaaaaaccataaattttagtggtgcggctatttacccaaacaatatttataaactatatttttttgtttgttaataatttaagggtaggggtccattgcaaaagacccacgtgggttccatgatggaagtgttgaggttttgaaggacagtagagattggtgtgtgccacagccacttcagcggcttctatttcgcaaatagtagtagccagctagcgctgggtcactcactcacgtacgtgaaaccacatatataattagtggactacgtacgacactacaaatttaaagccatttcatttccaacgacattaaaaaccaaaccactacacgtatgagaatctttgcaagctaatttagagagtagaaattacacaatataaacgaattcaagatctaatcaaattaatttcagtcatttaattgattaaacatctaatagatgttaaattggatcgtaactattcattggatacatttcatgtaatattagtaaaataattatattgaatatattaaatgttacacaagactttatatagggaaagaatatccaaccctaaaatatataccaaacctatttagaaatagccttgactctatatccaaacattaaatataactatttaatacttatattacaaaaaaatgtcacttttagtaacaactttttagtcacaactttttagaaatattacgtctggttatggttaagtaaatgaactttccaatcaaacttctatacctggtagggtcagaaagtaactcccctatgtccttgcttagatgagtgttaggttccattagggtggaagcgggtttgacaccaatataacttgtatcatttaaaagttgtaagataaatggtctttgagagaccgaaataccattagtggatctcccaacctctagcctgagaaagaacctccaaagaccaagatctttgagtttaaatttggagttaagatgtcatttaaacaattcagcatcgctagagttattgctagcaattaaaatgtcatcaacataaactaaaacagcaaaaaaagtatcgttagaagatttaataaaaagagagtgatctgaagaggattgtttgaacccttcacttaccaaggtggagctaagtttggcataccattgtcgggaggcctgtttgagaccatagatgctcttatatagtttacatacaacattaggagggaggtctccttgatgtttgtagtcggagggaagcgccatgtaaactttctcatttagatcgccatggaggaaaacattgttaatgtccatttgatataattttcaattattaatggaagcaggtgcaaggaggacttttagagtattaaactttactaccagagcaaaagtttctaggtaatctatcccaaattgttgggagtaccctttagctactaagcgagctttaaatctttcaatttcaccttgggcatt

SEQ ID NO: 48080 - DNA, 1666 bp, Cannabis sativa
  modified_base (47)..(54): a, c, t, g, unknown or other
caaggtcctatttgtacaattttggaaaatacaaggtctattttgtnnnnnnnnaaaacagagagtccaattaataacttttgtaatacacaaggtccaaaatagtatttacgaatacgattaatgtgcatcttcatcgcaagcaaagaaaggttgcactaatgaacatgatgatgatgagatgttcccacaggccgccttggccataatcgtacgtaatcaacctttataaatttcattaattcaattagtttagggttttgttgaaaatctgataatattaataacaaggcttacgtgcttgttagggatgatgtgcctaccgacggtgaggtctatggcagatcagtggcgaataaatgatgtgacagagcgtgatgttggattaaaaatcctattgtcggtatatgctattataaagtgtgatacaaaattaagtgattaattctattatgtgtatcaaaaaaatagtattaaattgtcatggaaataatgtgtagataccataagttaatttacaatttattgaggaaccaaattataaataccaaaaacttattatataatgagtctataaataagttttctatattcttttgttagtgctttcgatcatcttttattatcttcttttttgagttagcaaagattttatatagatttatgatttaagattttttatattaaagcacttttagaaatatatttagatcagtaatatatataaatatttcttgagtgttttataaatcctaacacgtgaaacaaagtcgtttgcactcgggatcttggaggccattgatcaatcttactgccattttttatttctcccctttagagtttttctttttccaaatcaatagaccattttgatctattctttcattcgaaacgatgttgtttttgtcggagtcaccaaacttttgattgctgaggtcgatggactaggctgccagagcgcagaagattttctctaggtgttatttttgcttcaaacgaaagagaaagagacattgacatatgagatttttggaatgagtggtatactatatagtaatatgttttctttttggaagaaattttttggagtggtaaatatatatattaaatagttaaagaaataatttaaatcataaattactataaatgatatattaaagtattttttttcttagtactatatttgtgcaagtattaagttatggcacaccaaaaaggatagaagaaaaaaactaaaaaagtcctaaaaaaagatatataaataagatggtgcataaatacacatataaaatacatatgtaactaaaataataaaaatgttattgaacattttggaaatataatatatacaaaaagcactgttaaattaatcataagaagtcttaatataataaataaaacaatttagtatatcttttttatttacttacatataaataattgacaaaaataaagtaaaaataaaaataaatttagacaaatttaaagaacaatgaagaagttgccacttcaccattttttagtcacactccattcctaaactctttattttgattgttcaatatatgtatcgtgactaaaaaacatcaaaatatttttttttttttttaacaatgatcatataattaataaaaatatcaagcattttaaagatatatgtatttta

SEQ ID NO: 48081 - DNA, 1310 bp, Cannabis sativa
tatatatatataatcagtgagcttttagaagatttggcatcattttattttcggcaattaattctgaaattatgttttatttttatatattatagtgataatagaaattacttatttttaagaatatatgaataatttataattttgaaaataaaattttaaatagtttttttttttttgaaatttttttatattattataaattaaaagtcatttacaataatagagaaaataggataagaaatttctcctatccaagaacatcttcatccaattctagagcgtactttgccaagccatgagcagctttattagcttgcctacgagcatgagtaacaataactccagggaaagaggataaaagacaacgtacatcgtcaattagatcattaaaacaagataagtccctatgaaaagtgttcaaagcagaggatactcttaaggcatctctgtttccacaattacgattgatagttggtgctgagcaacccagtttaaactgtggaaaagcgccttcgcttctatttcatcacttctgaagcatccttggactggtcttgaaaacgcaacaattacttctcctttgtgattgcgcacgacagctccaattcctaaaattttatccttgaaattggcagctgcatcaacattcatttttagcctatttacctctggtggtttccaaacaatttcatcaataggtctgcttctattgaaagtgatatctggtgtcgaatggccttgctgatgcatcacaaaaaatgttggttgctattgttggcctgcttcctgtcgagaattgcattgctgtgatgaaacaacatgctgaaagtaaccgtggccatgattttgtgttggcccttgttcatgtctcaagtactggggatgtgcaaaatgatcttggccatctcctagctgctgcaaatgaatctggtgatgtgttatcccaatattacaattagttgaacctgcttgctgtgaagtaggctgctgctgcaatttattgcagcaagattgttttgcactttggtagtttacaatatagttcaaaatcagctttatctattgttgttgccaagtgaattagataatccccgtttaacataccatgagcttggtggaaatcaattgtggaattagtgtttttccaaacagccttggcatgcttgcatgtaaacaaggcatgtccaattgactcccaagcatttttacaccttgaacataaggtcgaatctatgactttcctcctatgcagtgcagaggcaaccggaagggcatgctaatgactttccaagcaaaatttttaactt

SEQ ID NO: 48082 - DNA, 2045 bp, Cannabis sativa
atgtttgaattttactcttgaacttttcactgtaacttaaattcttttaaaaaaattatgttagtcaaaaaatctctcatagttatagaaatgcaaaaatgtcttgcattttattaactttttaaaataatttgtttaatgtgggtactaatataatgtgtcataatttgagaatgtaaacaaaaaaatacatttatagattatatggtctagtaataatattttaaaatatgtatttgtattcttagaattaatgttagtatatatttaacgtaatatgttttttaaataatgaatgaatattttattgaaaaataatataaaagtaacacatcatgaaaaaaataatagagaaacattctatttacctaagtgtaagtaaaccatatcagtgtaaatttaatttattgataaattatgaaactaaataatttgaagcatattattattttttattgtgtagataacactataatcataaataataatatattctggatctaactgaatttatatgctaacatataagcataaaagttacatgtgaaccaaacaacataaaataatttttaatcttttattaattaataaattatattatattaaaataaattttatttaagacataaaaattgaacaaaaacttggtcgctttataaatagacttgtatacaagcatcattaacatttgaagtgccaaaaaaacctcatacaggagtataatatacatattaatacataaatatgtataattaaatatgtgttctactcaaatcaccatctaagaagaaaccaaagccctaaccacctaaggccatctctaaccacaaaacatcaaaaatactatgggttcacattaagtgtaatccaactagcctacatacccaaattctgaaacgagattgtctacaatgtcccatactaaatttagttgaaaatgtagatcacaatagttttcttcgttttaatactaagtaatatatttataattaatttatttaaatatacataatatttgtatttttttatggagtactatttgtatttaataaatagttttacatattaacgtaaatacttttttttttctttttaaaaataaggaaaaaaattctattggcgaagagggaaaacatcaacaatccgaaaggtcaaaaaaacatttatttagtattctcattagtgcataagtgcactctaattccgaagcatagatttcaatctttgcacatgaatgagccactagaaacagagagacatgaaccaattataacagagaaacaaaatacaattctataaaaaatagacagtagacactctacacgaaagtggacgaactaaaactatagcaattgaaacattattgaaaatataaaacaaacttataaaaaaacacaacgaatcgagaacattcgatcacagccaccaccaccctcaagcaagcttcacccacctcatccctcaccactatcaccaaatcctatcccccaacaccaccaaagtttcaggccaacaccaaaacatggctagctgaccctccacaccacacccccacccatccacaagaggctcaatcccaaccacaacaagtctctcgacgctagcggggtcatcctcgtcatcagaacctccaaccaaaacagagggttgtcctgaaccatgccatgctacttcaaccctagctataacacaaatccttttaacctatgaagaccatgaaaatcaatcacaacccatttcctctctgccagggcaaaggacaccacacgactagatcgacagtagcatcaaccaatagaaaaaaccctcatactaaagcgtcagctaggagttgatattattttacttattacaattagattgatgttttgttatttttactattgcaattagaagaaactctcacactaaagcgtcagctagaagttgatattattttacttattacagttagattaatgttttgttatttttctattgctttgcagttatatttttactgttttatattttttgttaagttcttttaaggttattttttagtt

SEQ ID NO: 48083 - DNA, 1140 bp, Cannabis sativa
tgatgaacatatggaagaccagtttggactcatcttatttttattctgctttttgtgagctctgggtaactgaacccgatcaattaagttaaggattattctgtttctttaacaaatatctaaaacatataatgtcgtttagtcttttcttttcgttttcaaatttttttaaaacgttgtcactaatttactagctaaaattattcttttcacactttaattaaaaaggtaccagagatattaaaaggagacaaatccaaaaaaaacaaaaaaaattagagtaaagagtataccatccatgattttgataattgtttatccaattagttttttaactgttgagtattatccggttctatctcgtagttcatgttcttatatatgacttaattttctaccatttattctatgtattaacgaaccttaaatcaaagcttttgaaccttttccatagaagatatagtaccatatttataggcacatatacttaatgagtcggacggttcaggcctctttcgcaacaaaacatggttaggtaacatctcagattttttcattcaatttttaaaattttttgaaatttttctattttttctaaaaaataactacacaaataaaattgtataaaatttcttcttcaaatacattagaattaaatatcccacatttattatatattatatatgtattatccatatagactataaatactattcttattatatcattttaatttgtcttatagtgtttttttttttaatgtcttagtctataagttttttatttttcatctaatatataataatatacaatttataatgaattaattttattttaaaaagtttcgttatcatagttttttattttattaattttgccttataaaaatttttattagctcaaaaaaatgttcaaactaaattattttaaatgaaactaaataaattatttttttctctatatataaagaaaaacacaaatcaaattaaatgtcattttataattatttttgtactatttatctatggctgctaattaggatatttaccccttaaactttaacatgtaccaaatcatatgtccctgaactttttttgccgttaaaaattccccctaaactgttgagattgtttgatttaa

SEQ ID NO: 48084 - DNA, 2149 bp, Cannabis sativa
cactagtgctacaaccctcttctcggattattctttcagggggaaaacagctaaattcccattgagcgacagacctaatacgacatcctttcttgtacttgatgccacaagatcttagtacatcgctaacatatgctcctatggatatctaacttttgattcgatgagtattgcttcgaaagtgactatgggatcttgaggattcttagattttcgagctttagaagtcataattttaaaatttaagtcacctggtgaaaaagcaacaatgactcgaggtaaaaacaagggtctcgctaaaagaatagaaaataaaatttagggttcaggccaagcgcatcttgcagaaaatgacgtttaccctcagttatttcttgcaaatatcgcctataacgacttgaaatctcgtcctgattggttttaattagatgatccctaattttggcatcatttatctcaagaattgttttaggtacataagttttgggtttgaatggaaaggctaaattctcaggacagtcagtttctaagaattctgggattgtaatttctggaataaattatgtcattcttgtggatgagtgttatcccaatttttagaaaaattaaatactacctaacccagaaatctatgaatcgaataacctaaaattttccttagccctaaaattatccagacaaacaaaacaaaaattacctaaaaagtaaccaaacaaagtggataaagaaacaatcaatcacgagacgagactacaaatacagaaaagaaagatattagagagaaggaagtgaaccacttactgttttgttgaagatttctgggcgatgaagaactttgtgattgagattgtgatgactgaaatgatgtgccctgaaaatctctgaggttaaaaatataatctgatgaaatacgcaggaagaggtcagtgacagtgagggcatgtaaattggaaggggaagtaatcgtgatttgtagaaaaaataaggtctgaaatgtgaaaatggtgaaatgaactgttaatttcaatttttgtaccctcttattgatcactattagatcaaaagaaatatgatctcacagatgagaacattgcaaatgagaacagtcagaacatttaatgctaatgatttgcctcgaaattctgaatcgccaaaaacccaaaagcatgcaatttttcaaaaacgggttgatacgattatacccctgtaatcatttaaaaaattctttttaattaaaaagtacttttaggggacaattgttatactcaaaattcggcaatattctagaagttgacacgtgaacagaaggaatatgaatcaactctgaggatataataatgttatatcattaaatgcagattaaataactcgttactattaaataaaagtttgatagataatattcaaaactcgttgaatatatagtcttaagcgagataaggataatattctgaactcgttgatagataatattcctcgaggtcttggttttgtggcaagaacgacagctggcttggttttggaagcagtacaaatgagttgttgtgaaatgtttcagcctatgattgtggaagttattagccttaaggaagctttgagttggattaagcgccacacttggtcaaatattattgtcgaagtagattgtcttctgcttgttaatgatcttaattgttttaaacatatgacctctccttatggctatattcttgtggattgtaaggctttacttgatgaacttgtgccaatttctttatattttgttaaacgttcaacaaattgtgtagcttacgctttagtgcatgcttcaggttttgatgctgattgtgttttcagttaggagtccctgtggtatccataattttggatgatttcaaaaaataaagagcatttttatttttaaaacaaatgaacaaaagagttgctacaaaaggaaaaaaatgaataatgaaataaaaataaaatatttaaataagattaaaagtaataggtaaatattgttgagaaaaaaaaattaataataggtaaatagatagtgtagaaaataggattaaaatggatctatttgaacaatatccctattttgtttttgggtttttttcatttttacacttcaaattattattattatttttttttgtatttttac

SEQ ID NO: 48085 - DNA, 1073 bp, Cannabis sativa
  modified_base (1013)..(1028): a, c, t, g, unknown or other
gtaccccatgcttgaaggcgcttcaataatttttcttttaaatagcccaaagccgtagtcttgttacgactcatagaacatagaagaccaagatacaagctaccctcgttgcaatgcacatacccaacagctctggaaggctttcttttatttctgcactagagttggcactaaaaaagattgaagactttgtaatattaactttctgacttcaagccaattcaaatttttgaggaatttctttgatccggatcgcttcctgatacgtagctttgcagtataagtagctgtcatccgtaaagagcatataagatatatggggagccccattagccacttttcatcgatgcaaccacccacagttctcatattttcaaaggagagtcgagaaaccctccgcacacagtataaaaacgtatggtgtcaaagggtgaccctggggaatacatctagccgggataatagggcttatctcgtgattaccatgtataaatattttttataaaatgcctgagtcatacaattcgagcctgggctcttgtccagatacatttggaataacgcttttataacttcttcatccgtatttagctggcacaacttcgaattaacataatcgagtaaaatttaatcaagacaatctataatctctctacaagatgtacatgctgtgtgaaaaagccattggaagtagttgaacacaacttcgaatagacccgtttcccatgaaaactagtttccggcctcatcacgcaactgaaaaatttgattattacgtttcctggttgtagcggccttgtgaaagtaactactactcgaatctccctcttttaaccaatgttgttttgccctttgtttccaataacattcccgccgttcaagagcttcaaatagtttttttcaatttcctgataccctgtattgaagcattgtcacgtttggagtggagagatttcaaatcagccttgtaacatgtaacaccctaactagcataagcgtattacgtgattttnnnnnnnnnnnnnnnnctcgttgctaatcaacgaggtttatggaaatcatgattaattaaa

SEQ ID NO: 48086 - DNA, 2050 bp, Cannabis sativa
aaatacctctgtttctttattgatattgaataatacggattacattgaatttgagttttatttagggcataaaacccaacaccttacccatcctcttcgatcatttagcctatctgacctccagttggttcctctcataggatagctttctaggggacgacgacaccagccttttaatatatacctttgctaggccagaattagatcaccagagtaggattagtttcattatgttattcttgcatgcatggtttttttagcaatgttctaactcctttgtttattccttaagcagcgaagccaatggaggacctcctgaacatccttgcatgtacctatagtcctgaggttggcctacctgagtcacgcgatgtagtggtgactcctaggagatcttctgccgacgtttttgaggaccaagtcgtcttgattgatgaggaagaggaagaaggagagatcatccctcccttggatcgcaaacgtaaagggaaaatggtggagacggaggctgtcaagaaaccgaggtttgtggatactcctgctcccagcgctgactaaaggattccttttgtggtggatgagtatcatgtgcctctgggtattatcttgactcccgttcatcctgatgaggaaagggttaagctcgggatttctaagtacaactatgcctttggggagaacactaaggggaggccgagcctctgaagaaatcagtaagggacgcccaggatggatctttccaaggtgaatacactggagacgtctgggattttaatttggatcccttgactgactggtataaccgctttgtgggacctggcttggctccctttgcttcggagatgatgacccactttgccgccgacctgacccagctccccatgaagagatatgtggcctgtgcttctactaaccccgtgcaccaaatccaggacatgagcgttgccctcactgtagtgagttcttatcttttagatttcttatgcctcttatttttttatacaagattctaatattttttcctgttgactgctagattggtgctgaggctgattgtcttttaaagacactgattgaccacaggtacgccatgtctgagtttggtggcatggaggaagtgatgaagtgtctccgggaggcggaggggcagaagaaggcaatccgggatgaagtccagaggaaggaggtcctcatggagtgaaaccatctggaggcgctgaaggccaaggatgaggttattgctgcagcgaagagggatctttgagattctagggaagaagttcaagaactcgttgccaagctaaaatctttggaggagctgtagcagaatgatttggaaacaacaactagtttgactgttgaagtaaaagagctctgtgagttcagggagtaggctcacaaagaagcaactaaagcaaagatggatgctttactggccccagtcacttgtcaacactgcttgaagcgttttgatgatggagcgttcatgtgctggaaagctattaactttgaacctcgtctccctttctaccctaatcctaaggaagtgctggcccgtttatgggagaagaacaagaagcttgaggctgtcttggaggaacgcaggggtccccgtcttcctcctcgggttgactaagtgatttgtttgtttctttattttatccttcccctttcttataaaacaattctattttcttttaaggggagacattttatggcctggccccaggcccttttcttttttggatttattcgtcttctgaacaatttgtacgtctttggatttatttagcttttacttttcttatgttcatcctgtttatatctatcctatttcttacccgtatgatatgcccccctaagtgacatgaaaagaaatgtttaggtctcttagctttaaaagttacataagaggttgcatatatttgtccagaacaggttcttttatagaatataaactttgtatttaactactgatagtatttttataggtggtcagcattccaggccctaggcactgttgatgcgtccattctctttagcttatagg

SEQ ID NO: 48087 - DNA, 1890 bp, Cannabis sativa
aggtcctcaaatggtcatattggggggtttggtgtatagaatttcataggatgtaagcccttttagtaaggcagagggtgtcctatttaacaaataggttgcagcttggatgatatatagactagaggtagattagattgaaaacatagagctcgagctatgtttaagatatgttggtgttttcatactactgagttttgttgtggtcattccacacaagaatgaaggtgaatgatgcctttagaggcaaaaaaaagaggccaagtttaattctttggcattgtccgatcaaactgctttgattggagtagaaaattaagagcaaatcaagttgtaaaagttaattagaactgtgggagcatcaactttagtttttaacatgtatgtccatgtgaatcttgatttttcatctacaatggtaagaaaatacctataacctttaacactaatgatgttgaaagtgccccatatatccgtgtggattaagtcaaagatattatcgaaaaaattattgttagatatgaagggaagtcatttttatttagctaaatggcatattgagcaatgctgattagaatttgcagaaaaagaagagtcgatatttttattaaaaacattggaaatgtacattgaaggatgaccaaggcgattatgccattggtctacattattttgtaaagaaaaaacagaagattgacttgtattggccataacagcagcctcatgttgcaacaagtaaagtttgccattccttttagctatcccaatcacctgattctgataatgttgctgaataacacatatttaggttgaaaaagaactgaattaatagtgttatcaatgtatgcaatgacagaaaagagattgatgttaaattgtgggacataaagaacattatgcaatgttattgcagaattaattttaatattcccaataccatgaattggtgtatgatgattattaggcaaagtagcctatttaggaaattgatgatgagaaaaggaatgaaacatgtttttgttgaaacacatgtgatgggtagcaccactatcgattatccaataatcatcagaaaaattaaaggaagaatggtggttaccagccatgtttgaagctgctgcaggaacagtagggtctgttctaggagcatgctggttgagttgttgactcagtagtgagattagttgctgacactgagtggacaatcaactgaaaccgaggtgtggggtgcatcatctgtgctgaaactagcagtagcttgattagccgttgccttccatttttcttgtttctttttgtccccataaccaggagaaaagccatgaatgaagtaacatttttcaaccaaatgtcctggttttccacagtttgaacatgagggtctaggtttcttgcttcttgggggattagtggaggttgagggcttaaccaatgatgcaaatgagggtacatcagagttgcctaaggttctttgacgttcttcttgaacaatcatggaaaaaacacgtgagaggttgggaataggctcattgagtagcatctgagcaagaaccgaggcatatgactcgtttaaaccagtgagaaattggaggacctggttttggttatagtagtcaagaaatgccttcatatccccacaagtgcaggttgtgttgggttgaaattccttcaattcatcctatagggatttcagtttagtgaaataggaggtgacggactgatcaccttgatgcaaatgagtcaattgtgtttgcaattataagatgcgagggccattggcctcattgaatctttcatcaagatcttgtcacatatctgtagcaagatcaaagtacattatgctttgggcgatttcagcagagacaaaattaacaagccaagacatgacca

SEQ ID NO: 48088 - DNA, 765 bp, Cannabis sativa
tatatatatatatatgaaactcacctctcaccacaatctatttccaaaactagagagaaaatagatatattgttattttactataaattaatcttacaaataattatttaaattatattaataaaattataactttgatgtaaaaaaaatcttattttttaccaataaaaatatttttctttatttcttttctgtttttttcaacattttaatttccaattcactagatttctttattctttaccaaaacattgtattagagtattataaaatttggtttgaaaatatgttctctttaatttttcaatttttattggatttatattattttgggttatcattttgatttattttaagtttaaatcttatattatttaaaaatttatttttgattttatattttacccaaaattacatttaagactatatagtaatttgactaatatatgctgtgtaaataatagtaatatatttttctcaaaaaaacaataataacaataaatatacatacatataaataataaaaaaaaaaactaaacctaactaaacatggccattgggcagccatatagagtgattgcgagttaggttgctatcaacttatcaaaaaaaacttgccacataaatatgtattatatttgtgtgtaatttgtatctacacatattattactagtattttatattaatcgtatgtaatgcaatatattttaatttttttttttttgtttcaatctcaatatttgaaagagtactcataataacag

SEQ ID NO: 48089 - DNA, 1337 bp, Cannabis sativa
agttgatgcctctttctgttctctttgttaaaagccgaaaatgaattatttgttatgttcatagttataatggaggttatcacctgatctaaaagtttttaagtttttgatttgtagttcaacatctttgttgttggtctacggcttttacatgcgtacttgcaacttctttcttgttggattttacatacacttgcaactatcttttcgtgctgttcttttgttttcaccgtactcgatggcctgttctttttgttaatctggagctttcaactcaacattgtcctaagatattcgagtgttttatttcaataacaatacaacatattcagctcatagttttcaactgctgttcttatgcagtgtgcaatgataaccacgggattacatgggtaaatgacagtaaagcaaccaattttgatgcaacatatgcaggactaatgggtctaaaggggcgaaagtcttgttatgtccattgtgccatcagacagaggagtcaatagtccagattttggttaagcgtgcttttgctgggtcttgttggacctgatctggtgttagcattggtgatctttctggtgtattgttttctaattttctaatttttgggtcggagacattgaaattaagaatttattttttgaaacttcgaacattgttttctttttttctccttccaatgtatgatgtttttatttcatactttatatcacatattcaattttttaaaaatgattgtttatttaaattataaataaaattattatttaattaaataattaaactacaagcaacattagttatataataattaaaaaaatatagtacattatccaaaaaagaaactaactaactatttgctggaatattgtcactctgtcgacactaccatatacaatttatccgcgaaaaaatagacaatccaaatgaaaattaaactccacccattaagagtatctttatttttcttatctacaacttttagacagatgttatctttatcaacaatttactgtgtgattttaaattttttttgttattttacacacatttaagttgtgttttctttagtatttgaatattaatttttaatttatttttatattatcttaaaaacatattacagttaaattatcaagttttcttaaacactaatatattgcattcaatgttaacttttaattgtcaaatttataaattacattagttagatatacataataataatatcacgtaataactaataatatatttttttaaaaaaatattaattgtatcacgctttattttcaaaaaatatatatatatatattcttcaattattaattgtattactt

SEQ ID NO: 48090 - DNA, 1818 bp, Cannabis sativa
gtgagtttagagaatttgagtcaaggtggagattgttggagtttgactcaaaatatttatttcttttttatttatctatatttgttaagttgtgacttttttttttggtaattattaattgtgggagaagggaaagtcttggtggctaagttttgatgagtcttcttaaggaaactttggaatgtcttggtccccaagttgtcttgatgcccaagttttgtaactttataaatatatgttttgtgtgtgtgagagagaggtatgtgtgtggacaaaaatagtgagttgtcaaaagagaggtgtgtgtgagtttcttgtgtggtgagagtaaggaaaaagcaaagggtgtattgagatttggatgaagagattgagatagagagtatatgtaattttgaagtgataagtgaaatatatctctctctgtaggtttgatagttttactaaactgagtaaattgctttgcttcatttctttattatttcgctgcactgcacttgaaatttattatttttcccaacattatcaccactagaaccaataaccccgagaaaccctctccctctcgctctctcaccttctcaccctctctctctcaggcaaagatccatctcctttcgaccttgagaacccctctccctttctcacgatctccttctcagcctcagtgttctctcgcactcaagcgaagagatttgaacatatctatgagtttggttttaagattgagatttggatatatatatatatatatatgtgggtgaatatatatatatggttttgatgtttaggtcctctccttcgttgcttagatctactctcactctcactatttctcgctcttgctctcttctcttaggtcttttctttcattgttgggtttgatgggatgttgaacggaggggatggtcacacgggtagtagagttcgcaaaatgggacaaaggggctcaacggcagtggtggaggacagaggtaagactctcatcgtggtgggaggctggaggtggaggcggctagagcttgaggaggaggacgaagaagaaaataataaaagaaaaaaccaaatatttattctttttttttatttttaaatctgtatttttctttttgttttgatttagaaaaaaatattagtggtggtagtaatggttgtgtggtggtgataacgatggtggtaatggtgtgataaagatgatgataatagtggttgaagtgtgacaatggttatggtggtatggtggtggtagttatggtgataatgcatgtggaaagaagaagagaaagaaaaaataaagaaacaaagaaattagaaaaagatgacttatttatttattttagattttaatttaattttatgttttttttaaaaatttaaatgttttttattcttttcataatatttgaataattaatattatgtaaactactaaaaatctaccaagtgtgttaccgtgtatactgtggcatatccaacttgcacttaacatgattttttggacgaaatagtaaatagcataaaagaaaagttatttaattaattttgatatggttgtagcataaatgaaaagttaaattaaggtaaaattaccaaaatagtagaattagtaaggaaaaaagggtaattttaagaggtaaattggtcatttgggtaggggaagtggtttgcatgcatgcatccataccactaaatcaaaattgagataccttagtgaggtatcatcctaacctttagaaagaaaaaaaaacaacaattacacaatattctttcttttccatcaagttaatcacaaagttgcctctctctctctctctctct

SEQ ID NO: 48091 - DNA, 1512 bp, Cannabis sativa
ttttctaaaccacagcgcagccacactttatataaagaacattattataaagttgggcctaatactatttattagtggcgtcttgcaattgattaacgatcttctataaaaattattttattaaagagcaatattgttattggatactacagcatcttcaatatgtgatactttacaattggttagtgatttttttaaaaaattattttcttaattatactaatatcagtatgatacgaaataagatgttaggcatcaatagtactttttaacaattatttttattaaattatatgagacttgatatttaattatattaacaaaaatacaacatgtttaataggaatagacaccagtacattatagcattctctatatatatcattaataaatacacttattatatttcttactttctatgatattttttttaagtggtgcttttcaaccacttgaacacgcatgccacaaaagttgtaagggtgaatttcattggttgaagaaaagatgacattgaactttccttgaaattatttaagaaataattgtggcgaaagtaattaaagttttgaattttttttattttttgaaagcaattaaagttttgaatttttgaatttttaagtggtataaatttaataatttttttagcagtataagtttctaatatgagtacaatttttgtcaatgctgactctattttaaatatattaaaataaaatttagaaataattaatactacatatttctgtctactctacgggtgaaaatcggtcagtttttacaaatttataaccaattgattggttacggtttttattttacgaaaactgtaatcgattgtttagaaaatataatcgtataaactaaccgtacgatttttggcaatttttagcggttttttagtttggcggttttgagcagtttttggcagttttgacattttttcggtgtaaccatttttttattttaaaaactgaaaccgaccgccatgtcaagaaatcgtaaccgaaactaattgccaaattcagtgatgacgtatccaaaaattcggttacgctctggtcggtttgatggtcgatttgggttttttagtttttatgaacatcccttgtctacacctaatgatctagaatctggattgtatatatgtcttatttaagacactaataaagtatgtactgaattacacacacgagttctctctcttttctctctctcaacccaatgtggttagccataaagaaaacttaacctaatgtttcctcaccaaaatcatgtacaaattattcaagatatacatcaacgacgtcttctgtttaagatttttgttttcatttattaatttactattattagtttaattccaattaatgtttttatggggttaattataaggagttcattcctcaattaattttaatgttgtgatcgtgtttatgtgttgaaacttatttagtttttccattagtcttgtcttttgacatcgttctttagtcttgtcttttgaca

SEQ ID NO: 48092 - DNA, 1612 bp, Cannabis sativa
  modified_base (398)..(399): a, c, t, g, unknown or other
attaattacagagatttaattagaatatgtggatataatataagttatttgtgaaataaaaatatttttaagttcggcgaccttgaagacccgataagtgaattaataggcataatttattaattacgaaaatttaattaaaaaaaatattgatataatataagttattttatgaaataaaaatattataaggttcgacgaacttagagattagattagaggtcaaaaatatcacaatggttttagttaataatattaatgtgattattgaaataaatcgatttcaagaatatcaatgtattttaaggtactcagagttgaccaaataccttaaaattagatttcttaatagttaaaaaatgataagataactattaataataaattttttattaatnntattattattattattaaatgttattcttattattttaatatatattatatatatcatgttttaaaaaatatatcaatttgactcaaaaaaaaataaatatatatatatatatcaattaagtaatatatacatatagcaattcaaaaataattactaaatttgggtgctgtaattttgtttgtgcaatccaactcattgatttatcaaaaaaaaaaataataataattactaaaaaaactacatgatcattaataattatgtaacctaattataatcctccacacaatttactatcaacctttagaaaatgagtgagctttagaccataacccaaatgacttgaagattttttttcccataggttgatcaaacctgtaaaaaaataatataaagtgataagttttttctattatttaatactatcaaaagccaactttttttttgacgtaatattaagagccaacttaaaatggctacctaaagtgtaaaaaactccctagagtgggtcattataaacagttcctacttacataatgaataaaatagagaaacaacattaatatttaatactatattatttcactgtaaaaaacgaaataatatagctaaatttttatgacaaaagcaccctgttagaaaccagaacaatagtaactccatcccaattacatatagcaaaaaaaaaaaaatattcaagtttaaaagtggagaatacctaacaaagaggaaataaaactaaaataaataaataagttattttctcagaatttctaattatttggtgtagagaaattaataaggaaattctctttttcaattaatgcagcagtacacttagtattaagagtaagtcccacattgctaatgtgtagaaataaattgtgatatataagatgaatggactactccttccattgccaattaatttggagatagaactccatgtccactgcctgttctaattcttttttcgaccattaagcttgtcagtaagatcgaagggaattactactactcatagaagtcacctataagataatggactttgtgtatcctttgcctgcaatttgtttcaatgcaaaaaaataacaattatctgaggcacggtgcatggcctagtatctcttatgtcataattctcactcgttgtaaggttactaagaaaataataaatcgatcagaaaaaataaaaactccaacaacaagcataag

SEQ ID NO: 48093 - DNA, 1084 bp, Cannabis sativa
gttagaaagaagagctctttaaattagggatctccagatgttatatctattgttgcagatgttactaaggtggaagactgtaagaaatttatagatgaagcagttcatcactttggccaatgtaattagtcataataattagtttgtgtgtgtgtattttcttaatctatatataaaatctcacttacaattaatttaattatctgaattttaatgtgatgatgagtagtggatcatcatctggtgaacaatgctgggacagtaatactgagcaagtttgaggatattgaccacatttctgatcacaaatcgattatggtaaactgcattaaaatcactacaaatatatatatttgatatatattgtcacatctggctcttttttctcatctaatataatatgtaagtgtaacattattcataatttctagtataggatgttaatttctggggtacagttaatagcattcactttggaattccacacttgaaaagaaccaaagggaagatagtagtgatctcctcaatcagtggatggtgccctgttccactagtatccatctatagtgtaaggaaaattaaattcataatttgttaagaaaaaaagtgaccttccttttataatatatattcaacttaaaattctattatatatcatatatcaaactcttttctatattctctttctctatgtgaaaactatatcatatcatatcatataggcaagcaaggcagctttgataaacttttgtgagactcttagaaatgaagttggttcaactattggcataacaattgtcacacctgggctaattgggactaaaatgacacgtgaacaggtaggtagctatgatatgaacataattaattgggggttatgtttatatgccttctaattatgtaggagtgtttctgattctgtttctatataaataactgtatatattaaactgtacaggacataaaattgagattacttatccgagaagagtcagctgagagatgtgccaaggccattgtaagaagtgtgtgcagaggagagtcctttttgatggagccaaggtggctctggtggctgtttccg

SEQ ID NO: 48094 - DNA, 917 bp, Cannabis sativa
ggtgaatgaaactgaaacaggtgttcttctttgttttcttatgtgtttaataaaagtaaatgggcatcaaacaagacactaacccctttttgtcattactaaactaaaatgcggttcagattccttttccactctttcattaaacaattttgagaaccacgagtcagaatcttatacattattttcttttaattgagtcatcggtatgtacttagagcaagactggccttagaactaattgtgttataagtagtaacaaaattataataaaatataaatttttaaaatatatatttttgagctctggattgggtgggccctgtagcgtagattcgaccctgatttcgagaattctcattccattagaatagggtttgaggtagggggttgttttttgttttgtcaagagagaccatgtgtggtgggtgtacttcagctgtacacgacaaccatcaaccatgaacccaacacagcaacccattggataagataggaatttcaactatcaccaacaatttcatgcaaaaaaaaccattcaacattgcttttgggcacaccaatatggcacctcactcacaatacttacaggttcccttattatttagggattattcaacgaatacacaaaaataataaaaaaaattataaaaatatggtggtacagaattttaaattttttttacggattttatgattttatttacaaaaaatatagttttttgatgtatttttatattttatttttgttaaattattgttgattttttgttattgttttgatgttgtttgaatgttatttttagttattattttcgtgttgtttttatataataccgtaaagtgtaaaaataaatctttaatttttgtttttaaaaataatattttaagtaattttcacttttttttttttttttgag

SEQ ID NO: 48095 - DNA, 2229 bp, Cannabis sativa
gaattattccaccacctaatccctctctattggatgccccgtcaacatacaaagtccaaccttcgcccggtggtacatcgaggtctactcgctcttctgtaactagtgtcacctcatcacttggaaacaagagaataaaatcaacaagggcttgtcccttgattgccgatcttggcttgtatctaatgtcaaattgactaaaatctactgaccatttgagtaaccttcctgacgtttctggttttgctaacacttgttgtaaaggatagtttattaatacctcaatgttgtgtgcttgaaaataaggtcgtaacttccgggaagcaaccacaagtgcaaatgctaaatgttccatttatggataacgagttttagcatccaaaagatgcttctcacgtagtatactggatgttgtttaccttggtcttcgtggattggtactgaagtaattgcgtattcggacattgctaggtaaattgacgaaatttctccaggcattggcttggacagtattggggcttgccccaagtgcatttttagggcttggaaagcctcctcacatttatcaatctactaaaacttttaattaccttttagatctgaaagaattctttacatttgtcagaagaacgtgatataaagtgatttaatgcagtaactttacctgtgaggctttggacctcttttggtttggtgggagatcgcatctccaccaatgcttttatttttactagattggctttgattcctcgctagtttaccataaagtcgaggaattttcctgagcctactccaaagatgcattttaaggggttaagtcgcatattaaagtgtcttaggattctgaacatggcttccaggtgagcgacgtggtcttttgtatgttgagattttacgagcatattgtcaacatacacctccattgtctctcctattagatctgtgaacatcatgttaacgaacctttgatatatagctcctgcatttatcaaaccgaaaggcattagcttataacagtacaaacctcgatatgtgatgaaagaagtatgcttctggtctggttcatacatcaaaatttgattgtatcccgagtatgcatccataaactaaggagttcatgacctgcggtagcatcaataagttggtcaatgcttggtaaagggaagctgtccttaggacatgctttatttaaatctatgaaatcaacacatgtgcaccatgagccgtttggctttggtacaagagtggggtttaataaccagtatgggtagaatgactcctttatgaagccacacgctaagaggcgatctacttcttccttgagcgcttggtacctcgtgaggtccattttgtagtgcttctgtcggatacctcgcacttctgggtcgatgttcaatcgatgacacatgacctcaggcgatatcccgaccatatctgaatgtttccacatgaaaacatccagattctgtttgagaaaggtgtcaagcttttcacgctgttgaaatgttagtttagaaccaattttcaaaactttactatgatcgaaagaatcgattgggacctcaattatctcttctacagcctgtgcaatatttgtataatcgaggattctcggatccaagtcagctttttcaacatgcggtatttcttcgattctgaagatctcctgtcgaggaggaggtgattcaagtaaatatataacatttaccgatttcttcttttttgcaagtttcagtgctatgttataacattcccttgaatctgactggactcctcgcacggatcccacacccgcaggggcagggtatgaaagatgatagattgaggtcactatcttcatctcttttaaaattggacgacctatcactgcgttgtatgcagaatattgggcaatcactgcaaaatcaaccattgacttgagagtaataggcaacttaatcattcccttcaatgtgattgtatctccagtgaacccataaatactcgaggttactagtcgcaagtccttctcctgtaaccccatttgcttgaaagcttggaaataaaggagattgactaaacttacattgtccactaggacttgatggacattatctcctccaatattcacgactattacgagtgcgttagtgtggagatggtgtacccacctagcatcactctccataaaggttatgtcatcacattccttctaaaaaaactttccaggtcgctcactaagattattta

SEQ ID NO: 48096 - DNA, 911 bp, Cannabis sativa
  modified_base (847)..(865): a, c, t, g, unknown or other
acagcttacccggtgtttcccccttacggatcacgggactactgactgtcacagacttggacttctctcaataattgttgaatgttagaagtttttgtttgaataaagtgagaaattctcaaaggttagagaagttgaggagacaccaagtgttaggagtgtacataaattttcataaactacccaaactaaattgagaaaattaaacaaaaatgcaaactgaacaacacgataaaaatgtaattcacccaattaaactaaattaacctgactaattcaattaaaatttttattttatgtttatattatatatacaattatatatagtataatttatatataaagatatttatatctatgtaaaattcaaattatatgttgatttaaattttatttttaaactatgtttatctcattattacaataaattaaattataaatggaatatgtcaaataaaatagtataaacaaactgatacacaactctaccacgtgtacaaaaacagttacatactcgacatgttaagagtaagaaaagtttatctagtgtgtggctaatcaataacctttataaaagtgataattttttttaagcttccacatattaaattatcaaaatatccttacttctcattcttaatatgttgaggttgatcatatacaatagggtgattgcttttttttttttttttgaactaaattatctattatatgttgaataatttggtttgagttattaataaaattaaattttattcaatatataaatgtatatatataacatgttttttttttctcaaatattgttgcatgtatatatatgtatatatgggtgactattcaatgnnnnnnnnnnnnnnnnnnncatatggttacattttttttttacttgtaatagcaggttaccaata

SEQ ID NO: 48097 - DNA, 1043 bp, Cannabis sativa
atctatgatttgtaatttattattttgttattttggtagctgatgaactcagttgttttaaaaagaaaagaactctgtggtttatcaaagttcgaagattgttagcacaccaacaatttcgacataaaacaccaacgttacgattcaccaacatagttttactgatacaaccattaacgatcaacaataatttttctcatgtattaaatttttcttaacatgacaactttatagaaatccttgcaaaaataccataactatgaagcacatttataaaaatattattgaatgtttatggacctatgtgaaattagcatttaggccaatttctcagtaactggtttatggtttatacattaaaattatctatctattttactttatttattttaaattttttcaaagatatacctatttttataaataatatctccattatactttttaaattaatataaaatatgtgttagacttgaataaagattgatagaatattgagaaatccactcaaaaaaatgagtatatttgaataaaatataatacaaaaatatttttgattaatagatataaaaaataggtattccgaactcatctcatatattttcctctccttccttcaactttgagcctaatattataggggtgtcatcaagctctctacagtgtaaaaactgcttgcactgcaccatattgtataaaaaatatggttttaaattttttgcagtatggttgtaatttgtatttttgtcaaaccgcgcagtgcggtgcagtttgcagttttaaattttataattgcagttcaaatcgcaccgcactacatgttacaaaattaccaatttttttcaatatgttttttattccttttttcaaacaaatatataatatatgtatataacattattttttagaggcaatccaatataataatttaatgattaacatatatgttatgaagttaaaaatttaataagattttttttgtattgttaaaattttattagattgatttttaaattttcattataatgtttgataatgatgat

SEQ ID NO: 48098 - DNA, 4146 bp, Cannabis sativa
cagccaatagccaaaaaccgatcagaaacaaaattgattaaatagttttaccttattcagttttaatcaaatatatccaatacacaagtataatgtacactgcaaagagagtccaaaatcaagggaaatctcaatcgaattaaaccatgttgtataggaaacgaatgcatggaaattttcataaaatatggtcctctaaaagtctggtgaaagaaaaaatatatttctctctgaagcaatagtagaaatgatttcctttttctttttttctaaatttaaattaatgtcaaataatctgattctgtaacaaaaccgtaagacctagtaacacagataaattatatgaacaagatcacttcacttgtatactcaaaaccaccgaaatccgacccaacttcatggagattatcaccaacaccgaaaaatctccagtacattagagggtcttgtattgattctttcttaatgtctcaccatccagaatgaatcaagcggtactctttttatcacccaccaccgctaacaagttttctctgccatttattgtaacaattacatgtacaatatcagaacatgacgaccaacttttattcgcctccttaaatatctagctgatgagcaccaatcatgttcgcagaattctgtataagttccttccggtaatcgacctagcaaaagaaataaacaatatagcattcgtcgtcatcaccctacaagttaagaaaccagatatattcttgaatgcataaacagccttctagcagaaccgatgaatccaatttttctcatgtagcataatttgtggtaacttgacattaaagttgcaatggctcaaaccacattctaatactctaataaacctattggcctatggcacaagaaaagagaaattatatacagatgatcgccaccagtcgagtaaaaagtgagctgctacatttataatttataaacaatttgagcgagttcaagggcatcaaaaaacttacccgagcacccatgagagaagagaaaaccatatttgcttctgcagcatcctcaatcatcaactgcttaagcatcctacgctctggatccattgtagtctcccatagttgaagaggcatcatttcacccagtcctggattgaaccaagaaattaaacatatcattagatgaaaggctgtactgtacagtgaaaatatattctaagcccactcaatacatggattcattataactgagatatacttttgaaaaggcttacctttgaacctctgaatattgtatgatgcatttgatgggaaggagcgctgaacctttttaagctcagcatcatcatagcaatagtacacttgtttgcccctctcaacctgatgatttcagaaaatgcaaaaatttaattcgactaaatacacaagatgctctctttgatttcatcatagctatgggcaaaccttgaataggggtggtacaccaacatatatacaaccttcgtcaaacaacgctttctgtaagcaaaaacagtatcaaatcaaaactggattaatctaatttactttctccagtttgtctgtatacgttacaataaaaccaaaatttcacaaaaagctgatcaactcctacctgatatctgaagaaaaatgtcaatagcagagtccgaatgtgagcaccatcaacatcagcatctgttaagatgataatcttatgatatcgtagagcctcctttttaaaatcctctccctgaagcaaggagaagcatatcatacctgaataatcatttagagagttccttgcagaaggaaaaaaaacaagctttcagaaattagagaaatgtaatctttgacagaccttcactccaagtccaagaccaagaattagattttgaatctcttcatttttgtacattgccgcttcatcttttctttcaatattcaatattttacccctgagagggagaatcgcctgccagcaaagattttatgatcaatagtttacaatcatattaaggaataactttttccatcatatttttgcttccaaattaaaatattttcacagcataaacagctagaacacagtacaaatatctaattggtcgataatagagagaagaaaaatcacaactagttgaattcacctgaaagcgcctatcacgaccttgttttgcacttccgccagctgagtccccttcaactataaagatttctgggaaaatgggaatgtgaagaaattgtagatgcatagatcaattaattccagaacttcccaaaatgactcataagatcctattatggtgaaacatggtccatgactcttacaagttacaacggagcggaaatagcatactgtgaaaaaactacacaaaccataggaatagccttatctcttaaagcttagtacaaccaacaatatgtatacataaaatgctagctttagttctctttaggaagtgatttttttaaaaaaagatgtgatttttgtaaaaaagatgtacaacttaccagcttcttcaggatttgttgatgaacaatcagctaattttcctggaagagatgatgatcgtaacacacttttttgtctcactagttctctagctctctttgctgccaaagcagcctaaaaaaagagagtggaggtgcaacattagagaaacaaaactaacatgaaaaaatatattataacttctaagattgtttatatttctctatttggattcttttctcaaaattcacatttctgattgtaagatgtcagacatacatagtatttgaagtagaaagcttaagttatgtatcaatcaaggaatagattgcatagcgtaagccagaaaagaataccttgagagcatttagagacttggaaagaattgaatcgagcacatcaggatgcaactccaagaactcagtaagatactcctgaacagcttgatcaaccaccctcctcacttctggatttcccaatcttgtcttttttcgacaaatataagtataaaagtaaataacaaaagtaccacaaaaaaaaaataccatcaataagaattagaggaacagcaaaaagaaaagtagaagcaccttggtttggccttcaaactctgggtttggaaccttgactgagataacgcatgtcaatccctctcttacatgctcaccgctcaaagtaatatctttttcctgattaaaatgaataacatcaacatggaatatgattcttttctatgtgatttacagttcagtctcaatgctccataccatgtaaatgctaggaatttgtaaccaaaatacatggtgaactagaaaggacacaccttaatgatttttgatttcttgcctaggttattgagagttcttgttaatgaagccttcataccatctatatgtgtgccaccatcaaccgtgcgtatgctattagcatatcccagcattgtatctgaataggcatctgaacacctggtaagagcaaaagagatagatttgttgttatctataatttctttctttcaatagatcttcccaatgcacactgtaattttcagatagacccatgaacaatcaaccccacacctcttgaaaaaaaaatcgttggcctgactactctatgtactcctttaggaaacttacacctaatatatcccatgcaaactttgtacgataatgacaaggtcgtgaatcgtgataaaccataagactaaaagaaatttaaagtattcaataagtgttgatgaaaatgctttgacatcaattttctaaacggatgattaggaattactgaagaaatggcttaccattggagagcagcatctattgagattccatcaacttcttttctaaaacccacaatgtcatgaagtggtttctggatcagagaacttttagtcagctacagatatatgaaaaagccaatccaaaaatgctaagtaggacactattcatatagagccataaaaagaatgccaactctatactacatgcatatatgtcgcacctttctttctttgtgagaaacgttaatggtattagaaaggggaaaggattacaaaagaattacaagagatgataaggcatcatctacaaaagaagttgacatgtgatcattagcttaacaaggtcaccaatgcctagaaaggctttttcgcctcaaactatggcattcaataatgtccttagg

SEQ ID NO: 48099 - DNA, 1617 bp, Cannabis sativa
tataactatatttttaatatatatataaattcataacagagtagacataattaaagctatatttttttgaatgaacagtaaaactatattaaaaatttattacaagaaagatagaaaagattactttgaaagttaaggaaatttgtttctttacttttccttccttaatggtttcacctttgagctgattgttttttttttatttatcaaaaaggagtaaggagaagaaaggagaagacttcagtgttacaataaagaaaaagagaaaaaaagaagaacacatggaaaaactggagaagaaagaagaacaggaagaacagaagaagaactgtagactaggaagcaattatataattaaagccaaattagtatggtgtacattgatgcctagcaatatataatctatagacaatagactgtatgctgaaactattgacagggtactaaatgaggtcatatgctttttttgtaatagtaacgaaatgtcatttcaaggtaaataacatgcatgtccttttctttttaccattaataaccattgatcaaaatatatatgtatatgctcatctaaaccctagaagtcaatatcttttagtttctttcctgaattaattattagagtggatcgtcgatttcttttatccgtttttcacatatccttacccctctccagctcatcttgtgttgtatgagttggtttgttgtttaattacaccgtacgtacacatatatacgatatatcataaatgaattaagattaggagataaaataagagacctcatttcttctctatacacacttctgtaaagcctgtaatggatatatgtaccaacggtccacatgtaattttgtgagcagacagggcagaaaagctactgtgcacatcgagacacttcgaagctatgtaattatactatatataatagaaagaaacaatatatctataaatgtatgtgtatgtatatattatgaagtccaacagtaactggagctgtaattttcgtagactggagtctttccccaccaaaacctttcgttcatcgtttgtttgtatacaatattttctcttgttggatcttgtgcaaaaatatagacaattctctgatcatgatcagcagtgtactgatttcatctctccgaaaaagaaaagccttcgtttcttttttcgatccccacctgtattatttactcctcctctatcaacagttttgaaactctgtccagattctacataactttaatctctacatttttctcgtcttatgtccatcggttcagagaaagtgatcaggcatgtcgtttccaaatccgacacttatatatatatatatatatatatatacatgtgtgtgcatttttcttcttcttttctttaaactaatggtgtcactaagtgataataaatatcctatcatatatattttaatttaataaataatataataaagggctaattactattcacaactaaagttgaacacgctatgatcgatacatatataactatacatacataatatttatggtgtactagtgataattaaatatgtacattacatatatgacaaacgcatgcatgtagtgatcatataatattttgtatgtatatatatata

SEQ ID NO: 48100 - DNA, 2219 bp, Cannabis sativa
caaaaaccttcaatgtagcggtaagctatataatgcaatgaaattgtcattatttctgaatagtttagtttcacacttgttgtgatgtgaaacacttcattcctgacttatacagcttgctatatctttaagcatttagctaaataaattttgtttatcatggtttgcaatttgcataggcctagcattacttatagtcttataattggtgacaaaattgaagtgatcattgcatctgacttgtattctagtttctttgcatctcttctttccttgagctttctgttattttgataggttgtgatatttaatcaagtcaccacaaagctcacagaaggatcatttcagttagctctggcacttggcaagtcatgcttttactgcaccttactctcaaatgatctttcatgttaaatagttaccatttagttgatcatatttgtggtttgatcttgctgcaggtgatagctggtcacattcctgcacaaatcggatcatcttgtactggaacgaggatgagcgaaatgcatacatagacaagtcaccctctctccgatcagcctcagctccattttcggtcacatgcaaagggatccggaacactgctaccaccagtaagagagccaaattgatgtgagatttaaattggatgtaatacactccagagacattcctttttgtgatggctgaagaagttgcttgctttttcaggagtacaaatatatatttctttagaaaatattatttttaatatcatactttttttttttgggggtaatatcattttaaatcttttgttttgcaaaagctattgaatgaactttaagaaattgcaaaaatcaagttcagtttattttgtacaattttaaaaaaatacgagtttgaattgtcattcagaaaaataaattctccaatcaataattttagaataatacaataaccaaaattatatttacctttacctttacttttttgctcttgatatttatcataaccttttaagttgatttagtacaaaatattgttatcaaaaaagatttgggataaaatgtttgtatctcaaacttcgtcacaaattataggatacatttgtatattttgttaaaacagttaaaaatcagtatgatgtattcaattgtgttgtgtgtatatacaaaaacaggatgctgttatattttgaataatggttcattcgttataagtttgaaaactgaactggttaagtggtgagctcagctagtttatttctttattttaagtttgaacgtcaaaaaggctgtcctatgctttaccaccaacttctaaacaaatcttcaaatgaaagtaaagcaaattatttgttatgttattattgattgaccactctctatctctagctctaccaccaaacctttttccaagttccgtacttttcaactacccactacaactaatattaaggcctaatctttattttaattcttatttaggtctgctaaacaaactggagttgttcctgcagccgggaatcttatttataatattgttaattgttttagtgtacatattgtattcttctttgagatgcaattgtcataaaaagttgagtcaagtgtaagagtatatgtatatgcttaaaatatcataataatcagtgtcgtccacaaccaatgtatgtactaaattgtatcaagcttccatcaatttctaactctacctttaaaatacataattataaatatcattttttttttatttattttacctcatacttatatattacactataaattagttttttcaaaatacatactaaaacttcaatatataactttttttaatatataaatatttcatcacataaaaaaatattaaaacaaaaaataaaattttaaagtaatgaatagtattccataaatatacaaatagttaaatttaaaaggaaattttataaaaatataattttgaaattaataatttacaaaaatataagaatttaacttttctcttttttctattggttttttatttgaaagataatttttatggatttttcttttataactattactaaaaatgtcacataattatattttttttaaaaaaaaaattatagaataataatcccatatcattaacttttaagaataaaaagccataaataaagataaaaagttaaaccccataaaaatgcatagagttaaaaaaaaaaaaagaagccatattttatgtaatttctc

SEQ ID NO: 48101 - DNA, 1663 bp, Cannabis sativa
caactataaaataaaatacatttgaatgaaaatagtagtatatattatatattgatggggacaagtgtatgtgtccggctttccaattataataaaaaatattcaaatcatcagccaaaacaaagttaaagaaagaaattaatgcataaacatatatttgggcatttgcccttattaattgactaatcatcaactgtttgtatattaatgcttttttcctcttctgacttttcaaacagcataaagttaaattttatatcattttggtgccaatatttaatttggacgtaagtaaagctcctaattattaaattatgattattattttttgagtggtaaatagaaatttttattaataggtaaattaaacataatttattatatgctaatattgatttcgaacacaagtaatagtctaaccaaactgattacaataaataggaaaaaaaaaactctttaattaaataacacataaacagtcagttgtgagaaatacaaacaatactaaatttctatgtaaccgaccacacttactaaagaagtcagttgtactctaattaccaaaattttcacccttccaagtcttttggattccatgctaatcgaggctcatacactacaagaattactataaatacctactacattaaactaattattattgtccacacataatttaaaatttaaactaattattatagtccacacataattaaaaacctaattaaactaattattattatcttcatcaaatacattatctaaaattctaaaccaacattcaagttttgggattgtttgtgcattatcccgagcttgtggtaatggcggtaaagggtaacatatggctgctttgaagttaatactcaaaaaattgtcgagtctgttatttgtcaattacccatttttctttagcctattcattgacccaagttttgtccttttttctagtatgactattttttcaagttcgaaggacatattgatctcagtctctatgtaatcatattagtgttagtgtgtttaaatatataattttgttaaatgaattgatgatttacttataagttcgtaatgccgagttgccattaattttatgtcttgagttgatgggtacataatttttttttaatatttttcttgttttgattggaacacagtaacgcactatacattttgagctaaaaaacatatcaataatctctttccaatactctctctcattacattctcagacttagcattgatagccacctccatattatgagggttattttcgtaatatttttaaaagtaagtatacctaatattctttctttcttaatatcttttttgcccatgttcatcatttttcatgttctagatgaccatcaatatcataataatattatattttaaggaataattaatcgttaattagttgggtgttcgattacttttaaataaaaatcatttgacattaattgttaacctttattttttgtaaaacttgctccttaaaatattgaggtatatcaacaaaatctaagtagttccctagcagtaacatactcacttcgacacccaattggcaaacaaaagcttggtgctccaagctaacaacttttcccatcaagcgtatgtagcaatggtccctcccgccttcaaatttccagtggtacat

SEQ ID NO: 48102 - DNA, 1622 bp, Cannabis sativa
taatccaatcttgtccagtccagtccaatcattttcaatccaatccagtccaatcctgcgtaccaaacgggcccaaaagggttcggggtataaccgtataaggacctattaagtaactattaaaattaaactttttttttttacttttttgtcaatactcgtttatttaaacatttataaaaattttattttttaattttacattttcaaaaatttcataattacaaatatacctcttcatgtttatgtcatggttttttctctttttacacgccaccactgccataacttctcctttcttattttttttattataatttttttaattttctgttactctttccttggtattttgttgccacaacccacgatcaccccgtttgaagccctaacccacgatttttgaacctcccatctatgccattatctccattatcttccataacttttgtaagtttttcatcccacattgtcttatcttctttctataaatagccaccactaggtcgggttcgaagtcaccttccccagctaaaaaaatttctaaaaatactaagaaacctcctacaaattcatctaaagttgatcctaagatgggtttgaagcgcattgcgaagaaatgaataggtgatgttacagagccatctggttctaaaaaaagacctattccagataagattgagtctcgtaagagaaagagagcaaaatcttcgaaatctgccaaggatgtaagttgggttatgttgtgtaggatttttgttcctaacttgtccctacacacaacaacattaatcaataaaagccaaggttaagtctgacctttacccaatcaaagaaacttttgactccctgcttttattttaaccaatacgacaaccccactttttaattgtaacaggtcattttatatatatatttttttagaaaccctaaaagcacataaccctaaaagtacataacatcacacacatatatatattatctcatttcccaaatgcacacaaacagctgcacattaaaaaccctagcagagagcctatcttctccttcttcttcaatgttcttctatgaagaacatgaaaaaccagcagccaacacacccagaaatcaaagctcagcccagttagaatcaaccccaccgagccttagtctttgtggttcttcactgaagaacacaaagacaacaacaacaaataaacccagaaaaataacccctaaaccgattcaatacccaggaaacacaaacagaaattaaaccaacataatttcacaaaacagagagaaaaagagagataacaccagatttatagaggttccccaaagaatctgggtacgtcctcttgagctcgcctcttccactatagatcttcaatgatcaagagattacaaagcttggattccaactcaccacgttttgagaggtaatccgaatctatatatgtatatatacagtgttttactcctctattttcctctctgtttttctctctaatcacaatactaactttttgtgtttcttctcttctttaatgcatgaacaacacccctggctattggatctccgaaccaccaccttggttccaaagcttacaccattataagcctcttccaagaagccccaa

SEQ ID NO: 48103 - DNA, 1236 bp, Cannabis sativa
aaataaaatttaaacaattatttatcttacttataaaaaaacaatcgctcaaatttaattttcaatattgtaagctaatcgaaattttctgaaaatctacatgcaatcatacataactataacaatcatacataactataacgtataacgtcatgaaaaaaaaattgaactaaaaaattatcttcggtgtcaaaatagggcctatccaaacaatccttagacatagcctatctttcttaaccactaatacatatatatataattagttaattattaagcttaaaaagttatatgtattaattaatagtagtttaattacttacccaatcatggcaagagagcatgaagtgatcagccccaagagttcgattccagaaaggatatttcctagaaataaggtcaacatagtcaacgacagtagttttaatagaagaaaggtcattagtaccatctttgtaaaggtactgaaccattctaaccacactaaaaggcaagaaataaagtaaagctctgtttgggtctctggttctaaacactgttttctctttttctatctcattaataaaccttccttcacttgagtatatgttcttgcatggtccttcatggaaaattggaccttctccttcttcatacacataaatcttcaacaccttttccatctctaggtagctcctgtgaaaccctcttggattcctgtagattgagcctagtcgaggattaaagtcccaatctttaatactagtgttactgttcttgttcatgattatatctctggctttgaccaaccttgcttctattttctccaaaaataggttactttttcttcttcttctattactaatcctctggtcatggctcccctgtatatacatatagagagaaagtaattatatatacatatatagtcatagaccttagttttggctgagcttttaaaagctgttttagctctaaaaaaattctcttaacagtaattttctcgagaagagctttctcggatactaaaatcaaactcagtcaaacaagtctttatagatacatgtagagagaaagtaattatgtagacatatatagaccttagttttagctctaaaaaaactcttttaatagtaattttctcgagaagagctttctgaaaagcagaaacttagccgaataggataaggaaaaactttaatgttattagttattcaaggatcatcataagttgttttagaggttaagaaagtggta

SEQ ID NO: 48104 - DNA, 1218 bp, Cannabis sativa
ttaaaagggactgtcaaacatggcctatggttgcggccatcctcttccacatctcttcaagcctactctgatgctgattgggccagctgtattgatgatcgcaggtccactggtggttacttggtattccttggagacaatctcatcagctggtcagcaaagaagcaacacgttgttgctcgttccagcacggaaagtgagttcagagctttggctaatgcagctgctgaactcaaatggattcggtcgctgctgcaagaacttcaagtttctatggtgcatactccagtcatttgggtagataaccaaagcgcttccactctcgctgccaacccagtctttcacgcgaggtctaaacacattgaaatcgacctccatttcgttagagaacagattttagacaacaaagtttctgttagatatgttccatctttagatcaggctgccgatattttgacaaaggccttgtctactgaacgatttttgtatctaaaaaccaaacttcaaatggtgtccacaccatttagtttgaggggggatgttagtatagatggttaattctgtaatttcagttagttcttctaactaatttctgttatttgtttgtaactgtttctttcattttagttgtctcttgtgtatataaacagaccttcagtgaataaagaactgtgttctgggtttactctctctcctgcatactctgcatttttctgtttcttcttttcttcatactctgaagatctcacaagcaccaatgccttttaagatttgtctttgatggaacttatttgttctaaccaacacactttaagaagcaaaattaatattatatgtaaattgatatttttctaaaattattattttatgtatccacaaaataatagtgtcagttttataactaatacaacttgcacactttgtttcaggcccaaaaacaaggagcccaacaaccaatcaagtcaatattctcttgccaatttctatcaatgcaacaagagtcacaaagactctttatttcagcccagcaagaataaagatcagcccaagagaaagcaacccaattccatattctctctccaatcaaaggttaacctttttcacactttgtttatttaattacttcggtcagagtgaagagtcaaacaagactctccatttcactcaataatttggcccaacaagagaagcagcccacctagataaaaccctaagaaa

SEQ ID NO: 48105 - DNA, 1436 bp, Cannabis sativa
tttttgtgactaattaatatcttttgctacggacctttcagtcacaatataggattaccaatttataattagtcacaacttttttacttttagttacaaattttgttatgactaaaagtaaaattttttgtactgacaattcaatctaatacaatatattatacaatacaatataacacaacataacaaacgagctaaaatggtatgttatgatagagtttcaatatttgtaatgttgactatgatttgtataaaaaaatgaaattttaagttgtataattaaatacaattttaccttacaagagaactaaatttcattatttgtaatgttgagcttaattgatttttgatattttcaatatgtatagaaatgaacatacgttacaactcaattttctatatttgtttcttggatgttacaagtcaattattatgttctttgtgcaaaaaaaaacagatatatatattaattatattctattttctaagaatattattagttttacaattaattactattttatgatacaaagctgtctttaattggaacaagttttttcaaacatttgactatctagtacatctgcatgtatgacacttgtgtatttatatttttataaatttccattgacgtaagaggagtaaccttgaaatattagaaattaaggttactattaggatatttcccaaaaataactcttgacagaaatttattgtacaacctcttaaccaaaaaaaaaaaagatattttggtaaacttactatccattttgattttcaaaaaatttcaatccattttttttatttttgtgttataaatatatttatgaacactagtaaaattttaaaaaatttcgaataatttacggtaataaaattagatttatatatttaattatatatgtgtgactgttttttatacaaatgattgtgcaactttctttctttctttatttattttgtatttattttttttcttttcaaggaaagtttaaagatacttattatttactttattgtcttcatgtgtcctattaacaattttttaatgatggttctccttaagatagttaagacatatatcacaaacgtaaaattttattactttgtttaaaacagtttcttttttatgttactcaatcatgcacttgtgagtataatatttaaaatataccattttttgttcaactattttcataatcaagtctatcaaaaatacaaataacgacacatttattttttctcatgacaaagaaagtttggtgaaaatacaatataaaaaaaatcatctagggccagagccaccatatgtcatgatatgtccccagccacgatgaaatccccaatctttaactaaataaaagtcaatatcaatggaagaaatttttgtgtttttagcatcttcttgtatgtgtgcctcatttatagttgttaat

SEQ ID NO: 48106 - DNA, 889 bp, Cannabis sativa
tagttaaattcaaatcatcactaattgttttgtttcatgttaagtgtgtagaaatgttaaaagaatactcttgagttatcttttattactattggaaaagcctttaaatagcctgagtacaatcttagacattaattacatctcaactataagctactaacacctcaactaatctaataaatactaattatttctacaccctccctcaagcaggtgcatacatttataatccttttgtcaacaaatgagcagcttcttgttggcttggcacaaaaacaacacagttctgacggtccaccttcacatgtttagttctatcatgataaactggaatgtgtgctatattaatagctgatttattgtcacacttttaaagttgtagttcttcaataactcgtttgatccaaattagctcacacactccttgagcaagagctctaagctcaacttcagcactacttcttccgacaacagattgtttcttacttctccaagtaacaaggtttccccataccttaatgtccatcttctgtcctcaatcgaacttacccagtctatatttgtgaatgctttcatttttcctgaataacaaacctttcactggggtcttctttaggtttctaaagggttgagcatatattgactaaccaagctaactacaaaagcaatgtcaggtctggtgtgagacaaacagatcaatctttccactagtcattgatacatccctttgtctacaagtttctccttttctttcttcttgtactttcctttaaatttcactggtcttcctgctagtttacatctgagcataccagtccctttgagcagatcaataacatacttacgttgagagactgaaattccctgttttgttcttgcaaactccatg

SEQ ID NO: 48107 - DNA, 853 bp, Cannabis sativa
tctattggcccccatctctcacattgccaaatctagtgaagcttcgtacacctcctcctgaccgagccttgggaacccagtttctcatcttagtcgcagctttcccgggcaccgcacgagatgtcccaatcaactttttcctcgagccactcacaacattggtcgtccccctcgccgcggcaccaccgttgctcgtaccagatggcggcccttcaagaatcgagctcactggcagaagctccagtcactgaaccggcgcaggcttcgtcacagcgcttgagaagacgtcatgatacttggactctgtagatagccaaggaccaaacataggaaagggggcaccttcaaggctctcgacagtaactggagaagaaagagagcaacctttcctttaatgtaacaaacagccacagaagtagcaaaatatacctattttttcaaacttgaactataaccatcttttcaccccattagctaaatcaaaaaaaatccaaataccaaaggtttttcaagattaattcccagcaaaaccctgagaaatagcttccaagacatcggtttgtcctcctccaaatcaacattgatcaccttcccgattagccaccaacaggttaccgtttgtgagagagaagtactcatgaggtaaattgtcaatttgtacccatatcttgatgctatcaatacaaaccgatccatcacagctgggactccacgaacgcaatgcaaaggtataacctttgaaagaccatggacagtagtggaactaacacttattagggggaggggccgatgtacatattaattttaacaaaaaaaaaataaaaaaaaaataaatactattttttgttaaaaa

SEQ ID NO: 48108 - DNA, 1629 bp, Cannabis sativa
caaacaggttgtcgtttaatattatatgatcttcaatcaacgatcaacgtggcgtttagttcttcttattacatgaaaatgtggttaaattaattttccacgtagatgtcttagctagatagtataaaataataataatggtttgttaaaagtagtgaagtattacaatgtataatgtaatatacagataatataaaaatttcaaattttttcattattatatttataatatttatacagttattatagaaagtttttttattaatatatgtgtacaagtcttttttttttttttttttcaaaattaagacattcattcttattatctaaaatatatacaaactcatatacaataaatctcgcttttgtgtttatttgtggatttttttttaaatatatattttatataaatatatagattgcttatacatatacaaaaaatatgtattatattacccaagaatatgtattattacccaagaattacaccgttttaattatcaaattcatttttctgttccaccattgtataaaagcataattttaaaacattcaaaaaaaaaaaatgtaaaatgttacaacttgtttttgtgcttgcaaacagaaattaattaaattacatgttgtctttcttattgcaacagaagaaattttaattttaatttttttttatgtgttgtaagatagatttaaacagtatgttttaaggtatgcttggaacaagagtttgttttttttcaatgatagaacaaagtttgtttgatctttaattttaatatataaattattgaaaagaaaattataaattagtgtgtttctaaccataattataattacttacgaaaaaactataattataaggatttttttatgttatttttacatttcaaaataatattaatatttataaaactaattctataggttaaatttttaacagaatattttaatattcttaaaccaacaaaaataattaaatagaaacattttatatataaagatatataatgtcaaatcatcattttctaactttgtttctagtttcataaaatatataatcatacacgcgaaaaatagattaaaaacaaaatttataggtaaaaatttccatgtgtacatatgcttgaatgatgaagaagaaaagcattatatatcttagtagataactaaacatgttccgtgttttatgcttagatctaccaaatgtcaaagagggtcacatattcctttactattaagtttatatatccaaataataataagtcaataacattaaattctccaaaaaaaaaaaaaaagtcaatattaataacaatactatatgttctcttcacgtgcctaccatctgttactaaaactctattaatcattcaaacatgccaacatacacatgagctccaaagagaatgaagcttccccaaactattaatttatatttttcatttttttttttcatgttgtcttcactttttttatttttcatatacgtagtgaaaatacaacttgtaatattaaactaataatcttacgttataatgttgttaagtgttagagtataccattaattaattaatacaagtgataccattagtaaaattaaatttctatctattacaagtgtcatatcat

SEQ ID NO: 48109 - DNA, 1690 bp, Cannabis sativa
catttttacggaattctacatagagtctcatattgcaactagcgctgcaacctaaatcgcaacaaaaaatcgtatagcaacccacattgaaatgaccggataaaccattttagaaacccaaaccgcaaatttaaaaaaagaaaaagttaaaaaaacagtttatggggtaattctccttatttttattagctaatttattatatttgactattttcttaatttttttaaaaaagacacatttgctaacttagtttacaaatttaaggtaattttacatctcagactatttatcaacattacactaattagaatttttactcccttaatttttattggtaccaaataatcactttttcagaattttttttagttgctaaatattttcattgaactaatgagattgttagatttaatgacatttgtccaggttcattcaattttactaattatatgattgttcatataataaattatgctctctagactttaatatctaccaaattatgctcctgaaactttaacatgttttaaattaaaccactaaactttcattcatgttagactttccttattaacattagaaaaaaaatatctttaaatttaataattttaatatttcagaaaaaaattgttaactgccttaaaaattcataaatataatttaatacatgttaaaatttaaaattaagtgccaaaaatcataattagcctaaaaatttattagtactagaagagtattactagctttgacggaaaaactaaaaggcaaaacacgaatattcttgtggttgatttcatataagaaactgaagattaaattaaataaataaaacataaatatatatcttatttgatgatataaatatatatattaatttaaaacacacatatttgttttagttatgtgttggaatatatataagggagtttgggtgttgttgttggctgtgatttgccgcagacatattcgcaataaccctcgacacaattgcaaatgaggcatccattacaggcctcttcgtcgcaatccctagaatctctgcaagctactttcggttcactaataccatccacaccatatcctgcatatttttaatttttacaccattttatttatttctataatataattataatgaaatattaaaacacactttattaatttatttcatacgagaaaccacaattaatttataaaatatcacattggtttgaggttgccaaataacaagacttatatattatgctttactggttcattacaacaaaacaacaaataagaatatgagagagagagagagagagagtttcaattacccagggttgttataacgaacaatagcaccaccaagaaaattacgaccttgttgttccaactccaagagtacttcgccatattggtgacagataaggagtactaatattattgaactctattatatatttgtgtcttcgctggttttatcatatatataaccctcgacgtattcttataaggaaaactgttttaagagggttggtaatttaggccatttatttatttattttttgaacaaaccaatttaggcatttttatttgcatacaatgcttatcccaacacttatatataataataataataataatacaatgcttatcccaacccaaacaaatttagctaaaagaatatcaatatatcagtcaaatttg

SEQ ID NO: 48110 - DNA, 1277 bp, Cannabis sativa
tatgagataagataaaaccactactatgtttaaaatataagaagcattatttccctgaaaaatacactaaatttgttcctttattcctaaagacacgattttgtttaaactataaaatacatacgtcagagagagagaaattcctttagcttatacacacccttaattacttaattaatacaaaatcttttcattaaaaaagtgaatcaatttgcaattaatattgtaatgctatgatctccacataataagacatattatgtttacgatcacaacgcagaagccagcaagaaatctataccacatatatacataaatataggaaataattgtgtagtgtttaaatgatgatatatatctcgattcctcggaacatttataacataagaaaggtacaactcattatatataaatatatactacactatatattctctatatctcgcgcgagatgatgatttgacgcaagaataagaaccaaattaaaaccaaaaaagctaagagaaaagacataacaaaactgcctcatttggaacaaaattttgaagatcaaaacgacatgtcgtttaatatcatccatacgaccaaaaactaataataagattaatcaaacatgtgattggggggcttggtcatgatcatgatcatcatcatcaccatcacgatcagctgatgagcaagtgcaaggtggaagaacagcgagtagtgaaggagttgccaagtaagttggggcttcgtctccggccattatgaccacaatcttggggccatcatcttcatcatcaccattaacgttcttattatgattagtactagacttgttctcatcattttcgtcaacagaagaagaatagcgtttgcggtaggagcaaatgaggaggagtaaagccaaactgatgagtaacaacatgatagctaagcttccaaacaagtatgggattggagatttccatacatttgttgtcgttttaatcactactgctgatgctggtgatgtcgtttctgcactacctcccattacctttaaatctctcatggttataaaaatatatattatgattttttaaggaggagaggaattaagggtagttggttaaatatatgtttatggggttttatgtttttttatttttggtgtttgggatatgaaactcaaggttggtgatagtttgaatttataggaaaagttggatgagaatgaaatgcttagctaattgtgattgaattggatatttgaccatattgtccttggagggtttaagaggaagattcttttt

SEQ ID NO: 48111 - DNA, 979 bp, Cannabis sativa
tatatatatagcatgttttaattatatatattgggaaaaaaaattggtgagagcatcagttttgttttacttttgttttaattattttattttgttattttacagttgtttcataaaaaataatatttttataaaagatttcgtgtaataataaaattgtaaatttttatccccatatatcttattattttttctttttttctatatatacatctttagcagcaacagctatggaagttaaggaaaaacaagacaagaacaaagtaactacctaaaaaaccctaatgagacgactctcccactaatatttttaatgaataagtcctattagtttatgaaagttaccaaagtaataaaagcatagctttgcctaattaatagactgcatatatattgattataaacacactttgaaagaggctagctaatctaaattcgcaactttaaatacatgtttggctgtgggttatgggttaatgagatttggtcaatgagcttagtttgggtactacaataatcttaagagatacttgttacaagaaaattattaaaaggtactaatggtgcctaacacagtatgttattagtacaattaagtatcaagttacatataatttaatacattaacttttatagaatatcgttaaccaataacaaaacgataattctaaacaatactaaacaccactgatactttatatataacaatactcctattacaacaacttcaatatatttatataaatttattatataaccagtaagagagtctatcaaagatgggagattcaatacaaaaggaaaatttaattttttatgcttacatttagttaaaaaaattttcctaaatacataataactaatatttgtaggatatgacaacttttatgatattcctaaaatactccccatttacatcacactcatttacacaatgggactccctcatcggacaccacatcggacacaatcggaccca

SEQ ID NO: 48112 - DNA, 776 bp, Cannabis sativa
tggtaaaataattccaacactggctgccaaggaggctatcgtaagatctgtgggcctttccctctcagcctatacccatagagtaacgagttggtccaaggggagaagaatccgtttgggttagaaggaaaatatcagacccagtagtcaaagcttcagagggtgttgagcttgaagaggtaagctcgacatttgaatcactggttacctgcgtctgaagtatgcagggttgaggaggctcctcagagattggattagtttgagcgcatgtagtgatacgaccattcacgatgcccgatgcttggggcctatggtagagtctccatcatgtttgtcattttgcggatccaaaacaagtaagttctcatggccctgtggaaccaccagggtggcagtgtcctcaagagggcaaacttcgccaacacccggaagagtgaccatcgaaaaatggcttacccttatttcattcgtcgccggcagctcctccatgacttgttccaccaatcttctcttcccaagaagttgacgccttgtctcccttgtgtcctaagcatcagcaatctttaatgagttacacatcttccactattgtttgaacttcatgtcaacagtcaaacgtttttggattatccattcttcaaaccaattaggaagtggggaagaaaatggtgatctcgccagctcctcgtgtttcatccaggcgccaaacataggaaagaatgctccatggtgatccttgattaatgtaggcagtttgaaacaaaacttttgagcgt

SEQ ID NO: 48113 - DNA, 2230 bp, Cannabis sativa
caaggaaggtaaagaaccattccacaataactccctgtctaatcctaaaccaaacttagctaaattatgagcatgagtattagcatcacttttaatgaacacaactttaggtctaggactaaaggacaaagagttgttaacagcaagtaagacatcatcacaaacactattattccagttacatttattaagcttatcaaccacaaccttacaatccgaatacaaagcatgaacaagcagattaattaatttagtccaagcaattgcaagagaaacaactttagcttcagctacaaccggtgcaattaacccaacaactggtttcaccaacccagcaatcacttgatctgaatcattcttcaccaccacacttaagctaaaaacctgcttcacattatcaattgccgcatctgtgaaaacctgatacctgcccggaggacaccgatccatatccaagagatcctgatcacaccgagttggaggagtaaatcttttctggtccgcatttaaatactgcaaaagaaagctttgacaccaagcaaatatatcctttggatcaagagtgaaccgattaaagaaagcattattcttttgattccaaatggtccataaaaagcacaacaataaatctgcgaaacctttatccaaacttgagaaaacattagaaagaaaatgcataatatccaaatgtttatttggtaagtaaaaatgagcaaaatccgaagccttccaagcttccgagctctagagcactctagcaaggcatgcataactgtttcagggaaattattgcacaaaggacataaatgagaaggtataatatgtcgttgggagagtaaaacagcaaccggcacaaaattagtaacaattctccacacaaaatgtttaactttaggaggaatgtgtgcatgccaaattctggcccagaaaggtttcatatcaagtgaagaagatgttgaagggatgtctcgagattcaagagctaagtgataagcagattttaccgtaaaaagcccagaactatccctcccccaaatttgctcatccttaccctcaagcccagaaaaaggaacacttaagatatcattaatagtggaatcatcaaagcaagatcgaagtctatccatattccaaggtcccaaaggatcaataaaataagatagtttcaactgctgagggtccagaccacaaagggtctgcttatatctagaattaggaatccaatggtctttaagggtatcaatagcctctccattacccactttccacactagaccagacgccaacaaatccctgccccaaaggatacttcgccaagaaaaggaaggcttatgaccaactttagcatcaagaatagaagagtttgggaaatacctagccttaagagttaaactcaataaagaatcaggttgggtaaaaatacgccaggcctgcttagcaagcatagcttgattaaaatgaataagagactgaaaccccaaaccccccacaaacttagaacgacagagagattgccaattttttcaatgaattttcctagaatttcccgaagaaccccaccaaaatctggccatcacaccctcaatttccttacaaagcttaacaggcaacctaaaacaagccattgcataggcaggaatggattgaattacaactttaagaaggacctccttcccagccttagaaaaacacttagaatgccaggattgaagaatagaagaaactctatctttgagaaaagagaaagagtgatgcttagacctggcaagacattgaggcagacctaaatacttactaatgaaaggtttatcctgcagattaagattagtaagaaaaaggtttttaatctgagcaggaacattaggagagaacagaatagaagatttattaaaattaatagcctggccagaagctttcgtataagtatcaaagatttcagttagagcatcacaagactctcgattagcagcacaaaaaataaggctatcatctgcaaaaaataaatgagttaaagaaggggccctacgcgagatagaaataccctttaaatgatgtctatccttatgaaatctaagcaaggaagataaaccttcagcacataaaataaacaagtaaggagaaaggggatccccctgtctaagaccccgagtaggctgaacactaccagtaacactaccattgatcaaaaaagaaatcttagtagtagaaatacacttcataataagagaca

SEQ ID NO: 48114 - DNA, 1073 bp, Cannabis sativa
tttttttttttaatttcgttagtatgtactgtgtttttatattaaacatgatacatataagatctagattctaaatcattagatttaaacaaaaatatgtagtatcagttacttctaaatgttcttttaataagttcaaaatgaaatctttactgataaaattagagaaaaattacaattttataaatatttagtaattaacactcatgtcacttaaaataaatattaaatttgtgacacttataaatttaaattttaggtacttatataatttaaaaataaattttctaaattttacgtataaaaatttaagttctaataatttattttacatacatataaaataaaatatatgattcaaatattttttttttgatgatttaaaattgtttaaagttctttaaaaatttgcatgataaggtaaatatttaagatgtataatataaattaaaaaaaaaattataattattatctaaataccaataaatattcattcacacactaaaatttctcaatagtacataaacactatttatttaaccttattatgaaaatgaccctactctgaaaaaagtaacttcaatcatacactacaaaaaatagattcagatctaatctattcactttttctattattattattatttattttgtaaaatgaccataatataaggctataaataatatgaagtcaaaaacatctttagatccattttagcataaaatattttatagtaatatgtgatttaaatacttaagtttttctttcagttacatataaatatttgtttaagttttgattagttacttgacccataagtgtcatgttattatcaacgtgtcattttttattagtatatattttaaataaaaaataaaatactaatcacttagactaattaaagaatgctacacaactatttacttaacacttaatggtcagattttaattaaaattttaaaaatatagcttaagtatcattaccttaaaaattaaacttaaatatttatatctattttatatttgtgatagaattgattcatatttattaaactgcaaaactcatctaaat

SEQ ID NO: 48115 - DNA, 1263 bp, Cannabis sativa
gcaaagttatgcctaatacgcataattcagcacaaggagtattcggcaataagtgggaaaggccatatctaatcgctgaaaaaattggcagcgcgacttatcgattgtccgatctcgacagcacagtccttaaaatagcttggaatggagaaattttaatgtattactaccaatggtacttgcatgcatttatacttagtcaatttattttgtaaaatgtaataagtatagcaggtgtaaccatcaatactgtactattgactaattaatgaaatttttcgaatttttgaaattttgaattatctgcattatttaaaattttatacttagggaaaatcatcacaccaagttgtgattagatcaagaagaacttttgcgaagataaaattagttttaattgaaatcacatgttaatgaagcaataaagggaaaaaattataacaaaaaaagtatcctcgaaaggatacgttaatcgaataacatagctaaacaagacattcaaaatacaagattcgagtgcccatgtaccgcttgaaaagtaagttcggcaatacaaaagaaattaaaaaaataagcaactagagtgttgggatcatccacgaccttgctaacaacaccatctgcgacttcatctgtattcgcattttcggcatccttagagaaaatatttcccctaagtccctgggtctcagtaggcgacatagcgcaaaatgcatcagccatttcaacccctctgctttgagaattgcgaagtcaaaataaggtagcttggtcagggtagtatagatataatcacaaacagcctggtcgtattgcttattcccgatttccttttcattctcaagatcgtgaccgagttcagtgactcatgattccaaaaccttggcttttaactctgcctgctctttagctttttccaagatcctcgatttctttgtccttcataggcgcttccagttcattttcttcacactttcttgaagaattatattctgcttcttcaggagattgagatcttttgagcatacaataaaatgccgttagaacatcgccataaattgcgatgctagttcagctgagcgagtcatcaggtcttcaataggaatccaatcaatcttagaaacagactcatcacttacaaacttttcttgaagagccatggcatcgcgggccctaacagtatgatctatcataaccttcttccccttatcttggtgagctttgtgctccttcttcgatgagtcagccgcctgtgtaggaaca

SEQ ID NO: 48116 - DNA, 1417 bp, Cannabis sativa
aaagacttaaaaactaaaaaaatattatataaattggtcaaacttaaatatgacatttatcataaaaacttttaaaatttcataataaataaaaataagaagagtatgagaaaacttgcttgctggtttcaaacacactaaattggttatattaatgtgaacattacgaattaggaatattgatacattaaaattgaataattattaacgattttgttttgtaactaattactaacgatttattgtactcaaaatcaaagatgatttgattcggatcctaattgaaaactaagtaaatttacaaagctacaaaaactagtctgtctggctgtgtgcggcggacctgtctacatttaaatatgtatatttatatatacattttttaaaaaattaaaaaaattacaataaccaaacaaaaactatagtctgtcgtaaaataaaatattacactaaaaccaaatataatgactgtttttcaaaaattgaaaatatacgcaaagaagctggcaagtgccaacggctctctcctaaattcctaataaccctttttttttaatcactcctaataaccattatatataaaaatataaatagttaataaatttgtaaaattaaaatttgctaataaatgaggttttttttttgttatacttatatcaggaccgattacttgtacatatatatatttttttaaatggtagaatttcatcttttaaaaaataatatgtccctttcaaaaaaaaaaaatgaaatttgactttaaaaagtcgtggaagtgagtgctttttacataagtattgtcactttcggtgattataaaaaaccaaacttttttttggccaagtaaaaaacaagtcatttaaactaattcccttaaaaatatatatataaaattagtgatatgcagtatttgtgaaacaaaatttaatgtaattatcccaatttattaacttaaagaatatggataaaattatccaattccaaatatattacacgatcccaaaatatgcggattaataagtgtaaaagtagaaagagctcaaaaaattatttggactattttttttgtactacaatagttttggatatagaatttgcaaatagaaaaaaaaaaaaaatacatatatatatattatattaggaaaacatggagttagggaataaatatttaaaaaagaaaaatagtgatcatcgtatgaacagagcagcattgccctaagaggacacgtgtccggatcacagtgccacctgtacttaaatgtcctttcatacatcgtcttcaccaaaatactattttaattttgaattttttctttctcttttattacattttcttttctttcccaagcttaaagctttaatcatttcacacgtgctgccttccttttctacgccggaaaaccctctctctctcctc

SEQ ID NO: 48117 - DNA, 2249 bp, Cannabis sativa
ttttttttttttttttttttgcgggaaattaaaatgtggaatgggttttgctcgtttaacaaaccagttttggagaatggtagctatggatgcaattgtactgagaaaaactaacgttgagtgtaggataaatgagggttatcgcaaacataggaggaaccctgttcttgctccctgcatgattgaaactttaatgaggaagaattggatctctagttgattcaggcccgactctaggcacagattcgcttttatttaagtaaaatttaagtgttttatatgcaacaaatattcataatttagttggttgagatggatgacataatattcaaggtcacgatttaaataccataacacttttttttttatatatatattttttaaggctccaaaatttaattcatattggccccatatattttcagggccagtcttgggttgatttatatcgaaattggccaggtatttcgttattctgtggaatgttttaaggtttgatggatctatttagaaatatgtaaatccaggttcaattctatgctttttttttctttttttcctaagatgtgatctgtttcttcttgcatcagattatggatgccaaccaaatgtaattactcaatattattctgtgtagcattatgcaaagatggggatgatcatgttgctgtggagatggctcaatttattatgactcaattttgttagtgatgtagcttccaacattactgttaatatgattatcttaggtgcttccctttatgatctaccatgatctaattgttttcttacattactattgtattttagtgggatgttaattaacttccatatgattgtacataaagttgttgatagtggaagttgttgcaatactgaaggggactgagactgtagacatgctttgaagatgatgatctctagcataatatctagaagcagaagcagggtaatgcaactggtcacaaaaaatattaatttattagttatgatatatgtaaacaaaattaatgattaattcattaaataaattgacaaacgtgatgagaagaatatctcaaatcattattattgattccacaacattcacctaaagaaaattttgttccatcataaaattcttgaatttgaccatcatcaaactcactttatgcgttaagcaagtactccatgtctttataggataatcctcatacttgagtagtccataatgttgaggcattgacagaagcagaggtgggggcagtggcattaatggtggaagagaatgaaaataatcatcttgatcaaacccatcatgatcttgatcatcattattattttggacttgggtttgtgaaactattaattaattttttcccttacccatctcaatcttcacatccaaacctttaatcttagcctcaaagtattgtaccaaacccatcaatgaatttttggataaaagaactagtttttcatcccaattctcgaagggtagtgatgaaaccccattatcgtgagtagtagtacttactttctcttcaagttttcttaacttcttgcccaacacattggagagacccacctcactattctttctcttctttgattctaatttttcataataatttgagatgacagaatgagctctgatcgagtcctctggccacacaaataacttgctagtggaatcataacacacaacacaaatttgagattgacataatttactaagttgttttgcttttttcatcaatgtagcttttctttcgagaaattttttatcattcttcataaattttgagagagagactgagatagacaaaaaaatagatagaatggaaagaattatgaatagtaatattaatgacggaaaggatttatagagtttagatttagggtcagcgatagatcgttgttctaaatagataactttgttaccgttggtatataatgtagcaatttaatgactatttccttatttaatgacatctggcagtatttaatgatgaatttccttaatgacacacccatgcaggagtacactacaagtaagtatcctttccataatacacggtcataatactataagggatatttgaaatgggttaatgctagcaagagaatagtaatgtgaaatattaccttgtttgtcttgagggtttaactttaaaatgttattcccttagtaatataaatacccttgatgagggtaatgttgatacattaaaaaggctaattaggatttttactccctgaactttaac

SEQ ID NO: 48118 - DNA, 2205 bp, Cannabis sativa
ggggccagagggtgttgtgcccccctccccccatcccccatttttttaaaaaaattacatataaaaaataactaaaactaaaaataagcaattttttttttttttttatatatatatatgtattgaccaatttttgggctcatcatatagatagcaatgtaaaacacaacaacaaaagctcatctttaaatatgaaagagagtagatctacatggaaaaagaattagggaaagaaaggctcacgaataataaatgggaagatcatcatttagagcaagcggatcatttatgatgaagataatggacttcaacagagttcttgcattatgaataattgattatttaactgtagaaattgaaattatccttaaatgatgaaggaagaaatatcaaaaatatatttatttttttgttattgtgaaatatttatgcaataaaagttgatcaagtgagtgattattttttttttatcacaatgtatattattgttatttaagctagatatctaataaagtttcaaagaattgagaatactgtacacaaaaatacaattaaattatcatttattttgcatgtatgtaaaataaaagaagcacagaaactttaagtattgttgagtgcagcatacttctttagttcaaatggatgaggtgaaaatattgaaaatcaaattagaagaactgatgtcgagggaggagtgttattggaaacaacaatgaagggcggattgggtggctttggggtgataaaatacgaaatattttcataataaagcctccttgacgaagaaaaagaatgccatcaatgaaattatgtcggagagtagttaacatttgagtatggaggaggacattgttggggaaattgaaagacattctagctaactaggatgctatttttggcattctggatgggatttcttgtagacacaattcttcccagctttctttgcttgaagctccttttggggaagctaaggtgatggaggccttatttcatctttttggtgataagacacggggttagatgatttaaaggctctttttttattaaaagaattggtctatttttggtcccgagttctgtaaggctattttggctattcttaataatgactccgatgtttctccaataaatgatattgtcattgttcttattcctaagaaaaagaatgcttaaaaaattcgtgattttaggcctaattagtctttgctcaattctttataaagtggttgctaaggtcttgtccaataggattaagcttgttctgaattcttttattgctcataattaaagtgcttttctttcggatcgtctgatttttgataatattttcattgctaatgaggttgttaatgctatctatcataagaaggggaatattgggtgggctactttgaaacttgacatggagaaggccttagatagggtcgagtggagtttcattgaagctattcttaaccattttggcttcccttccagttttgtttctataattattaagtaaatttcttcagtttcctttaagttttttattaatggctatttttctgatagttttgattctactaagagaattaggcaaggtgattctttgtccccctatttgtttttgctggtggtaaaagatctttcagctgaaattcatgttagagagcatgctagagattttgctggtatatatttctatctatagaacaacattagttatttttcacttactttttgctgatgatagccttttgtttactactattaataataaatcttgtttggttattaaagagactttaaatatctataagcgtgctacaggccaggctatcaactttgtcaagtcttctatcttgttctcccctaatactagttctagggatagagagtttttttgtaatcagttgggtttcaacaatgatagttttattagtaagtacctgggtgttcctcaatgtcttggtagagttaaccagtttgtcatccattacttgcttcaaaatgtttcttctaaaatgaatgttagaatggcaagtttttctccaaggttggtaaataaactcttgttaaagtggtggtttgggttgttctttcttatgcctgttatattattttataatataataataaagtagattaaaatgtgataaatatatgtgaataatatattaagtgtatggtaaataaatgtgtaacctatgattttataac

SEQ ID NO: 48119 - DNA, 1016 bp, Cannabis sativa
tacaaaatattatgatttgtcaattgggtttgtgtgaaaatccatggaggataatgaatattactcctccccagatcttgatgaagagacctacttcattgaaaaaatctctcctttactcaaaaccagttcattgttatcatcaccatcatcctcagaacccgaaaatcaccactttctcttcttcaaccaaattttttcataggagaaatgaacagagaagtggggctttggtgggtggccctgagatgttggatttgtgtggacttgggtattgggttcaggggtttaggtgttttccatggttggctttgaattttcatttgactcataatctcaacttgcatccctctactctacagcttgttcaaaactctggtaatcttcctatggttgccaaacctctttatgggatcttatctgatgctttttacatcaatggtgctcgtagaataccttatatatctattggaggttggttaaccttaactctcttcccattaagattttagctcactttgtaatcataatgattgcttaatgttctaatttggaaaactctgaatagtttacattgccgaaaataaagttaaaacagctacttaccgcgcatgtaagaaaaaataattatgtgtgtagttatgaagattttcctatactttttgaacaatctaatagaatataaaacttatcagttgttttgcagattttgtcatggggttcacttgcattgatacctgttgctggtcaatcacttcttacagttatgacaattgttcttctcagtaattttggagcatcaattacagaagttgctaaggatgctcttgttgctgaatatggtcaaaaacacaatttgaatggtcttcaatcttatgctttaatggcttcagcttctggtggaatacttggtaacttactaggtggatatttcttaatgaaagtgccacctagatccatgtttcttctattcacagttttgctttccattcaattcgggttttcgttaagaacaa

SEQ ID NO: 48120 - DNA, 1359 bp, Cannabis sativa
ccgatagtgggcccgatggtgggcttgatagggcccgatgcatgtgtaaaaacttagaatttgatatggcccgatggtcatgggcccgatggagcccgattgcatgtgtaaaaaaataaaatttgatatggtccgattggtccgatgggcccgatagtgggcccgatggtcgacagtgtagtgaaataaagagagaaaaaaaaaaaagaggggggtaatataaatggggagtattttagggatattattaaatgtgtcatatcccacaaatatcaaatattatgagtttagaagagaaattttaagaatatataagcataaaaaattaaatttcccataatatatatgtaattaatttacttccttaatattacttgaaggtaaaaaaaaatactaacaaatcatgcagaagtgaataaaacataacaaatattttgcaataaggatcaaaagtgtggatggttatcaaaccatcaattatttattaatacatgatttttgtaagagaaattactttatatattattttttaaaatttatagtttggttttccaaagtgatttctacaataatttctatgtgggttgttatataattttttgttgcgattaaaattgctccgctagttgcaatagaaatttttatataaaattctgtaaaaatgaaaaaaaaaataaataaataaaaaaaataaactgtttttaatgtaaactcaaattaaaccaattgattagatgacttaacttaagcaagaaaaagaaaagaaaagacatcaccatgcatgttttttttagataaagtaactaaaaaagacttatcaatatatatatcacaatttatgtacatatacacacacaaacaaaaacatttactcatacaaattaaaagaaaaaaaaacatgcattactctaattgtacataagatgatatacatataacacacatgttaaagaagtctaattagtagtgaatataaactctttagttgaacctgaaatagtgaaaaagaaggctatatctatatatatagaggattctgatggtgctctcgatcaaatatatctctttgtttagttgatcagttgttctgacctcctctaccgcgagtgggtccttgtcttcgtggtggtggagtccttctcgaaagtactattctagttgtgcccgtttcctcctgatcctcctcctatatattattaatataaatatatattagaaacttaattaaccatacacatttcaaatataataaataaataaataaataaataaataataacaataataaagagggagagggagagagattttacaggggtttttgtttgagatggatccttagaagaaggttgatctgaa

SEQ ID NO: 48121 - DNA, 1833 bp, Cannabis sativa
aaaaaaatatagagtatcgtactactacattatcgtcccactatcatacctatttcctctacaaattatacatcaaaaattaaaaaattaagactattgtacccacatcgtaccacaatcagacaaataatactatcaatgaaaaaaaaaataattaaaaccatcgtcctaaacatcatactcctgtcattccatatatcggactatcatcttcaacctaaattttattttctacctaggactatcataccagtattgaacgtatatcgtaccctgttgtcctagttttgcccaacctacaattgcatttctcaatacgacactatcagacctatattgtacttatgttggagatcatcgtaccactacgaaactcagagaaaaaaaaaacaaaaactcaaatttcaccctattatcacaaatttttcttgtgctaaaaacataacaaatctaaccaaaacctacattccactacacataaagcaaaattaaatctttaatactaaaaacacaaaaaaaatataaaaaaaaaatcttaaacaaacattgccaaacactacaaaatattcctaaaaacactaaaacaattaactaagactcactttgaacattttattcaatatcatcgtggtcggtggtgcgtgaagcatcgtgggtagattgagggctgtgggtatcgaattttttcgcttcgatgtgggtcgtggggtcttaaaggtgtttgattttggtgtcgtgggtaatcgatcgtgtggtttggattggcacggtagtttgacaatgatgggccttggttggcacggtgatcgacagtggttttaggtgagaagttgtgaaagtgaaagcgagagaacaagcaagatggtaagagagcgaaagagagagagggataggtgtttgaatgagaggagtaatttgaagtataatgaaaaattggctcatttagattattaattttagggatttttacacacatactaaaattttcaattttttttattgcggagcaaattttttttaaaaaaatactgtatatattttatactgtgtactgtattaagtttgattgctgttccatagttgtttttagttattctactgttattttaattgttctgttctattgttttacaactattttataaaaagaaaagacaatattttttaaaaatattttgtgtggcagtataatttaaacttttacccaaaatttattatttttataactcttaattttaagctatagtaaaccataaaaaaaattccatcatcaaatcaataatcaacaatatgtgtgtaatgttgcggctgatttacaaatttttttttttttttaaagaaaagactactatatattaaaaccaagaattataatacaatggacaatagtagatgtggaaattcttccaaccataaacaatcagtatctactgaaagagcaaatttagcaagagtatgagcaacactatttgtgcctctcttgatatgagaaatttgaactccggaaaaatcggacactaaaagtaaaatattagacaaaaagcaatgaaaatccgagaatggggcttgttggaatttcaaaccattaataactacaactgaatcagactctatggatttacaaacttttatgtatttataatgttaaattttgaagaagttgatattttattttcaaaaaaaatatatatgtaatgctgccacgtggcaaataagaaccgacaggaggttttgaaaagaaaaaaaaaggtggttaattatgaatcgtgtggccgaccaagcaagatcggtgagaatacgtgacctcatggtcatacacgtgtcaatttctcc

SEQ ID NO: 48122 - DNA, 1866 bp, Cannabis sativa
  modified_base (1284)..(1287): a, c, t, g, unknown or other
ccttgttgcttgcacacgcagatagccaaacttctcagaccggtagtactcggcctcattttatgtgcttcacatgctcgcacattttctttaatcaacggctattctgctcccctagagatttacaagcttttggagcaccatgaagatgttggaacaggtgatgaccaacttcttctctatttagactctgtgtacttttaaacgcttgtttggcatcgagtttttcgcatatgagagtgtagattgatgagtaagtattcattacaggtgctgtactctgtgttggaagtgaatggcatcggttcccatcatcatttttcgttcccaaatatataggagaagttagatggattgatgacggttttcgaggattacttccattcccatacaattccacccttggtggaactgctgcagcaccgccatatttcaataacaagaacaaagcatccgacgaccaatatgtaattaaatcgcattttctgaaaattttcgattaatacactattcatatctcgaaaatctatgaacttccattaatggttgcagctcaaaaatcttgaagcttgtactttactcgtcgagctacatctcaagcgaccttacccttatcgtggaagtgacatgtcaacatgggaggtaaaaaattaatcgcattctctttttggttctcttttcgtgttttgtgcttagttactaaagttcatcgaaactgaattcaggtcattggcgcattaccttacttagacagagagctttcaccgcctctataccgatcttttttcatcccttacctttggcaaaacaataacattttcggattgtacaaactgcttaaaagagtaccgaaatcagagtgaaagtatttagcatcatgtagattagcttctgttctgagattaaaaaccagattttgaacagcattacttgacagtgatcaccgaaatgtaatgtctccagttcgagatttcgatttttggtgggattttatgttgaattctttttgtcaatgttgtaatggagtagcttaattcatttgaaattgcattttcttgatatttccttctaacataattttctaaggatataaattttgtagttttctcaaacaaaaaatgtgttaatgattttttaaatcattatagcaatatattgagcatcattagtcgtagcaattatgggtgtttatttgttgggtcaaagtcggttttgtaaatgtcaatagctaagtattaggtcaagtcattattcaaagtattattttttttattagtatatttnnnntaatttttaaataaaaaataaaaacttaattacatgaactaattaaagattattacgtaataattaattttacacttaagggtgatatggttttaattatttgaaatcggaagttaaacttaaatatttataatataaattactcttatttttcttttaatatacacaactaaacaatcattgaaaaagtcattttcaatcttgtcacaaagcgtagttaatttgcactatattcgtagctgaatagattgaacattccattttaattagtttttaggtaagtgacggtggtgacgtactagattaggacaaccaactaatattaatggaaaaaataaaaatgtttaaaagggaaacatgtagaaggggaaatgggtcatagtgaaaaatattctagagaaatgtaagtaaatgactttatttttaactttatagatagttaatgtcttttttttttttaaattataaagcaaatgtccttttttttactttttaatacctagaatacctttcattatataaaatgtattatatgttttattcttttaatagaaattataaaaaacaatagatcaaaac

SEQ ID NO: 48123 - DNA, 1049 bp, Cannabis sativa
ttctaaagatattgtttcagtatacctttattatttgttttaacaacgtcaaatcattttctattcataatcatgaacaatgcattataattatttaggaatgaatatatacgtggcatttgttttatacgtgtgataaataattatttaaattttactttcaccattaaaaattatttaatttttttaaaaaattaccagtgattctaaaaatttacaacatatatgattatgaaaaaatgaaattaaaaactcttctctataccgaaataaataaaagatataccaaaattacttttgagggttcatttggtatgttggattatatcatattatattaaattatattttaaataatatttttatataaaattatatgtggtattgatttttatgaacatctaaatatatataatatttcagtataaattaaatttaatgtagtattacataataatataatatataatccaattcatacaatataataaaacttaacacgaggtaccaaaaaaaaaccctaaatgagatttattatatatttttctaaaattctttttaaaaggaagagatggtggagcttttattttcaaatgtatcatataaaaataaatcattcataacattttgacacctatcttgcaaagctttagttgcttttattaaaaccctcattttttactcctttactatgactcccaaaaaaaaaggcaattaggttaatatttttttaagggctgaagaagcttttctgaaaagggataaaaagaaaacaaaaaggaagttattcgaatcaatttcagccaagcatataatgtgggtttgcaccggaatggaccacatattgatacaaataaatttgtcttagtattttggtgatcccaactactatttttcaagtcacccaactatccaagtaagaaaaaaaaataaaagaaacaaacacttaggctgagcctagtttggtagttttgaagaattgaaagcaaactaagtcagaaaatatttgattgatgaacctaacattgacctagttattaattatattt

SEQ ID NO: 48124 - DNA, 900 bp, Cannabis sativa
tagccagccacgaacacgaatttgtcaaataatcagagagaaatgagaaaatgtcatatagttagagggtgcatacatgatccgatcaccacaaacacgaagaaaccgaggagaattgggccaactgggtagtcatttcctttctttgtagaggtctcaggaactgctcccctctttgtaatgttcttctggaacttggcaactttcttatcagcaaggcgctttgaggtagtctgtcaaagtaaaacagcaaaggacataaatttctacatatagatcctcaaaaattaaattttcaagcaaatcatccaactaagaacacaacccaagggaatttaacaaacatatatgattaaatgattacaatttacaaattacgatttatcaatctaaatatacatgtaaattttttaattcaaatttatccataatacctaataaaataaaatatataaataaaggttttcttcatcatgatttccataatccgatctaagcaacgaaacatctttacccaaaaagagttttttttttttcctttcataaataaaaaaaaaaaagaaactttcccaaagattaacaacgaaaacccagactaatttacccgcatagattcaagaaaaaaaattgcgacaatgattctcgaaaagttcatacaattaaaaaaaaatgttgtttgataaaaaatttagaataggtaaatctacactcctgcatgcaacaaagggaaaagaaaagtaaagaaaagaacgaagattattaaaggtacgaacagaaacctaatcgaatatgatcggagcatgaattaaggaaaagagggggcaattttatataacagagataaatgtaaaatataatcaaagatcgtatggaaaaagttgcttaccattgtagcgattt

SEQ ID NO: 48125 - DNA, 1499 bp, Cannabis sativa
  modified_base (1148)..(1152): a, c, t, g, unknown or other
gtatgagtagattatatttcttgacttagttttgaaggattgtaattctgatttgggtcgtaagaggcatttgggcctggtgtaattttggccactacactcctcatcaaagcattgatgcctacaatgcttgcgatgcccacaatgactctactggcataaaggaagtgattacagaagttgtttcagatgaggtaaaaataccataaaaaggataagcactacttggacgaatgggcttggttacattcgaagccaatgaatgaagaaaaagagcttgaagtccatttcaatgcagtcattccagacagaggcactttaggtcctgacacctgtataagaggtaattctcacttctgtttattctgcattccacgtttggaataattaaatcacatattgattagggaggatatgatccctttttcttggaactaaaccatcttagatccttatgattcattattatgataagatagacaaaatagtaagaagtctaaaccattttctttcaccttcccaatgcattagagtagacccttttgtcttgatgaagaatttgagtttcttccaatattatagcttcttaggctaggaagatattgcattttttgctcaaggagatccaaaataaaataatgttaatggttgtattcgaatcagtcttgttttttttttttttttgttgaaactaagttttatgtatttactacttttttcatgtgtctgacttttatgtttttcttgtagagaatccctagactatgcagatgggaatactgaatgacttcatgagcaatattgagggctacattgaagaggtcggggaaacagcaaagccaactagtgggaaaggcaaagctagatcatcttcccatccataaaataaggaattagcacccttgccaaggtgctataggctgttccagaggtttgtgtccagtggattttctcatctcttgcccttaagatggagccattgaagcaggttccttataatatcttgataagcctaatggtaaataattcgagtttatatatatatatatatatatatatattatgggctaattaggtaataagttggattatgatcctactattctatttcaacataaattttaattttgttataagtggataaatannnnnaatttattaattacagagatttatatagcatgtgtgaacataatatgagttatctgtggaataaaaatattttcaaatttggttgagtacttgctattctaagtgagtgtttgcatatctgcaattaaatgttctagtttcctttgaatactcgtgtaaatttggtattgtctaaatcttctaacaacagtcgctgactgagagaaagaaacgagggagagagggagcttaatagagatgacatggaaagagaaggatcacggggaaggaagagttaaaggattggtgagttagggctcgtcctttattttggtcaccagcactgtgatgagagagagagagagaga

SEQ ID NO: 48126 - DNA, 910 bp, Cannabis sativa
tacatcaaagcccaagctgcttcggggatggtccttcagatagaagttggaaaagaacaggggacctcccggcctaagttccctttctcaattcctaacgctagggcacctgatgccaacacttccgaagctggtaatccccactgattgttcatcacgttccttttgttcaggattactttacttataggccggtggaatttgatgaccgattatataaatttagaatgccccatttcctaggccggtcccgaatgggttgcggtcctcccgtacccatccccttggataactctacctatctgtcttccagttggttcctcccctcggacagctttctaggggacgacgacaccaaccttttagtatatacctttgctaaggcagaattagatcacaagggtaggattagtttcattatgttattcttgtatgcacgactttttggtgatgttctaacatctttacttatatccttaagcaacgaagccaatggaggacctcctggatgtacttgcccaaacctataggcctgaacccggcatgcctcagtcgcgcgacctggtggtgacttgcgggagatcttccactagcattcccgaggaccaagtcatcttaattgacgaggaagaagaagaagaaggcgagatcatccctcccctggaccgcaagcgtaaaggaaaaatagtggagacagagactgctaagaaaccgaggtgagcgggtactcctgctcccagtgctgactcatggattccttctgaagtggatgagtatcctgtgcctctgggcattatcttgactccccttcatccaggtgaggaagaggctcagctccggattgccaagtacaactacgccttgggggagtacaccaatgggaatacgaaggtggaggctctgaagaaaa

SEQ ID NO: 48127 - DNA, 2230 bp, Cannabis sativa
  modified_base (2090)..(2090): a, c, t, g, unknown or other
gtattattgggcctcttttattttttcaaaaataccatttttttaatgaaaaaagtatactatataaaaattttaggccctgggtttgagtgggctctaggcacgggcctagcccgccttagcctaggaccgggcctgttgcaccatatacacttcttcctcaagatctccatgtagaaaaatattcttaatatcaagctaatacaaagaccaatgatgagtaattgccatggaaataaacagtcgaacagatgtgagtttagcaataggagaagtatcacaatagtccactccataagtttgagcataaccttggcaacaagatggacctttaagcgagcaattgtgccatttagattgactttcaggtgtgaagagtgttgttatgcatgttttgtggaaatgcttagttaaattactggttaggttttaaaaaaaaattactggttaggtttttaatattatttttttttttaattttttttgggtaatatagatttagtctttcactaatcaggtagattatctgtgttttaatgtgtgcatccgcatcccttgatttaagttatgcagacttatttccataaattgctatgtactgtgtacatatgtagatcactatttcctaattatctttttgctatgaagtaagaaatttgatcctacctctctacattggtgagttaaaatgtggttttaccatcaatgtaggtaatcttgaatctccatcttccgagtttggtagtgtctttttcatctctcctataacgacaagctggatgggaaaaattaactataatgggcacaatctttcaagattgttatacgtggttgagataaacttggccacatcacaagtagagatgtaaacaggcgggtggggattggagatggctctccccgccttgtgacacggtctggcccattacgggtaaccgtttaataaaaatgttgattttgtttttccttaaattataaaataaattaaaagtcaatactttttttaatacaaattaataataataaatgaagttatgccatgaaaagtattatttttgtatattattcattatattatttattttaaataatatctttatgaaaaattaattacaaatggaaacatggttgattcgggatggggatcatgtcccacgtccccgcccctttaggagtgggttctcaggcccctaccccacatgttaaattgccatccctaattagaagtaagctcgctgctcattcaccaactagtcccacctacctacaacactttttttttgataacgagaaatcccgtctcaccctacaatatttgggacctacaaactatggcaatttataagtaggtatcttttttattttttatatttttttccgagaaaaagaattatgttcatatgaattgatatgtagtatcagatggactcaaaccttagagcttgtgagagcgaactacatgccaaattatttgagctacctttctcgggtggtgtcccacctacaacacagatggttaataactttattgtacttctgggtacctacatagtatttgctatagtttcatggtccccaaatattgtaaggttaggtgggggatcctagttttttttttaaaaaaacaactttattgtacttcttacttgtcttattagctccatgaagtcaaagattagtcgccatgcctagcaaacttgatcctaactccatagagtgtttgtttctaggatattacgcctcacaagaagggtgtatatgctattctgtttactatggatgtaattttctttgagaaccaaccttattatcaaataatccacatttaggggagaactcaaacacacatataatttttggccgaccaatgtcacaacagaacctaccttcactcctgcatccaatgttccaactaagattttaatctattggcacgtttactaaactattattggaatcagaatataatcaatggaaaaaacaatcgggttaaaatataaaataactagaaatagtattttattttgttgtttactaaactgactggaaaggaaatcaaaatcattttattttgtttacataatcagganaggtaatcggaatgacttaatttgactaaattgctattgttagaacatgtaattattttttatttatatattttttaagggcatagttgtcttttttatttttaattaataaaaatataattaatataaagtaagttaag

SEQ ID NO: 48128 - DNA, 1608 bp, Cannabis sativa
  modified_base (1233)..(1248): a, c, t, g, unknown or other
ttttttttgaaagatattttctttgaaaatgttgatattttttctggtaaactattataatactatgtctgtctttatcattaccacatgacgcgatattatttttttatttaattattatagcttaatattgaataacaataactaataataatatctttttaattgattattgtaatatatatttttaaaacacgaactttttcttaattgcctcttttttttcttccttgtattactaatcaattgattattaagtaacgaaattgcattatacatggtcaaaattggactttttccaaaatgaaatcttaaaaacgtgattatgttagggaggtggggtgggcataataacaggtggaccctaatatgaaaatatcttgggaactttattatagctacggaaattgctttagaaaaaactcttaagatattttgtgagccagccgagccgagccgagccgagccgagtaataaagaatcctcttaaaagattatcgaaaacgaagatacaaggtgttttcttaccaaaaaaaacaagttgttttaatttaaactttattttttcttttaaacatatatatttatccgcaatgtagggttgagattgattttaattacgatgaaattttaatagtttttttcctttactttttgatttgttattattatttaattaatgagatatgttttaactatgctttagtatgtttcgttaaacttcaacatgatggacaaaggaatagaatatcctataataaataataatactattcattttagttactttttccatggcacgaattagttctcttttcccgattgattatatatggaattatattccacatccaaattaattataccaaaaatatcatgcataaagtcattccaaaccccattattttatttgggacatgatttctttaatttataatgtttttcttacatttgttactatactcattttcttattgacatatatttactatataaaaatatatgtgctttttaagtgatacatatttgttttataaaagcaacttactcaaattaaattatacaatttttttcttctagaattaaataggccctatcataattaatatacattgttaattacatatgtaattgaaaaaaaatattttatattttatttatatattattgagagttgtatacttttttatatattagtaaaaagttacgtgcaaggcacgtatactaaatttnnnnnnnnnnnnnnnntactttatttaaaagtgatacaattaataattgacttactgcttggaaaatggagattgggacatcccaaaactacatgatttatttgacaaagaaacggtgtccgcaattgccaaagggggaaagccctctggacaaggaaatgatagatgggtgtggacgttggagaagagtggtcgatttacaagcaaaaaatcatctgctgcttatttgtctcaagctctggaaagagctcgacgacattgtgaagtggctccggcactgtggaacaagttgtggaacagcaaaattttagaaaggcataagatcttgtggtggtgcatcctttccaatgctctccctattagatctgtgattggg

SEQ ID NO: 48129 - DNA, 602 bp, Cannabis sativa
acaaggatttccaatttttccaatgcagttttcgttcaccatttgttgctccccaccaaaagttggccattgctttttcaacaaagctgcagaaagaatcaagtagtttaaagaccgatatggcataagtaggaatggcttgaatcacagccttgagaaggacttccttgcccctttttgagagaaatttaccttgccatttggacaggtaagaccaaattctacctttaagggaattgaaggaagaactttttgacctaccaaaacactgaggcaaaccaagatacttgtccatgtgattggtagtgggaacctgcaaatagtcttggataatggtttggtaagtgaggctagtattcggagagaaaaagagagaggattttttaaagtttacaagctgacctgagattttttgatactgatccagagcctctttaatggcattgcatgcctcaatattcgaacggcagaacaggatactgtcatccgcaaagagaagatgggagatttttggggcagtgtgggtaattttgataccaaaagcatcctctctgtgctcagcctacttgagaatggatgataggccctcggcacacatgagg

SEQ ID NO: 48130 - DNA, 2015 bp, Cannabis sativa
ctaacactaggttgcaccggatgctggttaataatgggagtttaatagttaccttatacttcacaaccctaaaggcgagatggggttgggtcttagggatctaaaacactacacatcatcaatatatgggttcaccagagactcgattcaaccatggggacgataaaattgacaataactatggggaggagacctctacattccacgggatgaccaccttcttggtagttgactgtctggcagcctacaatgttgtgccaggacgaccatcgctcaaccggttgaaagcagtcactttggtgcaccatttgcctatgaaatttttgacacccaagggcatcaccaccataaagggataatagatggaagctagagaatgctgcaacatgtcactcagaattgcctgtaaacatcgagaaccaatgatgatgatggtctatgggggacccaacaagggtaagaaagcttcctcggaactagaccctctagtttgtgaggaagtgtgagtggaatcattagaagagttggaataaatattaattttgaagaacctgctcaaggtcctcaaaattggaaaatggctctttgaagcccttaagaaggagttgaagaaatttctagaaaataatttagacgtgtttgcttgggggcatgaggacatggaaggaatagacccaaccgtaatgtgccaccatctcaatttaaggaagtacgagacccagtgttggcttaaaagtgttccatgactgtactagaatagactctccattcacggagaaaggccaattaagtgcgcgaataggggctttagcatttacagctgggcccatgtggagatggatgggtgcacaccttattagttgctattttagtttttcatacaagtttttcccaatgaatacacactttgtgggattttttagattttaaaataacttcttctcattcttcaatcggtttcaataaatttcgttcatcttgaatccgtggatcaagatccttatcctgcttctcgccctcttcaatcaagattgccattagctgatgaccgacctttctattttgtagctctatgcggtagtattcgtgagccattatttggtcacctcgcaccactcccacacctttcggtgtctgaaacttcaaggataagtgcttaattgaactaattgcacctagtccaattaacgctagtcaacccagcattatgttgtaggctgatggcaggtcgataactagaaaatcttgcatgataatggtggctaaaggtgcttcgcccacagttaatgggagctcaattattacttgacttacgacactgtcacctgtaaatccacatagatttaccatgcaaggttttattttttctttttcaagtcccattttcttcagtgtatccttatgaaggatattcactaaaattcagtgaccagcaccctttttatccttttattagcgagctggatggtaatcaccagagcgtctacatgagtatatctcacgtgctttgcatctttctcctaaaacacaatcggaggttcatcagtttttgctttcataggagattccagaggaaaagcagacttctcgttcttaacttcccttacatatctcttttgggcattgttacttttcccagcaatatgtggccctcctgagataactagaatatcctctccttcaagaggaggaggttgtaatctatggttgcctgggttattaggctggttttgtccatcaccttgtcacttcacatattgtcgaaagtgacctcacacgataaggctttttatctcgtcttttagttgacgacattcttctatcatatgcccaatgtccttgtgatacttacaaaattttgttgcatctctcttatgtctcgcatgactcatgggctcaggtttacggaatgcgaccttgtgctcacgtgcgagataaatattttctcaagtttcattaagctcggtataaatagtgtagattggcacgttcttgtcatgcttcttctatttttt

SEQ ID NO: 48131 - DNA, 2709 bp, Cannabis sativa
aaaaaaaaaaattataggccacattaccaagactaataggcctatactgctcaattcatctcaggcttgtcaactttggggatgaaagcaatttgcctttcactcaaatctccaatttcactatcatttttaagaattataaggcaagtagcagtagcagtagcatcttgctcaacaattgaccaatatttatggtcgaacaaagcaggaaactgataagccatagtagaattcctatcttagagtatagcttgaacctcatccttagtaaattcgactagcagcaaactatgcatctcggtaataactttttgagaaatactattataaaccatccctcttggcttggaggtggagaaaagcttgctgaaataattagtaataatttctctataattttttctcatcttttcactctccaagcgcatcttcactaaacaagaacttagactcattttgaaaaaaatgtttcaatatatttgagacagacaaaacttaacatgtaaattaaaaaacgaagaaattactataattttgtaaataatattgagcatgagtggaagcaattaatttgagtcttatatttgtatgatttttttttacaacgcacaacttggataataagaatttttttccagaaaagttgtgtttattatcgaccttgcactaaggtagttgttaacttgttgactgatgatgaaggtttattgggagaggtagagatagaaggagaaatccatgaaacaaaggctggttgcttgggatttgacaaaaatgttgtctcatttccaagcatgaataccacatttggcatggtggggcgatcacttgagctctcttgtacgcacaatagacccacgttaacacacctcatgaattcatttctattgcaactctcacttaaccttgcatccattagatccaatgccttgttatctttccacaatttccatgcctacaaacaagtaataattgagaaatatcattttgttgatgaccaaaataaagaaaacagaaatattataatatgaaaatgcattattatttttatatgatatcataatatagagattaaatataaaatgcaataaaaacaaataagtgttgatagaatgttcttttgtcaaatcgtgtaacataaaattgtggggtgaacaaatctggataatattttctaactcctacaaaattacgcaattaaaactttaaaaaagaggttacacgatcttaattttgaatctcttgaagctataatgtttatatttgttagagaaggctaatagattgacaaagtgtagaaacaaaaaaagttcgaaaagtggtacagcagcctaggcgatatacccaatgtatgacgatatcacaactgccgtgatttttcaaaaactttggtttggagcttctacaaagtatattgggcgattctaacattttgttaagaactctattcaaatgcgctaacaactatgggattagtgaatcttgaaacacaaactctaagtttataataaaaatataatattttatttcatctcattttacacattatttttgatactcttatacccttaagaatactattataaatatataatttgttttaattataatataattttatttattttaattttttaataaaaaaaaaaagatagaatcaatatcattgtatgacctcaataaaaattcttaaaatgacattcatttctctctaatgatatagcaccctcatattttgtcgactaagatatctacctcagcaaacattcccaaaatttaatcattggagatgctcttgtatgtattttaacacacacacatacacacacacacactcaattgtattactgtgttctcaagatgtaagtatagactaatctgacaaataagctagtaacgaacaagtttaagaactacaaacaatacaattaggctaaaacataaccatctcaagattgagaccaatttatctataatcaaccaaatgattttgacttagattaagatataacagtaagtttatgatagcttttctactatcaatattggtccagtctgatgtataatcaataatgcatctaatctaagtttactttactaatgtcctagaaaagacattctactcatccaagtgtaagtaaaccacatcatttattatcacatcagtgtaaatttagtatactgataaatcgtaagaataaatagtttgaaacatatatagtcacaattattttttattgtgatgatatcactataattattaatatgttttgaatttaataaattaatgtatgataagatcagtatataatttcttgttttcattaataattaataagattatatttaaacttttttattataaacacattttttctataacaaatccacatatctagaaaacatatgcatgggttgattatttaacagagcaattttcattaagaatgcctttgtgcttatggaataagaaaaatgaacttttgcgaaaattcttaaactttatttaaattggttatctcactactctacacttattatgattgtattgtaagtatttttctccttattttatagttcttaaatgttgtatgttgttttaattcttattagtttgtaattattgtcttcattttcttttacttctccatttacttgtaaatttatgcataagctacttgtaggagaatttagtaacttgggtattgc

SEQ ID NO: 48132 - DNA, 723 bp, Cannabis sativa
tcagatggtgtaatgagatatatattaacagattcaatactcctaatcactgttaatttctggttggctgttaagaatagactcaaaaccaagggtcgtttcgctaattattattaattgcatagtccaagatcaaaattattctactttgtggtgtggatgcaggcggttaaaaattggattggttggcatgcctcttctagttcgcttgagaatcttgctaggtccattgttcgctcaaaaaataaggtcttgtgggctcaaaaaagatgactagattagacatacttgtaaaaaagataattgaatgtaaaaaatagaattttgatggtttggccggtaaaggggatgttaggtagtttgagaatttaccttatttgtgatagtgataggaatttgtgtagagatcataggcctgctgataggatgtaaattgattggtttgatgcaaattcactttctcatcttaaaaaaaaatatacatcaactcatgagtggttcaacttttgattaaaattatttacttaaaagagtgttctctaatttttcgatcatatgcatgcataatgcattaaaaaccgtgtgaaattgatcaattcccaaaatcagattatatatggtgtatataggtatgcgtatatatatatttatatacttatgtacaaacatatattgaaaaaactagtcaatagataatggattacagaagatcgaaacttttcc

SEQ ID NO: 48133 - DNA, 3412 bp, Cannabis sativa
gtaaatttttaattaaaaaaaaaagtattttaaaaatataatttaagttacaaagaaaaattattatagaagattataaaaaaaatgaaaggattaataaaaatattaataggaaggaaagattaagattcacttaaataattgtgtatatttggttgttattaggaaaattatttatttatttattttttggttatcaaaataatgattttttttttcttgtaatttaatatctagtaaaggctaattgtgtaatttacttagtggaaagcccaaaattattctatttttatagaggttatagataattttatattaataaaagaacagtcaattgcagatgaaaaaacaacataaaattatttgactttttcttcattatgtaagatactaagacatatatctaccaaaataagctgaagtactttagttcactctcactcaacattgtatgtaagcataagacaaagaaaatttgatttaacatgctcatattaagataaaattaataagctaaactaaagtttggtaaaattggtgaggtgagacacccaaagttacctctcttatttttaaaaaaaccccattctggcctggtctctcttcccctctcgctctttactttctttcctgaacgaggagttccagcgaaactgcaccactgtcgacccacgaaacacccaacccagacccaaatctcacccaaatagagagccactgtggagaccttcgagatccacgacttttgacgaaggaaacccacgacattaggcttatgttaggctatttttatcctaagtttcacgtcactttttataattatttttcttctttgttattatttttcaaataaaattatgtttgttttctttattttcaagttttgagactcagaatgtataaatttatcaaatttcgaaaaacggtaatttataaaatagagaaaattttacaaaaaaataaagctgaaacgtcaggtctaaattttactatgttctgatccgattttagaaaaaatcaaaacataaaacttttagatcttttttttacctttttaactcatattaaatcaactcatttggagtttgtatgtgaatgttatgcatattttactgaaagaggttgaagtaggaatattttggtcgtgactaatattcgtggctgcagcgagatgactacaaaaagcctcaaattcaactttctacaactgtcgcggtgccgactccgtacgggtcaaggagaactttgtcttttctcgtttttgggctaaaaaattctatttaagaaaagggggtcgcgaattatagggggataaaatagacaaaatgaaaccctaaaaatacaagaagaagaatcttggagcgaacgtaggcaatctatgagaatcatccatctagtttccttttcttctcttgatttcttatatttttatttgtgtctagtttaattgtggatttgattatgagctaaactctctatttagagatatgatggattgtttgagattatttcatgagttaaaattagttaattgttctttcttcctaattgtgtgatttattcatttttgtttttattgcatgtttaagcttgatcaccttattcatgattcaaatcttgttataactctgcgacagaaaggaacaagagttagagatctgaacgaaaggaatcattattattctgctgccatcaatataaggatttgttaatctcttatgtgtttatttcatggtattaagaaattcatatttagggtgttagattatagattataatcaacatacatgttagtaaatctagatcatagtaaaataatttccaacacgtcggtcggtttgatcggtttgtgctacattttgttcaacccaatataaagatcggattacaaaaatctaagtgtaacctgctcagtaaagattgggcgggttatatttttgtcaggttttttagtttgcgttttttgtcgtgttatttcggttcggtttgggcggattattcgggtttgacggtttacaaaaatttatgtatagccctactaatttttccagtccagtgtttgggcatgttggaagtctggataactaatctagctaatcttatctgtctgaggttatttatcccatccagctaatccagcagggtgaaataaataatctcatataggtgatatatatatttttttttaattttgattttgttaatatattttaatttaataagaatttatacgaaaaaaatattacaaatttatttaataatttgttttttatgaaaagcttattcattaaaatgagtaaaaatatgtaatttcaaattataatacataagctttcaaaatttaaaataatattaattaaacaatagttacttaaattgattttaagagaaacaatataacaataaaattatatattcttttcaaatcattagaaaatttatatcaatattttaaaaagtttatgtttatgttaaattagtatttattataaataattttatattattcaagtatttttattttaatattttaattattcattaaatataaaaatatgataaattattttattatatatttattatatatatttaattaatatataatatattattttattttattttattttttattacaaattattcatttttatttatttatcattatataaaaagaaataaataaaataatctacaccagcataattcaatcttatccaatctagtgcaattcaatttagttttgtgtaccactatgaggtgtttggtgtaagaattttatttagtaaattttagttaagaggggttgaaattaagagaatcttaaacttaatcatttaaggagtttgaaataatttactctaaaaataaacttacaagtgaaacctacttaataatcataagtaaaatttcattaaaatcataccaaatattaaatttagttttacattcctattcacaagaaccccataacaaaacaccacattatatttacaaaaaacaaaagaaaatcttgaacataattagttaatttagtgatctcctcctctatacgtactcaaagttgtgtaagtgtgtgagagagtgttctttctagctactcttgacattattactttatttgtaatattactctttaaagtttttgtatttttttttttggacttttttaattttacattttaagatagtttttttatatttttaaggaattacacataaaaatccctatagcggaccaatttaaaaagcaatcaaaatctataatatatagcaactcacaaaaaaattaccgaaaaatcactgagcaaatctatattttttttttttctatgcacaagttgtaacatttctttcatcaaacttctaagtactaattgtatatatctaattatcagcttttgcttaa

SEQ ID NO: 48134 - DNA, 2108 bp, Cannabis sativa
tttatttattttattttctcaaaatctatcaaaaccaaaaaaaaaaaaaatcaagattcactagtaattatttaaactaaaaaattataccattataatttacttttttaaggtaattattttgataagcagaaagcatatattgtttcatcattttctcgaaaagatgatcgatataaaaaataacttatcagtttctttttcttttcaattttttttttttagagataatttttctcttcaatttaattaactaaattttaaaatcaacaaaattagatatgtcaatttcaaaattaacgttaaaaaaaaaaaaacaatactcataacattctatttattcgctttgataactaattttacatcaatcgtacttttttagtcttgtcactgcgtcgcacattcactgtaggtattctttgtttttgaggacactgcaaaagggccagaaacttgaagagcaggaatgtgtgttggccaaaacggatgcaacaaagagtagttataatatgtcggactaagataaggaaactgaccaaccttacaaagcctctcttctaaaatatcatattcatataaatgatgacattggtataacaagaataccacattaggcttgttgggatgaaaatcaatcatacgctttcttgtatctctccatatatcctttatagctttaatattggtgtcatgtaccaaattccagtcattaatagtatcatttaattcccaaattttcaaaatacaatcattggattcgaaataattttgcgaaagccttagacgaccttgaactaatccaagacgaaccataccttgataacgacaacgctgtctttgattaaaatttgaaggaaacttaacaatatggtgttggtcatcgtgagttaatattgtatcagcattgttattgaagacattaaaagaaataattttagaaatataatcgttatatgtgagtagaaaatataaggtgccgttgtaagaaataggagaaaaaaagtttggggagtcaatccgagggactgaaaacaagtagggtttatcagtggtccatttttcagtatcagaagaaaatgttatagcacaacaatttgcaatactagtaataacattgtaagtatgcgtccatactaccataactttgtatctgatcatttggtgaggacgatgatcgattattaatccacaacttaaattccataaatctagggcttgagtttgtattggagggagtttaatccactgttttgtaagtggattacatattaataaacacttgaatgtaagacctgaaattaataacaaatcatcacatgtagctaatatacgaaaatatctatgtggtaaaaagtggagataatggtgatcacttagtatgtgattattgtgatggagaattcgtgattcattggacatatactcatagaatggttcttttatttgtctgagggtatcgcttttaaatatgaaattaaagggagtattatcaatagattcataatcatgaagtagctttttgtgttgatagtaaattgaatccaagacggagaaccaaatcttacacacgcatctgcatcgaattattgatttaatatcacccaccttgatgaatatttcaactagtatatctttgttggtaacaacttcatcgaccgacatcttcttcttcttctacttttcaacaattattaactaattaggggtttctgatttttccatcttcttcttgatatttatacaaagactagttatctatttagaattagaattagaattataattcaaaatgaattatatatatctatttatctatttatcttattatgatttttatttattataattaaaaaatctacgcttaatttaaaatatgaagaacaaaacaaaaaaaaaagataataattagaaaataactttttttttttgggttcacctttaattcttttttaaagtcaatcataaaattcatttagtaatccaatcaaattgaaacaaataagataatgcgtaattttttttgtaagaaaaacaaacttttgcattatggcttttttcaaagaaaaggttctgactcgtacagattgcgagaaagaactatgcaccaa

SEQ ID NO: 48135 - DNA, 1378 bp, Cannabis sativa
tttttttttttttaatttttagtatttagctttagtgtgatggttggttgtttctgggcggcctttcgatgtggataagccttagtaaaatgtaattagaattttactttagttaaatcaaaaattatttccagcttaataaaacttcaattccaatttctatttttctattttactttctctgttaccacttaaccctttaatgcttgcacagtacaccatgtcttaagaaactcgattattaggagtaacgtcactgtttgcttaaggttatcattaccatgagagtacttacacaaatgtgcaaaaaaaaatttgtatgctcgtgtaacatatggctctcttataccataacataacctatgtgcccccaagtgatcaaagaagtgccttcattggtcacttgtcgtaccaaatccccctaggccttcttcatcatgactattggatggtgtcacacgtgtgagcactctccagttatctgaggattcatgttcaagtcacttaagaaacaaccaaagttatctcaaggccaactcacaagcttcactttgcacttagagagcatcttcaggcctgtgagctgtaattgattaatttaaatgaagtaccaaaaaaactttacttatgcttgttctcattaaattaagtacaaatagattactgtgagctaagttgaaagaaaaaaggatatactttgatgtagtagttgtagaatttctttttcatccaagcttagctgaagtaatcctcactatgttaatgccatgttcaactcttagcataggagccataccttagcgatggacctcttaacctacagacaagttcgtggtattccgtcaaataaggggtaatcgattcacttacacgaggtaaggtgaatctcactatgaagtgagctattttagagacagttgcttttatttgtagtatcattgtagatgcaccccgctccaacacatcaataactgaaacactgccttgtacataccatcaacaactctctggtcagcaccaccttgtacatcatcaacccaaaaagcgtaggctggagcggatgactttgctttttcctttccctttcctttactaggatggttggtacttgcaccataccctccaccttgattataccctctttgactcccactaggagcatgagtttgaaaaccttgtgagtaccccatgttgaaccctgaaccttgtggcctaaactgatgttgatattgagactactggcccgattggggtgtaaaactgtacaataaagactgagactggtttgtcctgggttgtccatgaaaaggagtagactctacatagctccttatggtgattgaaataaattgaattatttccatctcagtagtaattt

SEQ ID NO: 48136 - DNA, 1774 bp, Cannabis sativa
  modified_base (1578)..(1591): a, c, t, g, unknown or other
acaaatatactctgatacttacgtaattaatgagttattccataaaagatattgcaccgaatcatattccctttaacttgacacgtgtcctccagccgaatttcgggtataacaataactatctattcacatacatatcacatatatataaatgcataaaaatcaatacaatatttaatatatttatatatacataatggaatcactctggtactatctgttggttttgtggtacttaattaagtacgtagtggaataataattttttaatatcatcgtacgatattcttagaattaccatatgtatatatattaaatctgaaataaattgacaaaagaaaatttacctcttaaaacatatcagtgcatccttattgaattttgtaagttgtatccttggatgatgattaagaactcacaccatagtgttctgaatcttttactacacacaaggaatagtgtgggctattagaatatgtattacatattgtgttcttgtttattctcaacacatgtgcaagaacttttagatgtgctgatggaaaaaggtttgattagattaattatttttaggtttcctaaaaattatacgtcttttttttaaaaaaaaattatacggtttaaaaatattttatttaaataaatatttgaatttgaaataataaattaaaagaattttttaattttaacacttcaaaataatttttttttcttgtatttttacggaaatctatatagcaacccacatagaaactaatggagcaaccaccagaacaacctaactcgtaaatttgacaaaaaaaaaagttaaaagatattatatgggataatttctataaattaaatcatatgtaattatttgataaatatttataactgaatctgttataaatatttatattacattagatattcaggtttgaattgaatatctaataagtgattgagggaatgtctcaaccacttggagagaatctctcaactactttgagagaatatctcaaccactataaatatctataattatttttaaattcaaatataaatgaatattaatcatttaaaataattaattaacctaaaaataagtccactggggacatccctacattaggggcgcctatcactgtgtcttaacacagtgtaggtggcacccacctttataaccagaaaatagtggtgtcttttgtacagataacttttattttttctaaaatttatttaattaataaatttaaaaataaattatttattacaaaataattaattactattttgacaaattaaaataagttttttctcaacatcaatatacaacttttattccttcctttgacaatgtttcaaggttgcgatttggaaaccatggacctataattctaaccaaataatcatgtttattaattccatgattactccactataaatatggaattaaagtcttaattattatagaattatatttattgagttttactgcagtgtcttattatataatcaattccaatgattacccctccttgtcttggttcataattagttttggtcaaattactattttacccttctaattacttnnnnnnnnnnnnnnaccattaattcactagtgaaagtaaaatttagatcaaaatctaaatttgtgcacagttttttagttctagaattaacacataaagggaaccaacattcgatccgttaggaaagtcaggattctataattgtagatcgtgttccagtcatccatagtattagatttccaaaatagaagttgtaa

SEQ ID NO: 48137 - DNA, 11033 bp, Cannabis sativa
tatttaactttgttatttgtgttctcgagtggtagggtaatgcagtgctttttggcttttgcaaaatcatccttttttacattattatattctgcctttttttattttttattttttaatttcttgtggaccccacactgttacatacactttgacacagaatttactttagatgactttttatttcatgactaaaagggaccctaaaataaggatcaacaagttacccaatctgtggaaactgttgctatatacttttatattttgatttctaatatattgtatgtgtgaatatgatacagagagagtactagtataatagaggagtacagtattattattgataaaataaaatacacgagagagaggagttgctaaatggcttttatagttgtttaaattaaaattggtgagttgcggaaatcacgggttgctgttatgttatgtacttaaatcaaagcccgtgtcgtgtcactgccattttccttgtggccttaggctcaacgacgtcgttttcctcttcttttatttttattctgacttccttcctgacaccccaaaccaaaacacaatgtcactctctaatatttttaccatattatttcactttctttctttctctctatataatttattatatatgtctcttttcgtaaatttcacagcaaatcacacagacttgatgatgttgatgatgtgatgtgactgcacagtgaaataattatttaagagtaagcaaagaattgcataatctatgatttgtcaattaattacattaagttttaggaaaaattgaatgcagattttgaccccagctaagctaataatctttaatttcattttcctaaatacacaaattcatctacttttctttgcttcacttggatttctttatgtttttatattttcttagataatccatcatttgggtttagaaattatgaactaattttatgataaatgttgaatgatattattttacgagttaatatcatttggttattttttttttattattgtgatttatttatatttgcgttaatacatatttaagattgatcaccttttacatgattcatgatcttaatatgaaatctaaaaaaagtaaatattaagaatgctctaattgaacaaacatagattttgatgtgaaacgaaagtattcacataatttatgtgacttttagattattaatcgatacaaattatatgctgttttatttgagagatacagtaattgacatataatttagaacctttatgatttgaaagagtttaaattatattataatctatcttaagaagaaaaataatagttaaataacattaataatttgataattgaatcaactaaaattatattgttaatttcacacccataattaaatacatttaattaatttctttagttttctattatattgattgttctttccaaataactttacaaccaaataaaaatataggtctaatttagttcgcaatcaaatgtaaatcttgtgggttcaatctcatctctgtgagctaaattttataattatttcacctttctcttctctattttgaacaaatgagcattataactcatttcacatgagcgctctaaataacaaatatgtaaaagacacaagaattatagtaattcaatagattttgatgtgcttagtctactttagaaagatagattgtgattagtttattcttaattatctaatcacccctttatataatcatttagttatataaccgattagtcaggaccgttacaacattaattgcacacttaattaaaataaaaatcttttatgaaatatatctaagaatagttttgatcgttcttatttaatacttaaacgtgtgtgactactttagtcacacattggtcattcgtattcttaataatatgtaaactcccaggttcactagagttaccgcatgcattggatctttagaccatctgcatgcatgcataaacctctcagggtttttataaaggcgagaacctactgagatttcatattatagaatgcattaaaatggtcttgtattggaaatttatgtactgataacataggactcgtgggtccatgacgagttgacgcgtatagtagtcatttggactaattaatcactgtaacgatgagatctttacataggacacaggaaagaaatactgactcatcccatatatattcgatgtatgttttgattgtgttaacttctttttatgtctcactttcaacttatttactatgcaacacatagtgtgtgactatactttatctcggtcacacattcttgcatgtttctattatgcaaagaaaatcctatcgggcttatacatcattatttttctactgagagttgtatacacatgtcaattaaatagtgtactttttattttaggtaaaaaaaattcatgctataacaatataaaagtaattaaattataaataactcatataatagtgataaaagggaatttgagaaaatagaatatgaatttggacatgtattaaaaacaaaggtatatagactactaaaaaagagtagatttctcgacatttttaaacatttgactactgtattatttgtattattatcggtttctataattattacctattccaccgtcataaaattatagtagaataggcaatgatttaaaacagttgatttttttttaccaacgatttaaaatcttcggcaatagtaaacactataatcaataattttgaaccgtcacattaaaaaaaaaaaagagagaaccagattgtctcctgaaacattcaccacaactgtaaactaacaagcccagccagccagacctacacatctcaaataaaaaatagtcacaataataaatgtatacacatatcaaattaaagaacaacaaaataaataaatacaaatgaaagtcaagagagattactggagaatgatatttgacgagatgggtgatgtgacttgtggtggtgcggactgtcgaggaggtgtgactggaaggcggtgtcgactgatgaggtggtgcaattgcaaaggagactgagatagaccacttggtgcgagtggtggtgtagctccgtctgattggcggctatactgctgtgctccttcagagagagagacgagagagagaagagggagaacgagagatagcggagagtgagtgagagagagagagagataaattgaaatgtaaaattaatgagatatatcttgatttgggggtttttatgtataaaatatatatttatatgtattgagtatcttgacggtttaaaccgagtgttgaaaatttcgcttaatttttaagtgattatattaaattgtcaagattattttacgattgtataaaactgttgaaagtatctaattataaccgacgattttaaatagtcacatattttatagttgtgaaaacaaaactaactcagcacaatacaaatccgaacaccaaatttataaactttaccatactgggcaggagcctcccctataaaaagttgtcagggcacataatttgatttttcatgagctaatattatccatatttttgcacttgtactttagagctctaatcatgaccaagattaattatgaaaggaaaatcacaaatatgttgaagaaaaattggttgagaattgacttgagagaaagaagggaatgggatgggtgtattaattataataatatatagttggagatttgaacccatagattgatgcatggctcataattgtgatgttattatatgtgtctcctacgtggaaattaattcaaacataaatattgtggtgcatgggcatattattgataatctaaatgaaatgatcttattcgatggatcctatcctatcatatcctgtggtccctcaactcaactcaactagattcgaaactattatgattatcaggttcctgtcactttaatttataatcatctcatttattttatattggcatctatataaattctaattagtaaaataaaaaaactaaacaaacaaacaaacaaatgaaaccaaaccaaacccacttcattcgatttcaaatggaagcaattgtcattttaacttaatttgagggtaagtataatatgatatatataggagtagattttacggaatttattttattttgtgtaataatatgagaagaagttaggttaaatatcaaataataattctaccaaaccgttgtctttctttgcatagtttctgataattcattcattattatgaaatgaataattaatagcatataatattatttctcattattttggcacgtgtttttcacagcaacaagcccaaccgactactggattctaattgtatgttgatgttgttgtgtacgtcacaacataaaagaaaacactttttttttgagcattcctattgctaccattggtgtccgacttactatatcatatttaaaagaagggtgtgctaaatattaatatttcgttatttttatttaaagtagtgctacttacaatattttaattaatttttacttttgaaataacatgttggaatttttattcttatttttttttttaaataatttatagttttagattcttgatattttagttttgttaaaaaaactttaaacttgcaaggtaaattattcaatttttttttaaaaaatattttaatatatattttgaagatgaaaattaattgagagattgtaataaaaaattaaccctaaaagacatattttattttttggtattggtgttgtggtgttgagtgagtcaaagagtaggaaaaggctgaatatcgatggaatggggtggagtccactaatatttgtttcactgtgcatcaccactaactcagtctctaactaaatagtaataagcttatatcatattgggacatgcaatgcaatgcaaaaatgaaaaataaatacaaaaagatttcatttcatttgattacaacacccatccatagtgcaaacagctcacattcatcatccatcctaacctagtagtaaagaatctaattaagaaaaagtgaaaaaaataaaaaagaaaagttcaaatcccaaaaatctactgtgtctgtcagaaatttttgacctcttcttcaattttttctctgcttcaaatgaatgaaaataatgcaaatgggcagaaccaagtgaagaaaaaaaaaaaccattattattattacatttcactttctcatttttcatcttcaaaaagctttagctttcttttgtgttagatgatttgatggatgcttcgttttaactctgaacaactaccattctctttgctcatatatcttcttctcaacacccaccaaccctattagactcactacaccagagtccatagtccatagtaatggcaatggtgatacccttttaccaaagacaaccacaaccataaaacatgtaggccaaaaccatcaccacccaccgacaccctttcagctttcttcatttcatctttactgtcaccacaaaccccacaatgcatattcttctccttttactgttgttaccactcaccaccaccacaattactcactcttcctccccttccaaccatcaccgccggcatctcctccaccaaccctttttcccacctgtagaagatgaccctcttcctccaacacaagctccaaccttttctccacaacctcaaccaaaacaacaacccaagctcccttttgattcttcttcttcttcttcttcttcctccagcccttcagataagcctttcttcccatcttacctgaaccctcctccacctcctcctccttccccaacagcacttacttctttcccggctaacatatcatctcttctccttccccaaactacttcacaccaccacacccatggggtcgccattgccgtaactgtctcactactctctgctgctctcatttctgctattgctgctgctttcctttactaccgaaggaacagaaagcttcatcatactagctctgatgataagacttctagaacagatagtctccgactttacccgcccaacacggctacctccgacggaatccataagtctaggacaacacccaacaacagctctgagttcctttaccttgggacccttgttaactctaccagaggaggtgttgacacagaaactgctgctaattccagcaatgccactatgagactcggcgtctctgcctctccgtatcagaaacttggctcgccggagcttaatccactgcccccacttcccaaatataatttcaagcgaacccacaaggaggctcaagtgggttctgatgacgatgaggttgatgaggaggaattcttttcgccgaggggttctactgatagtcctggccatgctggaacgagttctcagagagaaactcaggggtttaaagtcgacaactttattaaaagtagaagctttaactcgaggactccttcttacccgtgctccaagtctggttctccggcgactactgcatccaacactctttctcctccggcgaacttcagccctagaagcttcaaatccaagtcacctgattcagttatgaatttcacggccccatgtcgaccacctccgatacctctgttgtcttctccgtctttgtcttcattatcttcgcgatcagaaagaggttcagggaatacccagaattcaccttgccggaaatctgatgcttcggaccagagaaggcaatatgttcctgtaaagctgccaccgccgcctccacctcctcctccaccgagattttgggaagctccggcggccatgagaggagggcctccgcctctagtgacgccttcaaggcatgtgttccaaaactctgaggtggtttccactggtggaggtgctgaagaatcagagaataatggggttggtttggagaaaaggagtgaggaaagttcgaagccaaagctgaaagctttacattgggataaagttagagcaagctcggaccgggcaatggtgtgggatcagctcaaatcaagctcttttcagtaagacaacaaagcccaacactttattatttctttattttttggttgttaagtgaaagcttcttattcttttatggcttagaatctaaagatgttcatagctgtaactttaatgggggattctgttttttcttttttccttttggctcttaagattcttgttttaatttgcagagtaaatgaggaaatgattgagacactgttcatggctaataattcgaatttgttgcctaaagacaatggtcgtcgacagtgttttccatctttagtgcaagagaatcgagttcttgatccaaagaagtctcagaatattgcaatattgttgagagcattaaatgtcaccattgatgaagtgtgtgaagcccttctggaaggtaaacacaatgtttgtttgtgaatcaaacttgcttctttaattatattttacatgatcgcctttaccattccttgatgtacttgctaacaggtaatgccgatgcactggggacggaacttctcgaaagtttattaaagatggctccaaccaaggaggaagaatggaaacttagggagtacaaagatgaatccccattcaagcttggtccagccgagaagtttctcaaggcagtcttggatatccctttcgcattcaagagggtggaagcattgctttatattgccaatttcgaatcagaaatcgaataccttaagaggtctttcgaaactttagaggtagatgttttctttatgttgtattgaattgcatgatatatatggtacattgtccattgaagatccttaacaacataactttctttccgcaggttgcttgtggagaattgaggagtagccgaatgttcatgaagcttctcgaagcagtgctcaaaactggaaaccgaatgaatgttggcaccaatcgtggcgatgcccatgcctttaagcttgacacacttcttaagcttgtggatgtcaagggtgccgatgggaagacaacactcttgcattttgttgtgcaggaaatcatcagagcagaaggattgcgtctctctggagccaatcaggatgtagaatatgacaaaagtgaccaatcttcgtactgggatgatgttgagttcagaaaactcggcctgcaagttgtttcggggttaagtggggagctcagtaatgtaaagaaagcagctgccatggattcagatgtactcagcaatgaggttgcaaaacttactggaggaattactagagtggcacaagtgttgaaatcgaatgaagaatttcctctaaaggaaagcagccagagattctcagaggccatgaacggattcttgaatagagcagtgcaagagatagaaaagcttcaaaggcaagagaaacttgccctgtccctagtgaaagatttaacagagtattttcatggtaactcagctaaagaagaagctcgtccactgcgaatattcttggttgtgagggactttcttgcaatcctggatcaggtgtgcaaagaagtaggcaaagttaatgagagaagtacagtgggtttagttcgccagtttccaaatgctacacatcttacagttctaccgttcttccccggactcgatggaaggcaacaattcggatcatcatcagacgatgaaacctcgtcctcttcacagacacatagcggatgattttgtacttcaagagttggtttctcttttcagtgtcactgggttgtttttcaagtactagtggggtgtgaattgaatggagcttgctggattttacacgttaattaccttcttttttgtaattataaataatatatatgtgacagtcaaaacgattttgagattttgtcaatcctgtataatagtaatttataatcatcattagattttctattatcattaaaaagatgaggttttttattgacaagtatcattggaaagagttaaacaagaaaatgaagcaaatttgaacaagttgccgttctatatcagtaactgtggaccaactgaagtggatgtttttatttattttgatgatgagaggagaggctacaattggctacttgcatcaactgttttcattttcttcttgggaaagatgagatgagatgagaggctacaagtatggttgaggagtctcagcatccattcgctctagcacccgtctagcttcctcttctgtcgcaggcacaacattccgaacaagtaacccgtccttcacagcctccggtctaacggcgaaagtaaaatagaatttgttggatacctattaacacaattgtagaataagaaaacaaaacaaaatcaatattatatataaacatacaacaacactagcagtgatactcaatttctgtggtttgtttttttttttttatttttttcacaacatgatttcatttcaaaaagttgcgcttacctcactggaccttagctcaggccttgtaacatgagctacaacttccacgtttatcagaggtttagtggggttctgaagttctgtgtacagaacacaagatttcaaacgcaggaaatctccaacatccacctgcataattaatacaaaatcaaccaaaccagatctttagtacgtaataagtaggcataatatggtaatgtgcaattctatctgttatttttaagtaaatgatatgatgtcattcatgctccaagggatactcacaggtctaaggaaatcaacatgatcaacttctagaaaatgtgttaccacaccagcaaaagaatatgttgttgagaaagccaattcaacagctctacgcattaagaatcctccaaaaatccgaccgaagatattcctttgctgtggctggcaaatgaaagaattctcaaggcaagtatccttcataaggatgctgtttctgtctgcaagggcaggcaggtcacagaacacacgcccttctgccaacaatgcattcagcctctcattgtgttccttctctaactccaagtcttttttcatttctctcttctttttcctcattttgtttctttcatctgcttctttccaaagcaacttttcttcttcagtttcaggtgaaatctggtttattacagctgactttccagtcttcgaatcacgggcaacaaatgtgaagtttgctacaagagaagccgagtctgatgaatctggggattctgcaatacaaacaatcttgatattgataatcatgaataaacagaatcaggtacctatgaaagctaagattaatgacactgacgcacaaatcaaatcgtaggaataatagtgtgattttcttctacttctcctaaaacagtgacaaaacatttcagtccttttgattgtgaatcaaaacaagatattgtattaaccaggataccatatgttgtctgaatcacttcaagttgaatctccatggacgatcgtccaacccatgtaacagcaccaacaatactcaaatcagtgtcaatgctaattggtttcttcataaccattttgtcaacagaagcagtcaccaatattagaggccttgtaatgccatcttcattggcgcaatgctggtccacaagccaacacgtagaatttcacaatcaaaataggcaacaatgttgttgtacagaattcaaattcaaactagggcaatactgtaatcaaaaccccaaccttgagcctggctaagaaaaaagggagaaaaaaaaatacaatctttataccttaaatgcaatggttccagcaagagcatcaagatcctctagcaactttccaatcctgatctcattccaaggatttctataatgttccttgagtgcataatcagaggagagcttgtacagaatactggtccggctctgtgccggagttttggcgaccaattcgctctgcgaaagatgatccgccgtcgggtcgccgggtttctcaaacatgctggatcgcgcctcccagagagcatttgtaacgggtgaattgaacattccaggccataaactgatgggttttctgatggaagagcctgcatcaataggctgggaaatctcatggggtgagtctaatgatgatgggtctgtggaaaatgacttggtattggggaatctaaa

SEQ ID NO: 48138 - DNA, 2464 bp, Cannabis sativa
taatgtaatttctgtcccccaaaataaattaatggtatatatatatatggatatgatcatttttacgaaaatgagagatttatgattgtaataatatataagaaaaagatcatctacatgctaaaattttaatataaagttccaccacaaatcgaagaggatatagtgatcagtacaacaatgaaaaaagaaaaaaagaagttaaatatatactttgtcttttagcaataactactttcaatgtactttaactctgcggccaaattgttatagatcgaataattaatgaatagtaattgtaccaaatatcatttgacattacataaagctagcaagctagtactgcagaatgcacttgaatatccatatgtataaagttaacagttttttttttcatgtttataaaggaaaaaatacaatgaagaaagccaccttatatattacatgcaatcaagattagaatctcacaagaatcatacacactcaaccacaccataggatagtatgaggctatactagacattaaattgggttttaaatattttaatttattataaaaaaaattactagctagtcacttattatagataaaaaaactcatcaaaatattggacgttataatatatataaatcatatagatttcatcctgcactactagatctattctgctatatatagatataaaatatattaattatctgcccaatttttcactttcaaacacacaaacacacatttttcttcttaaaactttttgtgtagctatttatatttttgtgtgttgtcaaatcaatatcttaaataatttactttttcacaatttttttctcatagatttaaccattttgtgtgttttttaattaaagtaatattttttataaaaagtagtccaaatttttaagttctataagtggtggaggaatatttgagcgtgcttgtaaattttatttgactacatgttgattttttttgccatgtaattctgtatgcattgtatattctctatcctatgttattttttttttcagaaagtttaaataaagatctatttagaattacataaataagtatattattcttcattaattattatttatttttttaaaaaaatgaacaagctaggatggaaaacggttgacctattctttggtacgtgcctaaggtccaaagcaaggactctgtatcaagtccacttcatcttcttatcaaacagagtcacagtatatgatgagtcataactcactagctatgtattataagtataacccaatttacaagtgttgtaatggcccaatagacaaaacatcattaaggaaatctccaatccatctctactaaaaacaattaatatggaattatatgttttgttttcttcctctcctttcaacattgctctttcccaaaattgcatataaaacgaattactaataattcatacaaattaatgactagtgtggtttggtagagccagataacaaagaacacataattgcatgagagttaagaatcgacctaatatttggagtgttatagagtataaaatatagctaagggccatgctccttattaattaatattcattctttactagatcccacccattttaatcaaaagtttgttctctattttttttttttgagataaaagtttgtgctctattaattattaattataatttatttttgagcaatttattatttaatgatttcactaaacaaacgccaacaaaattcacattatatttttgttcgattctttttgtttgcctttttcttttttcactattttttttttttttaaattaacagaatattttaattcttttaatttagtttttatgttagttacgtactcaatatgatgttagtgatgatgatatattaggcaaaactagagatattaggaaaaaaaaaattacaataagatattgtcggaaagaattatattagcaaataaataagattgattaatctgcgttacaatgttaattacatttatttatttcatcaatttatgatttttgtcactgaactattgacaatattgtaaattgattattctgtaggttttatcatacataacaaacaaaataatgacatgatgaacaaattgtcaccaaggctaaatgtataatttaacaatataaaaatgaattttttttaaaaaataaaaataaattaatgattaaaaaaattatgtaaaactaaattaaaaaaaaaatatatcaaatacacatgtggcgttaacatgatactgacgtaaccaaatcattattttgtatgaaacatgtgataaaatttgacaaaataactaatttacaacactgtaaatagtttaggaaatatttttagccaattaaaaaatttagagatataatattatataagtcatagttctaagacaaaaattataaatagtctttatttaaagtagaataattagcttttttagtccctgtactta

SEQ ID NO: 48139 - DNA, 1686 bp, Cannabis sativa
tgggagacaagagaataagagttggtcgggataacgaatgaaaacagattgtatatgccgaccaggcctgattaagaatcaaaagaaaagatttcacccagaaatgaaatttccaatcccggaagttcaaattttcaattggaacctcatatttgtcaaaatcttatggacgggtggggaggaacaatttaatgttaaaatcgaagcgcagtcagataattaggtgttatggttaaacatcaattaaatttcgtaaccctaaacctagttattctacaattaacccagaacagttcaagaacaggcaaaatccacagtagagaattcagaaataatgcatgaatttcatggcaagcatataaagaaaggaatgaagaactcactcactgattcgaagctttctttctttgttctgatggtatcgttatgagtttttctatgaattcttcaaagaatctgagagaaaatttgcttggaaatttttgctttagttctttaagagtcgaaatggctaaaaagatcaccaaaggatttgagttctatttataagcaatctgaaaagaaaattaatcattttaaaatttgaatatttgagtttcctcccaaaagtagacgttaagtactcattactagaagtataattgtcaaagtgtgctcagacatcgaaccgtgattcgaggtatagctttcaataggcattaaatggtcagatatcgaagagacccccagttagagtcctatcagatcagcatccatcatcaaagacacgagtcacccatccaaacaagactccaagctgagtgaagtccacgtgcaaccaggaaggtcccacgcagacttgggggcaaatgttatcttattttttacaccttgacgtggtaatgagaatggatgacacatgtcccacatttttgctaccgatgtagagggaagtattcctagtagcccattaacagttaatcttaatgtctgttgtgacaaaaatgtccgaacaagttaatcaaggggtagttcgaccaagagatagacatatttgtaccaagcaaggcatataagttggcaattccagagattagtcttgtcgtttccaagacacgaagacaatccctataatcgtgggattgagtcagagaataaaggcaatacgccttagtttctttttcttcacattgtaattatagaataaatataatttcttattttatttattaaagattaagggaaatcattcttcatgtaataagctcctataaatagtggcataatctcactattgagagggacaaaagaattaatccagataaacactcgagagagaatagtgatctaagaaaaaaaaaataacttagagatctattgtaagagctttagagaggagatcactttattccttctctcaatttaatacaaatacaaggggaggtggctattaccatcctacgaggctgaatctctttaaaatctggtgttctttttactttactatttttgctttttattatttatcttatttagtcgctttattttgactcactatcgttggctagaagcgaggtcaacaatgtgtatatgatgaatcttgtgtatatagatattaatatatttgtatgttatatatatattagatatgtagcatatatatttatttgtgaaactaatgtttagtttgtgtatgttatatatcat

SEQ ID NO: 48140 - DNA, 1880 bp, Cannabis sativa
aaaataatttccaacagaaaattccttggtttcatagttaatgccaagggaatagaagcaaatccaaacaagatccaagcccttttagacttgaaattgcccacaactgtcaaggtagtacaaagcataactgtactcattgctgttgttattcgcgttttcgtaaacatgacacgtggattttaatcaacgaaggctaaagagtcattatctaactagtttcctcaattgatgctccgagaagataaaggcaccaacttcgcggaaagagtttctgtgatagagagttccataactgctagtaacacggaggctatccgtgagccgaagtctccctccattccaagagcaaagccattttctctcgagaagagtatggattttcccagatgggccaaggcattttgagactcgctacaccgggctacgcctatagcccgcagaagcctcacctatatgtgtcagactacagacttggtgactagattttttcaagtacggcgtcagagattatctcccacgacacgctatcgtacagagcatgtgtgtccttatgtacctgaccaaatgatccaacagctagggataagggaaattcaaaaaggagaagccctgggatgacacgcgtatgaggcccagcctgtacgatctgacactattaaatgccatatggaaaaaatactacctaccaatctaaaggtcggatttcgccccaacaatgatttgtctaatgcagcgcatgcaaagttggcctataaatacccctaaaaaagcacataagaggaggaccattttttttaggattgaagactcattcttcatcatccaagaaaaacaaattttgtataatcccacaaccaactcaagaatattcctactaagcttcctcttcttcaagaggaacacggtggaaatgagttatagttcattgtatatctatttgtataaacagttaccagctgatgagcctaataaaatgaacttgtggactaaggatagttaacacctaaaccacgtaaaaatctcttagttgttatctttgatatttattctatctttactttcttaagctctaaaaaatatttagttgtcaaaaaacttggtaaatattttggtgctttcattaagagctgaagaaagagacatgcacggtggttaccgacacaagtccgtcaaaaagagaactcgtgtgagaaaagaaggaagaccgcctaatttcctgctgaggtccggccgaaattcagggatgcgtaggtcgaaggtgttacccaaagtgagggccgataccctcacccgcgtaaggaaaatatcgaagacaaacgcgggtgtcttaaaatgcttgttgcacccttattcgtcttgaaaagctcagatctggctagccaactctctagggggatgaccagccactggcatcctcatgcttgagttccccggcatcctctaaggcataactacgcacacatagtgaggtgcaagaggagttggggccaggcgaagaagctaagacccgatgcgattacgatgattaactcacgaatggtcatcagatataacgactctatctagctcaagactctggcactggtgctaatgcgagggctagatccattgccaacggcaagttcccctgccttttcactgaacagtgaagttggtcaaaaactgatccagtacagtggtggttgaggggagaccatctgtactgtcgacgctcgttgggccttcaatcaggcctggttatggtactgttggttgaggcagaccatttttggcaaagtttcgctcaagggggcttctgtcattacgatgtaactacaatcccggagttacatcaaagaaagcaactcgagacattatatgtaacgccctaatctata

SEQ ID NO: 48141 - DNA, 4621 bp, Cannabis sativa
tgaaaaataagaggtttgatgtaactataataaacggggtcatataataataataaaaaaaaaatgagatcatagtttatcgacgagtacaaaattacacaattcaccatgaaaatgcatataaaaatgtgaaatattgtagccatgccaaacatattaatgtcaactttcctgtaaaacatctgggtttatgattaataacccttaaaggtgagtttaatagagtacatacaaataattgacttacattcatgaactagatattggtctcattggtcgtatatcttatataacatgaaccttaaaagaattggatctggttaggtgaaggagtggagaatgtctctgttttcgagaatagattcttgatatatttgtagtaagatttaaaactgtgacttcccattctgttttctgcaaagcatagatattgtgatccaatctcaaaatatatactcagcgtaggcatatatgtatagcccatctcctgcttcactcactcagttttggtctctgtatgtctcaatcttgagtcttgagtcaaggctatccatattcagtagtgtggaaaaacggtaacaaagactgctgcaacagaacaggactaaacaattagttgtacgtacggacagtactaggctagaatatgctacaaaaattaatgatcataaccccaaaaataatttattcaataaataaaaaattaggccatctcaccattatactttcaacgagttgggacttcaccaacttttatataaaaggctaaaaagagagttgataaagtgcttatgacattatgataagtgatgtaataatatatatatagtaatagtggtaaatggccttttcaaaagtgataaaagtcatcaaaacttatggttttataatctaattttacatattacaggtcaccaaaatccaccacccttgagcaaaaatggcatttctagttcctcttcttgttgggtagttctatattaagttgggaaatcttccgttttaggatttgttggtatatcttgaaagttcatcactacgtaaatatttggggaatccaatccaactcaaaacattactgggataattcagtactatagaaatggcaactgcaccaaagtgatctttattcttagaaaatattaataaaattaataaaagacaaaaacttaaacccacttctgtaattaattgggtttatatatttgccccactaacgcaatatcaatatatgttgtaatgcgtctcttatggtagccagaaggttgactaatattggacttaaatatatcaagggcggttatattttacatacatgagatgagaatgactacattagagtccttttctttcctcaactgagaaaaagtgctatacatatagtgtatatatataaatctacatagactgtataatttacaatatccataactaggtgttacaaataagtgggatcgcactatccccaagaagcttatcccatcctttgtttcgtgatcttatcttattattattattattattattattttcctttttgcattctcaacttgtggggtcataacttcgataacttcgaaagatctgtgatcaaatgccattcttcttgagaaagagaaaaaaaaagcttcaaatatgtgccatttatgtaaattcattcacgttcgtacagttttcgtatcaagattcatttctataaagtaacgaacggtacagcacggtaatgctcatgcaacaactatcacattccattattatatcatgtatatatacataaaatataatacaatattataaaaataaaataaaaaatcattggtccattgccccctcttagctacctatcatatcaaccatttaatgccacaaaagccccatttctctcattctagctacactcacacacacacacacatatatatatatatacacacacacctttcatttttgaacaagcactactaccaatctgaacagcattagtaatagtagtccctcatctcactctctctttctctctttaatatactactttctctctctaaagtgagttgttaaaacttgtcaagacaagaaaagtatgaagggaaagtttgtgaaaatatgcatgaacaagatgaagaaaaatatgggaagtactagtactagtattaatactaaagtgagtccttgtctaggctgcgaatactgttgtcaatggagtttgtggcctttcattcaaaacaatgatgaaaagtactcaaatcaacataaaaatcatcatcaaatcccaaaggatgttccaaagggtcatatggtggtttacgtaggaaaagagtactacaagaggtttgtcgtaaaaataagcttgcttaatcaccctctattcaaggcattgcttgatcaagctcgagatgagtttgactacaacgccggcgactccaagctctgcataccttgcgatgagagcctcttcatcgacgtggttcgctgtgcgagctgccctgatgccaatgcagacagatcaaagatttggctttgttgtctgtcatcgtgatcatgatcatcaccacttcactactaccttcatgtcttttaccagaagaaagagttgagattgaaaaaattcaattcattatattattattgattaatatgagatgtatcagtaaccctgtttttgcctgtaaactatgtagaattaattaatttgtaaacataatattaattatcttatcctgtgttttgttagttagatcaccagacttaatgtaattgatccattcaataatgggagattcttacgagatccatgtatagaagaagctagagatcgttgtgtcaaattaattttaacattatttctgaagtaaccaatttaattaggattggactaaaattttgaaacacagctattaaatggggtctttattttagttcaagaagttatgttattacagcaaaataaaagggtgcttgtaacaaaaccccttttattattcatgtccctctaacagcaaaataaaagggtgcttgtaataagaaatcaattttgctcttatactacataactgaagcaatagggagtttgtaacaaaatccaagtgaaagggtctattattcatgtccgcttaaattaagaactgacattaattatttataagcttctactatgatttcgtctcatgtcaattattttgacaggtaagaaactaagcagaaaaatagaacttaatgtagtcgtaggtttagtctaatggtctcatatttctcatcgcacacttcttgccacaaattgggtggatatgagttcaaatccagcctccccgatttttctgttagcaaaatttttagtagcacacatgcatgcatataagaataattatagaaacagccaaatgtttatgaaaatccatatctggcaatacataaagtggttgagtaagtatacattgagagctacttaaagagtccaaacgaaagggatagacactactttgcttcacaaattatatagtatttatattgagagctacttgagagtacaaaagatagagacacaagtacatatattttggcttttatatgatttatgaacagccaagtaagatctatcatacatttaaccaaaaaatacaagttaaatcgattatagatgtattaacatattttaatggcctacccctagtcctctactaaaactcgatcctcatatatttaaaaaaattccacgatataatttagcttattttgcttcgttggtttagttattaggctaatattcaaagccggtcctttttctatggaaaatagaaatcttgcttgaactattcatttgctctatttaaattgttgcttaattaacaatttaatctttttttgttaagcaatttttctaaccaaaaaatcaaataagaagaaaataaaattgacttaatgaaaatcaataaataccaatattcgtccttatcaacatggactcaaactaagaagaaaaagtgatgacgtatgggatatttaagatctcgatttaaaaattattactctagtatagcacaaaaatatacataaaagaaattgatttgtctgtataaggaaaaactaacttgattagaaaatatcaccaacgaagcttctattgcgagtttaacatgaaattgatttattttatattaatatgtaatctcacttgcatattgaaatatatagaatagtgactcaactacataatcattgtgattattagtgtatgttttcttaactcttgcagggaagacagagcaatgacaattcgcaatcttttttgttagcatgtgatggttctaaaagtaattctaacattaacctcaaatttctatgacattcctagtaatcttggaaggagagacaaccattgtattaaatatctctacaaaagagtagtgctaagccacctataacagcaaaacagctaagagcatcgaataaagactcaacgaacttccatcatttatcgaaaccaattatcttgaaagttgtcgtggataataacgtgcacaaatgggggtaagttggaaaatacgacttttattactcaattaattaaatttacctctaattttatatttaattgaaacatacctaatgtattgtacccaaaata

SEQ ID NO: 48142 - DNA, 2474 bp, Cannabis sativa
ttttgacataaatttctttttaaaataaaatatatgtggaataaataactgctctgattaaatttttgaactagtgaatttcctttttgacttttattgtccaagagttgtttcattatcaaaaacataataataattacttctattcatagtactttttatatgataccacttaacttttgctttgatcgctaacccacattaaattattcatgattaagttaaatttctgatatatgatgaacaaattcaattaaaaattcacaaaataattgaagaagaacgtacgcctatatacatcattcatgtacgtgtggattttttggagggcaagttaatagaatttgagataaaatgaatatggtgttatctcaaatttaattggtattgagaggagtagcatgttcatcttatatatcttattatctctgtatacattaataatgtgggactctctaacattccctcaagatggtagctattttattttttcacgatcttagacaacttgatcataagcggttattttttggctcactatccctgatcacaagtgactctttgttctattttttggatcaatatttttggatctttggtggctcttttcttttggttcactatctccgaatcacaagtgattttttttttaagctcttggatcagtttttttttttttgaattttggtgactcttttttgtttggctctacttggatcggttttttttaggttggacacttgttagaggtttttttatttgtttttgcactattaatatatatatatatactagatgaaagttacgtggcgagccacgtaaatattagttttatttaagttctagtgatttttgtttaaaaatttggtaactaatacgatatgttttataaaagtaaacttgttaaaaatgtcataattgtgtatataaacttacgatacacattgttattaataataaagagtaagtttatctcaatttattcatactcatatagtaattatccttaacgtgatgaaataatttataataaaccataacaacatatgacttttaacatttactcttggcgaagagaattattagttaaagtttcaatatagttaaaatttcaacctataaattttcaatgaatacaaactctcaggtacgacttctcaagaggcaataatattgagtgataattatggacaacaatatagagccaagcttaagtttcaactgctccatgatataaacgtttcgcattaactttgcatcagttttgctaagcttcatgacaagaaaataaaacttataagtgcatgtttctcaactaatgaaagcacatcaaaaatgaaaaataccgctctacttgtatttcttctttgtgtcttcgggttgaagcttctatacaactctcactcggagcaaatagtcttgaccagattctaaatcacataactgagatgtcaaaccagaatatgtttcctcgtagccaaattgattgacatttggagcttctagttcttttataatgtttaataaaacatctaattcaaatcggaggggagatatccaacttaagaacattaacagcacactctacatcctcaaggatcgaatttgtacctctgcattgttcattcaattctataatagaagtagttggtctcttccttacagtaactcttgaagtaatccttttaagatcttgttctgccaaagtatcgaccatagaacaattttagaaaaagatgccactgggatgtacgtgcgaaggtacaaattttttaaactataagcatggtgttgacaacggcgagtaagggtaggggtgatagcggcgagaatgacaagaacgctgatcactacttaaactcgacgtttgcgtctcgatacgtacatgagccagtccccaaatggaggatgcctgagagaagactatacccaaggacgctgcgctccagttcataaacgatgagctcatgttggatggtactccaagactcaacttggcttcctttgtcactacttggatggagcttgagtgtgataaactcatcatggcttccattaacaagaactacgtcgatatggatgagtaccctgtcaccacagaaatccaggtatatatctttttcatactatttattcccgatgtttttatacttgttacagaaaccgatccttacaaaataaatagataaactttaatgatctgattatggtcgatactttagcagaacaagatctttaaaggattacttctattgctctatttttatatatatatatatatataaatatatatattttgctgagtatatattttacagtcatagtcaattttaggaggggatttcagagagaaggttaacgtcaacaaaaaagatggataagatattgtgtgtgcgcgattaatttacaaattttgaaacaaaaaaagaaccgattgagctattgttcaagaggtttcaattgagaggctcacg

SEQ ID NO: 48143 - DNA, 4255 bp, Cannabis sativa
tccaggagatgtactttataatgcctaagtgatattttgacctcacttagtctgtttctatgttctggcgaaattgaccaccagttcttggagatgttgttgttctgcaaaaatgagagactcgaaactattcatttccaagtgagcttcccatactagaaaagagaaatgcaaagttgtgaatttgacttctctgatttcatggatcttagttattgtaaaaaactagacggatgatcgaaatggaatcaaaattggacaagtagaacccagcacaccatgccatttgtcaacctgggggctgggtacctaatttctgagctctcgggttgtcgttttgatactttcaaggttcttaaacttaagacgaagtctcctaccttatttttgaccattccagattcaatggtcgaatctaatttggcatttgaatgatcaaaaccagcacaccaggttgattgtcaacctaggtcaacctgggcgtttggctctgcttccaagccttcacgtttgtgattttctccccgagtttgcttaaatcttcatgatttgtaatgacggaaaaaatgcccggaataattttttaagaacttgattggaaaatgcccatgttgacaatatgtcaacctaagcgatgggtctactgccaggtgtcaacctaggcgctgggcccagtgccaagtgtcaacctaggcgctgggcccagaaccaggtgtcaacctgggtgctaggtcccagttctggtccttcaaaagttctgtttgatccccataaatagttgaatcttaatcttttttgaaaaacaccatagtaatgtcaacctgggtgctgggccagtcccatgtgtcaacctgggtgctaggccttacttctagtacccagtaagtgtcgtttcttccccaaaagtacatattgccatgtttttcatgaagatgatgcaaaagtccgatcgtcaatctgatacttgaaaggcaccaaaattgacaaatttttaacttgggcgctggatgctcgggcaccgagtgcttaaaaatgaacttgcttcgaatatgattttgatgcctcaaatatgtctgcggtatgtctagttcatgtcccaatacaaaatttgactcatttgccctaaaatggtcccagaaactgaaaccctagttaaggatgtcaacctgggcacctagggtaaccctaggtacccaggttgactcccagggtgcaagttcatgtaattttagctcttggggcctgaacttgattgttccatgtcttcatggtgcaaaatactgatataataagttagaaatgagttattgaagtttgaacttccattctggagtttccgtagtatacctgggcacagggctagggactcctcccaagttgacttgctatgattcgggactactcaactcgaagatgttatctttcttatcacatgtcaaacttttatgtccacatcatcaggactactcttgctgtaaacaatagttcatggactatttttaacgggctgaaaggttcagggaacataataatacataaattatagttcgagggacaaaaatcctaaatagcctttctaatttctttagtgttaagcacctttgagtatttctgatttgtttagccagatgaaaaatagagaagacttattaaatataatatgaactaaatttaatatatattaaaaattgtattagattctgtacaaaatataatatgttttaaatttacactataataaatattactttattttatttataattttagcactcatgaatgtaatttataaaatatttatatatttaataaaatcttcaataatgttttgttataacatgtatggaatagaatatgtttatattggttttttaattgtcaatttattcgtcgtgttaggttggctaatggtgtcactcattcattagccatattagttcgtacaccatgcatataagactctagttaccttcattgtatttctataattttaatgacagattccatccctgaatgatgttaggtgcttataaaacacacacaatctaattcttaaagttgggggttggattaaaaaatttaaaatttttgcacttcttttaattaaatattaattaaccgatttaatttaattaaaacatatttatatatatataaagaattaatattttaatataaattattcaaaaaaaaatattttaatataaaaaataataatttaaaaatctaataaacatgatacaaaatgtattctaaaaatttagtaaattaaatgtataacttattcttatttacatggaagatataatctaaaacaaatttaaactttttttatacacatgtatatatttttcttttccttttgaatttttttttttgttttatttatttttaaagatatgaaacaataataatttattttattttgttgttagttatgggaaagaaatattttcttaataaatattaaatagtgactaatctaaaatcacagatttaatttgtacttttgtagattggatgggattaaaaatttgaattattatgcagattagattggatttaaaatatgaagctgcagttagtacgaatcgaatacactatgagtaaaatagtacggattgaattagatgaagatcctaatctctttgacacttttctttccttctaaatgagactgaattattttttaattattattattttttaagaattcttttctctcactataaatttttttactgttagtcacaacaaacttgtgattagaaatgaaatagttgtgactaattataaatcatcattcttatgttgtcactaaaacgtctgtggctaaaagtattagtcacgaaaattacaatttattatgattaaatgtatttttattgtgactaaaattaaattagtaataaatttatatctaaattttatattttagtgataatttaatcacaaaaaatttatattgaataaaaaattagcactaaaaataattttattttagtcaacttaccacgtggcatcaactactctattttagtaaacatagtattaaattaaaatggacaaaagtttagcgagtggaataaacgattaaattagggcaagtggctcaagttatgccatttatttattttttaggtgacccaacaaaataaaaatcgaaaacggacattaatactgttcataggcacgcgagtataggtgtaccataaagaaaacatcataacatgacccctttaagagctatagatattagattgatagacccctgacccctctaccccaaaccaaacaaaattctttttattattcatttttagctaattataatttttgtgtattaaactatgatttttgtatttttaagattgttaaattttttttttgaattattaaagttattaaaattaaagacttttatctataattaattatagtaaaaaaaaaaatttagtataaataaaatttggtatatatcaaaagttagagagatataatttgtattaaaattgaacaaaatctttaaatagaacaaaaattttaattcacctttatttttcaatatcacctttgtatagagatagtaataatataatagacgaccattaaaagttggtgttggatctcctatatatatatatatactgtgctgtatactttgagaatcgtcttccttcatctttttatgatttacttttctcaattcctttttttaacaagcagaatcatgtgcaatgatacagctcattgtgtttttcaatctattttacctgttaaaccctagtaattaatgtataccaataaaagaaatttcaccaactgtggtaaatttgtatcatcttaaataagtaacatttgttacctttctaaaaaaacaaaaatggtaatatttcttttatctattacatcatatatctatgttgagaaggtgggagggcagagctattgatcttttttgtagtgttagattcacatactatacttgtatacttatgctaccatcttaaaaagttaaaatcttggtcattttacatttactcatttgagaaatgagtagatttttataaagaaatgctaaaagtggtacattctcgatgttatactgttattgagttattgatatatttaagtattgagtattatgtaatttaagaaaattatttttagagaatatcgttaaccaattgtaagacattaattataaaaggtgttagacactattaatgcttaataacaatactcatttatatat

SEQ ID NO: 48144 - DNA, 2221 bp, Cannabis sativa
  modified_base (1031)..(1048): a, c, t, g, unknown or other
gagatacaacaatggacactaactgattctaactaacacgatactttaacaaactttcctaactaactcaagacagcttagcaactaattcttctacccttgatagtaaccctgctatattaacacacagtaagaagaagaataagaaaagggtaccggcattaaggagagcatcaaaagcctcctggtgacctaactccatagcgaaatctccagcagagagattagaaggagaaagggcattccaaggagccccagcttcaagcagggccttgatgacgtcggcatggcctagcttagcggcgtgcataagcggagtgaggccttcaccatcgaaatgagaagcgtcaactccactgtctaagagagtcttcaccgtttcggcatcaccgtttctggccgcctcacacagtagctcttcattctccatcttccttcttccgtacagaaaacggtttaaaaagcacattattagaggttataaataggaatgagcaaattaaaattgggtgggtgcactgaaatttggagtaatttaagaaagagatactcacattgatcggcactttccccactcaatcttctttgaaatgccgtgactccgtagctaacttaggaagtagtatcttctcctcgctggatgctactctcgatagaagatgtcctcgttgctcgctgggtcttgacgaagagcaccaccaagggatatgtgagtgagacgggaggctggtggtcacaattctattagtataatttagggttattttagtttaaactattggttttatatacgcgtgttcgcagtgcgagtggtgcagtttttgactatttttttaaaatcgacctgcacatgtaaattttcttattttttaaaccgcacccgcactgcgaacagcaaaaactgcaaaaatcgtactgcgaaaaatggtgcggtgcagtgcaatttttgcagtttctgcaatttgaactatcaccaaataattaaactatcatgaatacaacaaagtttaagcaacacttgtcaaaaatannnnnnnnnnnnnnnnnnaatatgaaaaaaaaaattaagtttcaacaacaaaataattagtggactttgggttggaccttcacatattggatgtaaataaatataaaaattggtatttttataatgtgcggtgcggtttgaaccgcatattaacaattcaaaactacaaacctcactgcactgcataatttaagaaaaatttaaactgcgaccgcaccgcaaagaattttaaaccgcaatttttttgcggtacgagcggtttaaacgatttgataaataagcctaatttcacatttattctgaaaagagaatagtaaggactcacgtagaatagcaagtactcaaataatatagtataaattatatacgagtattataaataatataaaaagacacagaatatatagtggttcaataggaacttcaagctcgacttgcctaatccactattaaaaagagatcactcgctctgtattttattattcgttagcccatccccctttaattggagggagaagtccctacttataggtagtaggtagtacttataatagttggtcataatgaaactgttacaagttataacttacaataataatttacatattaattgtcttgatcacaacagttataaaataaatgtaatgtttgctttaatgacacttgaatatgcttgaccattaatttctatttatcgatgtgttcaagcattttcctattgatattgcagtttcattaaatatgtgtactttccttgatatagtgagatctctttcagttaatattacgaggtccttttgatagtgcgagtcctataatattacgagtcattttcgataccgtgagttctctataatgaagtctttctaacggaggagggaaaatttatccgaatagcgttgtattatgtgaacctcatagggtttcttatcgatgtatgaacctcttgggttcgtatcgaagtatgaacctcacggggttcgattaattcacgaacttctcagggtttgctttgatgtatgaacctctcgggattcttcttaatcgacaaaaagcttgcgactatacgtgtcggtattgggcattcaagtatgaacctcgtggagttcaaataaacacatgaaccaggttcttactaattcgtgaaacacctaagactatatcggttgcgtataatgcattcatgtatga

SEQ ID NO: 48145 - DNA, 1279 bp, Cannabis sativa
caaccattaaatagtaatccaatggcttaaaagaatgtaaccatgatggttacaataaaaatgtaaccattgaaacctcttccatagagttatttatactctattttgttagttacacaatttgtttgatacaagctgtttgttcagccttccactcttgtaatctgtacgttcccttctctataaataaagctcatgagctcaagacaagtaatttcacaatattgggatatctctcctactgataacccgattagtgatgtgcttaatagcttggacaaagaggcatatagggaagtatggaaaaatgaagtcagcaatttcagatgctcaatccaaggtagaagatctccattactcagttcattgcacggccaaccatgatgctgctattaaacattcagaagcaattttggatgatcttcttcaacacaaggaaatctattggcagcaacggtctagagtggattgacttcaatcgggtgatcgaaacacaaagtttttccatactaaagcccctgcaagacggtcaaacaacaaaataaaattcttatgtactgataccggtgacaaaaagacttcgaaagctgatttggctgctatcattcgcgattattttgctcagattttcacagcctcttcaattgatgaagcagctcttactgctacaattaataccaattcctactaccactacttcaaatatgaacatgatgctcctgctgccattttctgcatctgaggtggataaagctttattttcgatgggaccagataagagccctgatatagacgggatgtcagcgatgttttatcaatagaatgggctattgttggggatttggtcactagagttgttttgggggttctcaatgatggtattaatcctacggagttgaacataaccattatcactctaattccaaaaattaagaaaccaaaacaattgagtgattatcgtccaataagcctttgtaatgtgatctcgaagctaatttctaaagtgttaatttcaaggtttaagcatgtgtttcctgctgtcatttcagagacgcaaagtgatttcctttcaaatcgtctcattcaagataacattttggtagcttttgagttggtcaatggaattaaaataagagttaatggtcggaacgggatcactgccatgaaattagatatgagcaagcctgattaaaaaaaaacagtaaaatatgaaagaaattcagaaaacttattaacacaattgagagttgagcaaaatgagataatagggaggagaatc

SEQ ID NO: 48146 - DNA, 1438 bp, Cannabis sativa
tggtgtacacaactgatcaaaacatcaaatctgatattgtttttgtcctttccacaatctagtgttatttgggggtaacagcattctatgttactaagaacatggaatttataatccaatcagggaatttcagttatatcactattggaatgtttcagttatacatgtttctcagtgaattttgcatcatattctagtattgttcagctgataataaatcgaatgctgctttaatcgcatctgacccgtttatatctgattttacaggaagaacatgcgaaatctgagttggatgaagttgttaaagatcaagaacgagaaccggaagttactgatgttcaaaatagtcctttgaagtacgatgaaggagatgatgacccagatatgtggaacaattatgatgattattagttaccaaacacaatcatttttcatcctgaatatctaaccatcaaaaaaactagttaggatcttaattcaaaattttgtccatttgtcttaactctttaatgatcattttgttgtagttttcttgaatgaagaaaagaaattatatgtataattcttcatatatcatatatatcattttgttgtatttcactttttgatttcaatgtgacaatgttccaattatgcccaatacattatttggagtagaaaacatatttagtgttagcattatctcctgctgttattcttaattttaaaactttaaattgctagttgtatttaggccacctaattataaataatataatatatatatataaatatttattggggccagatttgagtattttgtaaaaattgatttgattttataaaatattttattagtaaaataatcatatatggtcgcacaagtatactgtatatgttatattgtctgagtgactatcatcattgcataaaataaatcatgtgattattttgtaaatttgtttttttttttttttttggaaagaacgtcaagttcattaaacaacggaaagataatcgggaatcacagggggaattccctccccttgcaccaagtcattgttttggctagacaatctagctctctttgctaactcatcaacaaaaccattacttgtacgactaatatgaaagaaactacatgacttaaataacttaattatgtctagaataactaaagaaacattcagaaaactctaatccggaggacatttctttgctgcaaaggcttcaaccaccaccttagcatccgaaaggacatgaatctcctcccaaccgctctgtgtagcgtgttgcagggccatcaaaacggcagaggcttctgcttccatggccgagcccgccttgctatgacaagaggattgaaaccatatgcctgactcagtgtcaataagaacaacacctaggccagcctctcccccacaccaggatgcatctgtcataatcacataacggcatg

SEQ ID NO: 48147 - DNA, 563 bp, Cannabis sativa
tttacaccctttaattttatctaaagaatatagtatctttatcaaattgaacttcacaataaagtaaaatatatttacctagttccataatgattgaatcttttgggaataaataaatttctattttatttagtgctaactcgtttataaaattaacatgactcagaggctacatctctgaattaattgagagccaaacagagtatcctaagctaaaaaaacttggctttttagcattaatttctactaacggcagaaaaaaatggaccaaacttcgatccatattaatggcatgaattatgaatatgagagggattcaggcttttatttaaataaacttcattactacaaagcatagcttacaagatgaaatggtagtaaaatagtgtaaatacaacaagttgtggttgtgggccattctctattaataattaggttgcatgtgggtttacctcttatcactatgttctatatagtacatgtctctaaaaaatgtaaaggacacaaaaaatgtacgaaaaagaaatggtttaagcaaggccattcattcactttagcttgta

SEQ ID NO: 48148 - DNA, 1131 bp, Cannabis sativa
aattataggccaccttcatcttctgaatggtcaattaccagtggcccgaatactcggagccatggctgaccaatacggcccaatctactcactcaggctcggtcagtaccgagccttagtgttgagcaattgggagttagtaaaagaaagcttaacaaaaaacgataggctttttgccaacagaccaaacattgcaattggaaaatacgtcttatacgacagtgctgctttcgcagtctcctcttacggcccgtactggcgcgagcttcgcaagctcgcgacactacagctgctctcgattcacagaatcgagctgcttcaacacgtgagagtcgccgaaattaactcctttttaaaaaatttaaataccaaaaataatgtaattcttcctctaagtgagcttttagagcaacttacgtttaacataaacgtgaggctaatcgcgggcaagcgattttcgccggaaacctttgaagagaagacgaccgaggtgtttcgatttaaggaagctattaaagaagctttgcatttggctggggtttttgtgtggtcagatgtgattccttggcttgagtttttggatgttcatggacatgttagggcaatgaaaaggacttttaaggagcttgatttggtcatggggaattggctggaagaacatcgagaagctagagctaataatagtgataataacaatggtggtgatcttatggatgttatgttatcgaaccttactgaggatgatgcagtgttgtctggttatagccgtgatactgttatcaaagccacttcattggtaagtttttttttacattattatgattattgcatgttaattttcatctgatttttggtaactattaatactttgaccaatttattatttgattgatattgttaagtcttacactacacatgagattcataataattatatatacaaataagtcatagtcatcatgtggcaattatatataaatttttgaataaaataaataagcatgagttacacgccacaaactcacccaatcacacttgagttatatatggcttcaacttttccattaaattattttgagaagagaattactattactattaggtatttgaaagtttgcaatattatatata

SEQ ID NO: 48149 - DNA, 1349 bp, Cannabis sativa
  modified_base (619)..(620): a, c, t, g, unknown or other
tatatatatttatatatatataacgccccactttaagtttttattagacatttcttcacataattataacttttattcacgttactttagttacttattggattaacgattgatcctataaactaagacaagtatttccaacatgttatgcactcgcacatttttgaaaaaactttctaagaggtcactcatcccaagattactccaagtaatacgcttaactttaaaattcttaagtgatgggttaccaaaaaataagatgcacgttcatataggtagtatccatcaatcttctttcattgtataatctcatacttacacaatcttaaaatcgttacacttaacattcctcaaacaatatgaaattgtaccgtatttctcctacgagactgctgaatatcacaatatataattattggttaatttggttgatagtcttataattaagtcaatatatatgcatgaactaatatttatatcataataatcaccacaaaatctattacttaataataaataaaccaataataatttagaaaaccaaaattgcaagctacgttaaaacttaaaacaaatcacttggtaaattatgaagcaaactctctctctctctctctcnntctctctctctctctcttaatttcacacgtacaaacccacacacacgtgtgagtgatgttacctgaaagctccctctcaacttcacccttctccaatctccatcattaattattattactcatactccaatatatttttttaaaatattttatacataattatatggatacattttaattcaaattactaataatagtaatttattattaataataatatatgtgatacgttagtgacacgattttcacatccaccattatagttgttgattctgttgtgtgataattcctttggttcaaagatttggtatattttaccaactttattattattattatttaaattaaaatttgatcaaactaccaacaaaaataaataaataaataaaataaaaacccaattatatatataatatccacaccaactttcatgcctatacataatactattaccacttcaccttgaaaaaatttgttatatttgatcattcaaattaattgtttaaattctcagttgggattttttttttttggttaatttcttttttcggggcgaataaataaagaaatatttcggctacttcatggcgagccagctaaccgccggagatcactacggtggtataccggcggcggccgggaatattattgtaagtttaatattataatatatatttgtatatatataaatatgtatgtgtatggttattaattattatccttttatat

SEQ ID NO: 48150 - DNA, 1571 bp, Cannabis sativa
tttttttttgacagaattgtcattttgtttccaactgtgaaatctataaagattactgtatatattcttaacttagatcgatttatataatttttttctttaaataaaaataattagcaatcttttttttatctcgaacaatagcgcaatcatgtgtgctaagcagagctagctagctaggtaaaaacaatatttgcacaagcccgtttgtttcaattttattgtgatatttttaaattttcttaaataaattattttaatttacaaatatatatataatgctactattatctttaaataaatatctttatatataaaatattgattatttgattgatagatcacataataaacaagtggtcataaacataatataattttctttttcaaaaaaaaaacataatataattaatatctctttgtgttgaagactcgactccataaaatatatctatatatattcatatcatatataaatagtaaaataaaatatgtaataatcatgcttttcaaaatgaaattatttttttaaaaaaataaatcatatatataatactatttacattaattctcatgcatattcagccaattcaaatattgattaattaattaccatccaatattatatataattaacttaatactttcttttattaaagataacacatttgtacttaatatattaattgcaatagatatgttaaataacattaaaatatattgaatgggtgatataacataatccaaaatttagaatgatttaaataaatggggaataattaatgttttaatgaagaaaaaaatatattagttgatagataacttgctaagataaaaggtagtatacgtacatagcacggcttaacaacaccatggtatacggattcctcttgctcgaatacccataatttattaatttatacatccaaaattattatcattattaattacttctaactttaccactactactacacctacctacctataacaccttgtttggttgcttggttttatcataaaaaaaaaaaaaaaaaaatcctaaaattttatgatcgatttttttaatatcttttgtcttattaattaattttaataaatttataattaatcttataaagatgcatattcccaattttcagaatatacaaaattttggaattattcttaataaaataattcaagttactagtgtgaacataatatttaaatgcttctttctgcaaaaattaaatgttatttggaatgatcatatattaacaaatacaaaatatatatatatattactttatatgacaagtacatatattttaatagcaaaaatggatgtatgcattttacattattgaccaatacaaaattttatattatttgattttaatattcgtaacttatacagaggtattataaatttaagtttcatattttttcatatataggtgttatatatatactacaaaaattgttgcttttagtgataatattttactcataacataaatgtgattttcagacataataaaaaattacttatgactaaaatatagtatttagttacaagttgtcactaa

SEQ ID NO: 48151 - DNA, 1143 bp, Cannabis sativa
  modified_base (341)..(344): a, c, t, g, unknown or other
caacatgattatctatattagtgagagcagcaagaagatcgtacttgtgtgatttacaattgatttagttcatattttgacagtttcaactcaactttcaaatggcaaagtcggtatcggttgaaattgtgtgttgtatagtcttaaataacattacagagtcttcacaaaaattcatttaaaactactcattttttaaaagaagcaagggtaaatattattttgtacttatattttgcaaaaattactaattagaccatctgttttgttaaaggataaaatgaaccttgtattattcaaaatagtacaagtagaaccctaaactgattttttgtcaaaannnnatttaataataatccgatctaaatgtgtttataacaaaactgtttatattttcagtatctatttgtgttagaaattttcttcaagttggttatattaaaaaaaaagttatcgaaaattaagcacatggtcttatttttacaattttaaaaaatatatgattcattttgtatgtaacaaaatagagggtcaatctataacttttacaaaatacaaagtctaaaatggtatttaccccagaaataataatgagataaaaactgttgtagtggctacttaaaaggactcgatgtcaaggtccattggtctacaagcccccacaagttctttgctaagcctataatattgcgtatctgatttattgtctgctatgaaagggactgtggaagcacttgataatgcaaattgcaaacaattcaatacaggtgtcatcttatagagaaagaactaacaaaaaagtggaacacagaaaaacaaatggctttataatttagcatcaatagctataccagtacaatactcaaatactaaacaaagttagcataaactgcataaagggtcactcagttaagcatagaaaacgtacttagtggcagacttattgatgactgcttggactctgagacataattatcaagaggtgaaccccagtgtccaccactactcgcttcatcctcctcagcattgatcccagctgaccagtattccctaatggcatcatgcctggaaaacgtttttcacatggaaactaatatatagaaagaaaaagaaaaaatgcagaaagttcattcggcatccaat

SEQ ID NO: 48152 - DNA, 857 bp, Cannabis sativa
aaatacgacccgaaacttagactaattttagcctaacaagactgcacactctttagtgagacaaggatgtacaaactattgattcgtgtattggcgataaaccatttcgtgtcagaggacataattacagagaagacatcgataacacatagtgaggcatctacctcgcaatagtatagaggtgttgacaaggtgaattggttgtttgaacacttagcgtataatatacattatactaactaagtgtaatagcttgaaggacacgattgtccaatctgcaaggccttatggtcaaagagcatttcttaaatttactcaatacactggtgctcatgcctttgctagaaggcctatgaataaaacaaattgtttatgtactaggcgagaaaccttagtgacgcacccttggcagcgtgtcttaatccacatcagcattgaatttcttaaaaataataatcgtacttatttacgtggagcatgattaaaacccaaaatttcaggaatattgttatgggattcgtaattaaatgtcattaactatcaacctatattactataaatagggacagattatacaagaaaaggggacgaaaaaaatcttagagagagagaggaatacactgattgtcaagaaccctagttttgtatcagaaaaatctgaataagattgactcgtggactatgcagaattaactgcaagaccacgtaaaaacctagtgttatttatgtttctattattctttcttagatctctgataaaatctgtgctaaatctattacgaaaataggctcataattgttaacgaaaatctgcgttaacaatatgctatgaattatccatcgttctaatctaaata

SEQ ID NO: 48153 - DNA, 1506 bp, Cannabis sativa
tctgtttccaaatgcccaaattaaacccaaaaaagagcaaagttggtctttttcaaaactttcaaagcctcttaacatgaactctttaatatcacaatatttgtttttaatataaaattgataaaaggaggagtgtttccaaattttacctgccctggaacattcaagaagggagtgagtgttggagtcataatgggagaggcaaagggagcaaaagggggaggtagtggacttacggttgaaaaggttaagattagagggaaggatatgatggaaggctttccaaacgaaatgtttgattttgggcgggatgttggaggaccagacagtggtccaccaacgcttgtatgtagcagggtttgaaggtccaggagaggaaagatttgagttggccaagtggtaggcagaattgactgtgaaaacccccgaagggtgatggttccagatgaggctatcactgttgtgaggatcaatgggaacagcaagaatggcattacacatctcctcatcaaagaaacatctgagctttgaaaggtcccaatgtcggtcttcagtgataaaaaaggaaacattttgggaaggaggtgaaaggccaggtttaagtatagctttgccatgggagggaagccaattggattcagaggttttgacaaggttaccgtccccaattttccaaataaggcctttggttagaagatcccgaccccaaaggatacttctccaacaaaaggagggagtgtggccagtagccgcaagtaaaaaattgttgcgtttaaaatattttgccttaaggatctgggcaacaagggagtcagggttggtgaaaatgcgccatgcttgcttaggcagcatggcttgattgtgatgaacaatatttctgaaacccaaacccccgtaaaatttggaggcgcaaaggtggtcccattttttccaatgtatcttatggttgtggcccaaggacccccaccaaaatttagacattaactggctgtaatgtttacaaagagacaccggaagacggaagcaggacatggcataagaaggaatggcttgaattaccgcctttaaaaggacctcttttccggctctggagaagagagtttggttccagactgaaagcttggaactagctttttggagaaggaacaggaaagaggattttttggacctagagaaacattgagggacacccaaatatttgtctatgaaaggtttgtcatcaaggtgaagagtgtcccggaaggaacgacagtcgactgaggaggtattgggagagaaaaggatggaggatttgtggaaattgaccgattggccagtagcaaggttataaaggttaagaacatccttgattgccatggccgcggaaggagtaaccttcgtgaaaagaagactgtcgtcagcaaaaaggaggtgggagatagtaggggcagagcgggagatggaaatcccgtggaaagcgttggagtgggctttagcgtttatggtcccagaaagaccttcagcaac

SEQ ID NO: 48154 - DNA, 1276 bp, Cannabis sativa
tctctcacatggttgacagcctttgccaattggtcagattcaaagctgtgtgattgctgactaccaccaccaccacccatggcagcccaatacacctctttctcatttcatccattaaaagtgattggagaccaatgtaatcagtgatggggcaagaaagaaaaggtttttctttttcagttggatcaaacattctaatgttaggaaacaaaattatattgtttaggtcccctcttaagatcattgtcttattgtttaggcccaatcttaagtgaggaaatagtagtttaaccgtataaacacttgcaaatatgaaaaatgaaaaaacaaaaaaagaaagaacaataattgttaaatgcagtgcaattggcagaggacctaatcatagtgtgtaatgaaggcacacatgctatattgtgacactctttactttttggaattatttcttttgtggaccataaacccacatctaggaaatcccacgcaagcttttcctcctaacacatgagaactcttcagtcacacgtaataatgtagacccatgagatgagagaaattccaaagtcttgtatataaattgattctttttgaaaaggaaaaaataaaacaaataatttcacataaatagacaacatgcatatcctaaagctttatttaactttacaatacctagcaaaagaacctcactaacatctccaatgctaatattttggagaactgcttgatgagatggaaggtggcaaaatatacatatgttatatcattaaaaataaaagaatattatttttgaaatttgcattgatgctatattttttttatacaataaaatattaaaagtgtaatatatataatagtagggccggccgtgagttaaaacgaaggaggcagtcgtcttatgcccccaccgctcaaggcccattcgaaaaaaaaaaaatatagttagtaataaaataaataataatacttttaatgctaaatatgttttgtatcctaatggtaatttgattagtttaactactaagagttgagagttcgaattctaatagctttttatttttgtcaaattaacatagggtcggccttgtataatagtttaataataataaaaaaaattatatatataataatgtgtgagattataattataatatttttaaaatgtattatatgtttttagaagtaaatgtgtcaaaaaataatatggaagaaaaataaaataaaatattatatatttggatgatgtgtagtcatatagcatcttcaaaaaatgctatga

SEQ ID NO: 48155 - DNA, 2477 bp, Cannabis sativa
  modified_base (1243)..(1244): a, c, t, g, unknown or other
cctacaggaatattaatcatttttaccaatgtacaaataacacagatagagttaagtgaacacacaaatctcattttatggatttgacagcatctaaatttacctgatctgatagttctaacaaaaaactaatttgtttaagaaaagaagaaaaataccgtcgaaagagaacattaaaatgcgaacaaaattaacatcacacacagttcaccactacgtacaacattattcaatacattatataatgctaaatttagttacatgataaaaactcgcaaacttaagatgaaaactaaaacacgtaaatatgaaaagaacaaaaatcaaaataaaacaaatttataatattttatttacccagtgatctcaacggacttgacctcaggcttcttctccggcagcttggggacagtgacggtgagaactccgttatccagagatgccttgacctcatcaagcttagcattctccggcaggcggaagcggcggaggaacttgcctcggcctctctcgacgcggtgccacgtgtcgttcttgtcttccttttcaatgcttctctctccgctgatctggagaacttggccgtcttcaacctccaccttcacctcctctttcttcagcccagggagatcggccttgaacacgtggctctccggggtctccttccaatcgacttgggtgttggcgaaagaggagacgacgtcgtttgatgaggagctgaataggtctagcaaacccatgtttccaaacacactaggaataatcagagacattattattatttatatattaattgttttgtagtaattgaggactaaaatgcaaaattcgaaagatggattgattgagattatgatcactttgttagtgaagagtagaggatcggtgcgtatatatatatatatatgaatgagtttgagatttctgggttcttcttgaattttccatatttagtattgtttattggtgtagatggttcctgcacatacaagattaccgtctataatgttccacccgtttcagttactaatttaagaaagaattaagtaagaggaagcttctccattattctatgggttttcggcccattagaaactaagcccattttccctttttaacgaaaaccgaaccaaaggagtaacaactatacacagatatgcagtatttttcatttttaaggaaaaaatactggaaaatttacaaaaagtaattaaaatcagttttttatttttatttttatttnnattttttattttttacattttaacagattttttaatttaaatttgaatggattatattttttttttacaactttcatttttttaaatgttattttttttttcgaataaaaaaataatctttaataggcagaaatatccgctaaaacaatagactgaagagtaaggggaacatcactctcagtaaaacgacgacctgactaataacaagcaccacgtgccatacagtgtgcggcttagcaaaccgtttaacatgaccaatagaaatcttacttaaagaagataaataaattgacaatcttgaacaaataaaccaaaaatagaaggcatagataccgaactaagaagataattattgcttgtgttcattttgctcgttttacaatcttcttagatccgttgacgaaaaaccgcggccgtcaacaataataatgcatacaaattttaaaaagttgcatttgtcttaatattttttaatttgagatttgatttttgtttttatatttttttaaaacaattttataaattgtatttatcaattttttaaaaaaattttaagtaatttttttcttgttaaataatagtttaaggtagtagtttaaccttttaatggtaaattatattttagtttactttatttaagatacgaagtttatctaataaaatatgttgcttgtcttatttaacagtagtggtttgctttatttaaggcacaaaatttacgtgtcgtttgctttattttaggatagtgattttagttttaatgattaattagattttagtttactttatttatgacatggagtatacttaataagtcgagtcatttataagcgttatcttcttacaagggtcaaagtgtgacatttgaccacccaagttatggatattacatatctgccacgacctagggctcaagtcgtgacatgtatacatgtatatgtgtatgtatatgtaaatttttctataattgtatatatgtgttagtatgtatatatgtatatgtatatatttatgtgtgtgggtatgtatatattctaaaaattttattttttttaaagcaaaaacctttaggggcgattttaagggtgacttttaggagttttaggggcgacaacagtaaacgtcagatatagtcacccctaacatagagacgacttttttgtcgcgctaataatacttttagatgcgaactattagtgacgactgcttaggggtaacttattgcttctaata

SEQ ID NO: 48156 - DNA, 1395 bp, Cannabis sativa
aaccagattgtaaaagcatatggcttcaatacttgcctttcacctatctaggaatccccatctactctaaaagaatttcagggaaggaatgtgccatcctagtggataaaatgacatcaagaataaaaatatggagctccagaaacttatcatttgtagggagagcaatacttgttaattctgtgcttttgaccatacactcatattggagtcagatcattattctaccaaagaaattgatccatggaatagaggctatatgcaggaaatatctttggaaaggtcatgccatgtaccaagggccaggacctgtgtcctgggagtctctttgccattcaaaattggtaaagggcattggctttaaagaggtttcagcttggaagaaagctgcaatggggaagtatgtgtgggctttggctaataaggaggacagattgtggttgagatggataaatagtgtgtatttacacaatgaggactggtggagctatgcggttccaactcaagctagctggtattggacctgcacagtgaggctaaaggagcaattcaaagttattttgaatggctgtaaaatacaaggaaaatacacagtatctcaagggtacaaacagtaccatccagtcccaactaaaatgcattggagtaaccaaatttgggggagactcaataccccaaaacacagttttgtgagctggttagccatccaacagaggcttaagacaaaagacagattggttaaaatggggattgctgcagattaggtttgtttgctttgtaacctacaacctgaaacacactctcatcttttcttttagtgtccaatctctcatctttagttacaaaacatcaagagctggctgcaatggagaactcaaggcaatacacttactgtgctggtacgttggctgggaatagcaaataccagtaagtttcgaaaactggtttttgctgctgcactcaccagcctggtgtatcatatttggaagtcgaggaacttaagctactgggaggaaacaactcctgacagtaataaaatttgcaaagaactgaaggctggagtgaagcaaaggattgatttattttggccacaaaaagttcctagagaagacaatgattggtactcaacattgtaattgctggttttttttttctgctctcctgattatttgtttgtatatacagattgtatagattcatatcaaggcctaaaaattcgggtgcttctaggttgtaaaagttttgtgagataatacaattacctaattcataaaaaaaaaaatctttaccatttagggaaagcaaatatggaagcagatactctaagtcggaaaggtctggggcaagtttatgaattgaaggagatctcaccagaattggctaaagatatgacta

SEQ ID NO: 48157 - DNA, 2962 bp, Cannabis sativa
catgcaatttatgcttggaaaaaacgccactttaaaaaaggaataaacacttggcttagcgagacatgccgagaactacatgtaacttttaatttttaatttataatatttttaaaatgaaggtaatattatgtttttaacatattatttaatcacgagaaaatgaatgaagaggttgtcaacttgacagaaatagaaaatgattccagcgatggattttctagaaaattaaagtaacttaaatttcttggggattggtcagactattgaagaggagtgagttatagattgaaaaaaaaaacgatattaagttctagtactcaaagtcaagctcaattacaaggctcttctccatccattagtctagaagatatgagagtcattcctgagttgatgttaaaagtgcgtgataagattgatcaatttggcacctccagtgaccttctctacatgacccacagtttgaacactttttaaaaactaagccccacatccattgtcaatgccagaacaacaagtttttcaacaaccacaacatatttttgctaacatgttcaataactcctctcagatgcctcaattatttcaataaaatcaataaaattctcccaacatgtctactggctcatcacagtcgcctcaattatatttcatgtttgggcatccctcacagtctcctccaatatattttccagacgacacaagaggatctcaaactcaacaacttatggttggcctttttggaggctcatcgcaataacaacaacaacttacggtatggtcaatttgagtcatcacaacaataacaacctgtgtatggtcaatttggatcattattacaacaacaatctatgtatggtcaaataggaggatctccatagaagcctgtgtatggttagttttttagtccttagagtcagcaacaacagcagactactttgattcgtccgcagactcgacaatttatcgagatcctacctacgcaacaatttgcaaaaccgtattaccctaccctaccagtgcctcaatctcgtaataatcgtgacggttgaagacttggctctaatgcaaatgactttatggaatttagtgattagaacaatgatataattagattttttaattaagaaaatcttattttttttttaatttttgtttagataattttatatttttatttaagacaatattagtgtgtattgttatggataaattaatattatagataattattattaatgttttctcaaatttaagtagataaataggtaaataatatttatttaaaaatagttatattaatttataaataattataattatttttattatataaatattagaaactgaaaaatacttttttatttaaaaaatattaatatcggcagaacactatagtgggtccatcggtattgatatgtcatcatataaatgaaagtactctatatcgacaaactctaccgctattaatccgtcgatattaatattttaccggcagagccccttttttggtcgttaataattgtattagcgatccattaataccgacagattattactggaaaattcaaccaataatacccaatatcggcagatttggacattcataccggtggagctgtccacgtctacaagtcttaaatgttgcagtatgttatatttttaattacttgtctaagttattttgttaagaatttctatgtgatgtcttatttcattatactttatttttttaaagaaacaattgtttatatgtgtcatgtaattggttttttaattgttcactttacgttattagtttcttcgctttatatttttttaattaattgcttagtgtaattggtttctgtaacttaatttgttaagttatttgttaaaaaaaatgtgttataaatatatgtttgaataattggttttatgtttcattttttttattatttaggtttcttatgtaactgattttgtgttaaattgttcgttagttgttatatataattgagttttaagttttatttttgatttggttattttaggaaactggtttctatatgttagttttaatttactttgtacataattggtttctatgtttaagattttaattgattgtttagtgtaactggtttctgataatttaattttataagctatttgttaaaaaaatgtgttatatattttttagtaattcatttttgtgtttcaatatatcattttattgttttatttttcttatatttttgttttaatttgttagttaattgtaataagtaacttatttctttatttaatttttattttagttatttaggtaattggtttatgtgatttaattttttaatttaattattttacgtaactgatttctctacatcagatttttgttaagttgtttaatgtcacaagtttttattatttagtttataagtcattgttaaatttttttatagtatgtatttttttttaataactgacttttgtaattgacctatcttttgattactttaggtttgttcaatttttagttaactgtaatataaaattggtttctgtattaaattattacttttgttattatacgtaactcgttttaagatttagtttttcatttggttaatccacataactattttctaagtatcactagctgataaatattactgatttctctttgttaaatttcaaggtccaacttcgacgaaaattctagcatccaacttcgatgacaactttggtgtcaaactacgcggtgactttcagtagcgacaactttttcgactattatagcaattttgtcaaatattctcattctattttctacttttattacggctaatattttgtttcaatgaatagtgtctgttttgtatagtgtgtcaatggtcaagtctaggagcttcttagaaatttgtaactagtttttaataatggtcttgtgttggttttagttttgacagtgggttga

SEQ ID NO: 48158 - DNA, 1426 bp, Cannabis sativa
taaaagatccgtgactaaagatatgagtcacaaaaattacaattagttgtaattaaatatatttttagtcacaatagttgttgtgactaaaagtaaattagtggtaacttgtatctaaaaactatattctagtcacaaaaatattttgttgtcactgaaagtttgtcaccgaaaataatttttttttttttgtaatgtgggaaggatacatctagaggcttatatcacaaattcattttctcaatacaaagaagagatagaggggaattcagattgtaattatttgattgattgtaattatattaatttttttttgaataatgcaaatatgagctgatttaccaagaaaaaaaaataactataatatatttatcaatgggtattatataggcaatggtaaataattcattatattgttgtcgggaccactttgacaacaattgtactatacaatatatttaattaaaatttatataaaaatatacatttcatgaaaaacattataatacaacgaatgaaatcttgaaaaaagagaaaagaaaaagtttatgatagtgaaatatgatacgtacgcaaataataatatacacttgttgtatatatataggcccatcttcatagtatccttacataaaattgtggtttaaaatttcatacgtacatacataatactccatatatatttatgtataagatttaaaatatatgcaatgattgattatatatccaaacatattgtgtggagactatatagctatagcttataggtttatgcacacatgtcatcaactagttggtatatactactttaacttattaactatagatttttaatattcttttctcactttttttgccctcttggcttcatatcaaaaccccaacaaaaaatatctcatgttcataaaattaaaatggtgaaaataatgttatatatatatatatatatatgtattagacactcagacacatattcatgaaactagccatgtatatatcgataaccaataaacacctctaacaccttagcaagaagatatgatgatgatgatgatgatcaataatgtgtacgtagtgcattattgacattatattattcgtatatatatattcatattaataatacatttttgcatatatattattttataaatatatgttctatcactactttttaaaggttggccacactttgtggctgccaaatagtatagtactactttacgaaaatttggatattattatatgaaccttaccttatatatattacatttatatatatatatttatggcaagtatgtctatatatatcatatatacaacaagacccccaccacaccaccttcattcatacatatctttatatattaaaagtgcctatctaacggcattttttggtttaacagaatataccttaaaaataaaa

SEQ ID NO: 48159 - DNA, 1525 bp, Cannabis sativa
tcataaaaatttattaaaatatctcctctacatcaaagtagatatttttatctttcaaaattacagatatgttttccactggaaattagtatggaatgatgtgctacaagttgactgattctaaatagatgaatgtaatgattgaacagatgaaatgttttattgattttgaatctgacacaaaatttactataacatacaaaactgtacaaacaggtaactacaaacacattattctatccccaccacctcacacccttttgtcactcttccactgagtttcttttcctctatatcagaagtaaattcaagtagaaggctgaaaaatcctctccatgtaaattactaagatcctttttttatcttttacttttcatcttacaaggaatgaatcacaagagcatacataattacagttgctcaatacataaactaatcgcgctatcactagatcaaacctcatcaattggagatgaagatctggtcgcgggagaccctccttgtgatcttgattcctcaattttctcagtcacctcacacacaacaagcctagttagaaacaatcctgcaatcagggctgctcccatcagcattgtgaaaactaagctccaactcttagttgagatgtagccagttaacaagggtccaattgcagccccaaccgagcctgttccatctatgattgctgttacagttgcaagtgctcgcgaattccctttcaaagagctatgtgtaccaagatcagctgataccgcagttgttataagagcgtatggcccgttcacaaacattcccgttatgaacataaagaaaatgtttagaggtaatgacaaatgtccataacttctgtagaagaagagagcaggaaggaatagcgcaatacatacatgaaactcgctgctgttattgctcttgcattaaggcgatcagaaatgtgaccggctaggattcctccaactacacccccaacatcaaacaatgtagacaggtttccagcagtctcattggataagtacttgccatctatagctgcaaaatgtaacaatgtaaagttagtgatgaacataatttatgagtatgatgaaaagataagcatagaatgataagctgaacagaattagtacctgtgtggctaatgtagaaaggaagccaatagagaaatgtgtaagcgaccaatttggcaaagaataggcaaagagcaaaaggagcaactcctggaattttccatgcttctatgaatccaacagctttgtccttatttcccattttctctgatctcaaaaatggtacctccaatgcctccccaattttcttgggcgactgtggttcatcttcatcttcatcttcatcagctcctacggcctcaggactcaccggtaagaagaagaaaacaaccaaaccgaaaaatgtgatcaacacaccaggcacaacaaaggaccagccccatccatagctcaataaaacagaagctaccaatgaaccagtgatgtttccaatagaggtgtgagcattccatattcccatt

SEQ ID NO: 48160 - DNA, 1814 bp, Cannabis sativa
  modified_base (787)..(787): a, c, t, g, unknown or other
  modified_base (895)..(896): a, c, t, g, unknown or other
ttttttaaatttattttatttaatattggattaatatcattttagacactatgttttgtaaaaattactgattggaccatttgttatgttaaatgataaaatggactttgtatttctaaaatagtataaataggatcctgagctcaattttttagataatttttcttaatataaccgactttaaaataattcctaccacgaacagaaaaagaaaatgtaatcagctttgtaataacatctctatatcattttattattaagttttattttgataagaaattaacttaggggtactatttagtactattttgaaaaatacaggattcaatttgacatttaacaaaacagaatgtccaatcagtaatttttacaacacacagagtctaaaatggaatttaccttttaatatttgtgatataattctcattacataacttctccaatttaataaagattctaatacgtaataataactattatattgtattctatctcattacatcacttttaaaagaaaatcaaagattataacaataattttgattttattaaaattttaattacatcaaactaaatatgataaaagtaaaacatatgattaattaacagattttcatggggttaagtgccttgtatgtccccacacttagtatatatgcgtatacgatattgaatacttttaattgttatgagtaccacaaaaaatgaaatatcactacaaaattttttaattttagtgacaacaaaatttgtcattaaaagtaaaaaaaattgtaactaattatanattatcattcttatattgtgactaaaaagttcgtgataaaatgtattagtcacaaaaatcataatttgttgtgattaaatatatttttaatcacaatatttgttgtgnntaaaactaaattaatgacaacttgtaactaaagactatattttggtcacaagtaacattttattgtgactaaaagtcacatttagttaaaaaaaattatgttttaattaaaaaattatcactaaaaataacaattttttatagtggtaatttaatataaataatataatgtatacgtgtgtgtatatatatagttgttttgtgagagattccttactgtaattggactaattaagaaacaatttctgatcagaagattttgtaataatgaaacatacatatcttttttatttgcccagcacatagcaagtgggagtatttaaataatacataactgaatattatttatgagttttattggtttttttgtcgctctgacactgccaatcaaagaagaaaatacatttatatgtactgtatatatacatggttgtggtgattatgattttatatatacatagattaataatgtgtgcaactaaattttaaccaattatatttatttaaattgggatatttagaaaaatttaaataatatactatagagagagatgtaaataaaggagaccaatcacatcaaagtgaagcaagcagaaagaatcacggattgtagaaaggcacaaaaaaaccagcttcttctaattaatggatattatatatcctttcaccattcattcacggacgtacatattaaccaaaactcaacaatacatcaccaccatgcattcatatatatcatcatattcatctctctctctctctatccctatcatcatattcatctctctctaaatgcttcacatggtttgcctagctgtattgatctcttttccaaattagcccttctatatttaatatatgggagctaatacatattagtttttgttagattataatataaaataaaaataaagtatat

SEQ ID NO: 48161 - DNA, 1653 bp, Cannabis sativa
gtatagtttgaatagaaacaaaaaaccccatcaacaatttcatcccttgtattgagtgcctgaaatcttatagtgaacactcttagtttaagaatttcaaccttgtctacccctttatccttccaaactcttcttgcaaagccttcaaaaggccctaaagggggattggccccaagaacatagtaaaccattgcagattgccaatacaaaatttcctcctcaacaccagccatgttaatttgaaccagtggcttttgtttagagctttccccttttgatccattaaattttgcactcaaattctgaattatcattttagtatgtaggattggtggtgagagtctcttacccgatttcagattagcttcacatctcttagttgcttctaggaagctagcaaaatctaaccgaacctctttatctttctacaaaaattctagtgaagctctcggagaaagcatctgagctacatcttcgatagtctggggagtgttcttctctagttcttcctcatctgatttagatccaattccaagacaccaattacctccgccattgacttagttttgaggactaaatcagacgacattggtccccttttcttccccatattcccagttgccttccttttccctgtactgactgaagcctttctttcccctgtaacccttaaacttgctttccctgaatttcaaattccttaagaaccactttttttagggcgtcctcaacctgccatagcttcgaaatagagtcattattgtgagccctagcagagcacttttagagtacaatcattactaattgattttagatatttatgaaaaatacattatatacttttacaagttttgtattatcatattctttatctaagagtactcaagtcaaatcaaatgctttaaaatatttgaaaaatcaaactaaaaacacattacatcaaatgctctaaactctttcattttggagtttctttaaaattgactattcatgttctagatttacagaatattattcattgttctacatattttatttattattttgtgtttgaataattcttttagtagcaaaactacctatactttatattttgcgatactttaaaaaaaacatgaaaacaataaaaaaaaaaaatacaaaactacagtctttacgaaattttcaacattttttacgattttttagattttatttacatgaaatacggtcttttatgtatttttatgttacactcttgttattttattattgattttttgtcatttgtatattaatttttatattgttttgatgttattttttttgttacttttatgtaattttttgttgttttcttgtgtttttaataaaataccgtaaaaatatatatataaaaaaactttcaacataaaaatgtaaattttttataacaatttgtgttttatgtaattagcccttatattttttaacaattaaccacctaaattgagtttttggtgacaaaactagccaaattccatttatgttagctacttatccattcagtctaaaagactatgttatgccacggtgaacataccacagtgtatacaagtgaacacgtttgtatacttttttttttttacgcatatagtagaaaataatatcaatatactgaaaaaaagagagaaa

SEQ ID NO: 48162 - DNA, 2451 bp, Cannabis sativa
  modified_base (2407)..(2421): a, c, t, g, unknown or other
ccaaactcgaactcagaattgcaattggacctagaatcagactaggactaggacaaggagcaggaccaacaaccgtacccgtaccccaacccaaataaaaatctaaatttgacccaaaccggaaccaagactaagacccaaacccgaaccgcgattaagacccaaaaccgaacctagagcgggacccaaacctagaccagaacaaggacctggaccaaaaattaggataaggacctgggccacagaactaggactgggacccaagacccgaccccagacccggacttgaacctaagacccagctcgtgaccagacacccaaaatgaaattagaccgggacccaagatcaggatctagatcgggacttggggcttggaccgaacctgtagtcggtgtctagatctgggaccgagccctagaccctaacccagactagagcccaaacccaaacccagacccgaacccagccctagacccaaacctggacccgaacccgtaccttgtgaccccaaattggaactgaaaccagaagtagactgggacccaagaataggaccggaaccaggacttggacctagacctaaagacgtaactggacttggacctagacttggaaccgtaactggaccaggacttggactccaacccagacctagacccgaacatcgaccaggacccgaatccaaacccacaccttgactcggttctaaacctggactcaaactcagaccttaacatggaaccagactagggacacagaactagggttgggacctagaaccgcacccaagtctcggtcttgaacccaaactatgacctaggaccctagacctgaaccagaaccagaccgggacacgtgacggggatccagatctgggactcagaccaggacccaaacctggaccctgagctagacccgcgacctgaaactagaatctgaataaaaaccgctacaccaagacccttgaataagactaggaccgtgaccaggacccgaacttggacttaaatctagaacagaactcagacctagccctagacccaaactaagaccagaactcgggcgtagacacggtcgtgtaccctgatcgataccgagacctgtacctgaacccggacccagacctagacctcagacccgataccagacccagactcaaacttagatagagatccatatacgaacttggactcgaacccaaacccaaacccaaactgggattgaaacttagcacatatatccggatcgagaccgtgaccaaacccgaacatggacccagaccgggacctaggacctagacctggatggggcacttggacctaggccttagaacctagacctagattgaaactcgagacttggacacgaacatagacctagactcgaacctagatctggacctagaccaagatcgaaacctgaaccccgacttggaccaggacttgaacctcgattgggtcctggtctcggaccggaacctaggactcagacttggatgggggacctggacccgagacatgggcatcagaattgggaccgagtcccaagacccaaccccagacccggacctaggaaccaatctttggtgggggaccaagactagggacctaggccccggaacccagacccagatctaaatccaggacccgaacccaaaccaagacatgacctggaccgaggaatctgaagtcggacccaaacttagactgtaaacctcccttggactcaaaccaggacaagaacctagacacgaacccataccaggacaaaacccgaacccgaacccgaaccaaaaatcaaacccaaactcgggatccgaactcagaccaagacctagaattagacccaaacctagacctacacctggactcaaacttgaacccagaccaggattggaacccaagacatagacttagaaaaaaacctggactcagacagagatcgaaactttggactgagactcgaacctagaccgaagcgctggaccctatcccacacctggagcccgatccagacctagaccgagattcggaccctaacccaacctcggacaagttttcaaacaccgacccgaactcgaacccaaactcaaactcagaattgcaaatggaactagaattggactacgactaggacaaggatcaggccccatacccgaacccaaacccaaataaaaatctacatcgagacccaaacccaaactgcgacgagcacccaaaactgaacatagagcgggacccaaaccaagaccagaactgggacctggacccagaataagataaggacctgggcaacagaactaggactggacccaagacccgaccccagccgaggacttgaacctagttcccaactcgtgacccgggacgcgaaatggaaccagaccgagacccaagattgggatcnnnnnnnnnnnnnnnggcttggaccgaacccgtagttggtgtcta

SEQ ID NO: 48163 - DNA, 958 bp, Cannabis sativa
cctatagaatgtagggcaccttaaagcctgttgaaggccaaacatcttacaacatgtagaaggtcgggcaacttacatccggcaaaaggttggacaacttacagcctgtagaaggttcgccgcttaaagcctgcagaaggccaggtagctatagcctgtagaaggtcgggcaacttacagcctgtagaaggacagttaacttacatcctgcattaagatgcctaaatgggatgtggttctttgtataggccttctagaagatgtccaacaactcctacaaacttgggacaacttaactgttcaagatttaaagaattttgtagcaccctaactaatttaaattaataaacaatttccataattaaaccctaaatatctgctaatttctaaattaaagctaagcggtcttcataattatccccccttaaaaggatttcgtcctcgaaatgtaacctgaacaactttggatattgagatctcatatcagattctaactcccatgtggcttcctccaccttgctgtttcaccagagtagcttgaccaaagctatggtcttcttccgaagaaccttatcctttctgtcaaggatctgaactggctgttcttcatatgacaagtcttgttgaagctcttgacctacataactcagtacatgagtaggggctgaaatgtacttccttaacatagaggcatggaatacgttgtgaactactgaaagagttggaggcaaagctaatcgatatgccacttgtccaaccttctggagaatcttgaaggtcttataaatataggacataacttgcctcttttcccaaaatgcttgatccccttcattggagacactcgtaagaacagaatcaacacatgatcccctactttaaactctacatttctatacttcgaatctacataactcttttacctgctctgagaggcaagcattctagctttaatctt

SEQ ID NO: 48164 - DNA, 1093 bp, Cannabis sativa
tgtgcccaataacaatattcatttaaaaattgggagtgtgttattaagtagggtatgaattttactgtcttaggcgcatatatgacctgttagtgttcaggattaagcgttcactaaataaaatagttaaaatgttcaaactttcctcagctaaaaaatcatgataaacgacatgttagatatatctgttgttaccatttatcaacttatatttttatcgtttacgagctaaatattttagagttacaaatgagtaactatagattttgtaatttctaatatatcttacataattcttgacaaaactcatttgttagactttgtttgattattaattatcatgtttcatttaataatactatgttaatataataatatagcatgatagactaataaattcatgagtatacaagtacataaataatatgtaaaatattttggcataaacattaataacattgagatttctatttgatcatgaccttcaaataatatgtgctcatttttagggttttcaacttattttgaagagtatttttttttttccaatgatgggagttttgacttgatcataggattaggaactataaatgtattgttgaaaattgtaaaatcaattaaattctttacttataaatctatgatagtatgatcaactgttcaaggtgaagtctctagtggaaatagggccggaccggttcaatagtcgggtaggagggcccacgcccaaggctcctacccaagttcaaaaaatcttttaataaaaatattttaaatttatttttataaaatatcatattttatactttaatattatttattgggaaaatatttttaatttatttgttaagatactacatttttattttttattaaaataaaagattcatgttttcaaaatattttatattaaatttttatcattatatatacaaaaatatatataaaaaattcaattatattttttagtccaaagtcgctaattagtttgagacggcctgagttggaagctgataattaattaagtcatactttattattattattattgaaaagtaacaaaaaaaaaattaaggttattataaaaattaaa

SEQ ID NO: 48165 - DNA, 1380 bp, Cannabis sativa
  modified_base (50)..(73): a, c, t, g, unknown or other
attttatcgttttagaaatttcatctttagggtgtttaaacaacatactnnnnnnnnnnnnnnnnnnnnnnnnaaaataatttccaacagttggttgcttgaccttaggaataagactaataagagttcgatttagcggtgtgatatccccccaacattaagggcaaggagaacagcagccaccacgtcatgctttacaaaagaccaattcttactgtagaaattggtgttgaaaccatcaataccaggagttttatcaagtggtagccaaaagaaagctttttccacttcttcttttgtgaaggtttcctagagaatttggatgtcctcagtggaaagagatgttgtaatgccttccaaggtatgatgtatgtcttcaaagttggggtttgaagacatgaacagagtcataaaatagcgttcaatttccttggtaatgtcctcaaaagaagttacggtcgttccctgaacactatcgagtttgtggatctgattagttttctttctagaggaagcatgacgatggaagaattttgtatttctatccccttacgagagccattgggttctggctctttgcttccaataagtctcttctttgagcaagagtctatcaagatgggattgaagggttttttattctgtggatagtgttctcatcccagtaatgattactcttagcaaggtcgagatcttttttcaagatgctgattcaatttttgagttggaaacttgatttgttgttccattcattgaggctatccccacaggtggattaggtggcaataaggtgtgagatggtacaaggcgagtcccgttgggtaacctaagaggattcaagggtcttattccaactcaactcattcaaccaaacattttcaaaaaggaagtgtttggttttatttcgagagggctgtgagggtgtgccaacagtgtcaagtaataaagctcgatggtcagaaccaaggaaatctttatgatgaaggcaagccttaggaaaatttcttgaccatggtgcattaacaatacaccaatttaagcgctcctggatgttgttgttgttcgcattatggttattccaggtgaaattgaggcttaatgggtcgaagggggacatattaaaatgatctaagaaacctttaaaattgttagaaggtcccatatatattgggattaccaccaatcttgtcatccattgtaaggatggcattaaaatcatctatgatgatccactagtcaatagaattattatgactgattctatgcaaaattttccaagtgtggattcattgggcctcattgggagagccataaaaacaagtgagatggaaaggaataaaatcgttagtggtggaggaaacataacaatcaaaatggttc

SEQ ID NO: 48166 - DNA, 1702 bp, Cannabis sativa
taaattatatgattatttattgaatatttctcaattaaattatagaacacctaacataaaactaagtatagtttcttctagtatatatttatatacttaatgcccacgtacgttatgattcaatgggttggtcatcaaatcttaattaatctctaatcattttttcttcaaggagaaacaaactttatctttatttactggaatttttgaaaatagatttaaatgaaataaaagttacataaatagatgaaatatagagattgagaagaatttttttttatgatttgagtattaataaactcttgtctatgagttaatattaaatggttggaataactttcgagtattacacaaattttcttgtctagttaataaccctagcttttagcctttcttgtgcaagatatgaatttcatactctttacatgaagagttaaagttatatttataggttaggatcgggtatggttatatccgaacccgctaggattagcatataaatattactcactaataggataaattcaagtaatatattgtcatttggctgatttggtgaggcccagcccatgaggcaatggtcgtctgtacatatgagactacttgatagtgataggtggcatgcgtgtacatcctgatgagaagtaatgccagtaaagtggcggttggacaaagggcatgtcttccttggtggtgtgcgcgtattctcttagtctgacgcagggaataaggtcttgatattgtggaataacatggtgtcagaggagtgacacgtgagccttagctcaaggttgcctcttgaattaccatccaaaagtacctcttgaaggcattcagatacatcccgtagagtcatccctcttctggataggacaccctttttgaccccaagcgatccaactctagggccaattggacttacttccaacccggtaccacaaatcacttatgataaatgtagcacattatcttgatcaagcctataattgggtcttcattaattagtggtaagtatatatgaaagttttgatttttattaatattaattataagtttaaatatcatatagtatactattaattaattttctcttgttttttttcatatttgttaaaaaatttctcttattgaaactaaatttgtttatgagttttcagcaacaaaaaaaaaaattgtttatgagttttagttcctttttactaaggtatagaaaaattggagcttgacaaaaattactaaatcatcctaaaaatatattatttattgtcttttttatctacatatttttttttataagttttgttatagaatatttcaatgctaagtatgtaatttttaattaaaagtatttaattttatgataagaattttgtaatggaatagatactatagtaataatgttattttttagctagaaattcttttcacatgcgactcctttcaaagtcgcaaaaaattagaggtgacaattcaggtgatgatacgacaacatgacatgaaaactaggcaagaattgcataacaaacacaacaagaaaaataagtttcctaaataatccaatatccaaaagatttttttttttttttgagaaaatacaaaagaatttttgacattgtatttattaacatgtttaaaaatgttgataatttttaaaaatattgaaaatttttattttttttttacttttatactgtggggcgga

SEQ ID NO: 48167 - DNA, 1910 bp, Cannabis sativa
gtttatttggtatgatcaaaacaatattctttatggtaaatcacctcaaacattaattgaaatccattccaaggcattagcttatcttcacaatttctaaaatgctactgctaaaatcaactcggctgcaagttatcaagctgttgatgcaggtcatagtgctgctggtgtaccatctcctggtgtagcagatctttctacttctactggtgttgtacaatccgctactggtgcacactcttactctactggtgtgaaagcttctcatttggttggtgttgcagctccaattaagtggcaacctcctcctgtgcattgcctcaaaatgaacattgatgcagcctttgattcttcccaaaaaagaattggtttaggcataattattcgagattcttctgggtgtttcaatgctgcaaagtcaaaattagtgcgcggttgctataggcctcaagaaatggaagctaaggccatgttttatggtctaatttttgctcggagtttgaacctataattggatttcattaacacaaattctctgcttcttgttgatgcaattaacaatccaagacccattaagtcttatttttatgatttggttgcagatattcattatcatttatcaaatctccctttagcttgtgtttgtcatgttagacgaaatgctaatcatgctgctcgtggtttagcgaaacatgctttagtgcggataatgattatatttggcttgaggaatgaccctgatcggctatcttttctgttattgtaaacggctctctttaatttataataacagattctttctcaaaaaataaaaatttcttcagatattttgattgtacaattttagggttttgatgattgaagcagaggatgtagaatttgggttcccatttcagaatgaaaacaaattcgcagtgaatttctcaaaattccaattaatttaatgtcagacgatagatggatgaggcttctcgacaatcaattgctctccgaggtatggacgagacattctcaatgagtttggttaattataggtgtgatatttgatttttcaagtttagattacacttgtcttcctctagaaatcttggttaatcactctaatagaaagaattaatggaaaatgatgacaagagagggtttggatttcttttatgtttctaaagcactctaacaaatcatggaatttttctctctggttgtctatatagattcattgccaaatgtacctcattttatgctcaagttttatgaccaatgtataaggaattaattattttcctttttgcaggcaaagctacagttttagaggatggaattgtggtttgtcttcaagtgactctcccaaatttaaatggtttgctgttgaaggtgggaatgaggtgacataaagatcacaaggataattgctcacactccattgatgtggaaatgttaagttgtaatctgcagaatggttgtaaaggtggctttgaatggctcttcctcattcatccattttgttgtatgttacagataaaaatgaacttgtgctgtgtatggattctactattgcaacactcatggcaaggtgggaatctggatccactttagtcttcaatttttctttcctgaccttaataagtatttcctacttaattacatattatagtatttctcttttttagactgaagatggaccatcttcttgtttcttctaatttttttttgtacattttgcagtttgtgaaacatgtaattaacctggatatgggatctagattcttattgttctagatttgtttgtatgcatttctagcacctataagacccccccttcccacctataagacctccatttcaaaaggaagtactcaatttccacacaaccacttgtatatattatatctcatgtctgaactctctttcat

SEQ ID NO: 48168 - DNA, 5860 bp, Cannabis sativa
  modified_base (1146)..(1151): a, c, t, g, unknown or other
  modified_base (3458)..(3459): a, c, t, g, unknown or other
  modified_base (4353)..(4353): a, c, t, g, unknown or other
  modified_base (5815)..(5828): a, c, t, g, unknown or other
caccactagtgtcctttagcatttttctaagaataaagagtaaaggaaaaaaaattatttattttgtttcaaaatttattatgatcatttaataaaaatgagtggttttggaacccaatgaaaagtaagtggctcacattttcaattcccaaactttcaaaaatggatgatagcatgatgtttattccaagaaaccacattccgacgactttgactcaagtcaataagaaaaaatcaaaataaaaaacataatagagtggggaatgggatggcttattaaacggttcgccgacgcttagagaactaacaaaatgggactctgagctttgtctgacttgacctcagtcgttgacatgacattaaattagttattagttattatcctcttcctagaaacttccaaatatataatgtttatatatagattgttattgctgcttaatttcgtattataatctcttatttattttttgcaaggagtattataatcatgtatactaactgagttgggagtgagtcatgcctcatacctaataccttagacttatggctatttataaattaagaacaaaataacttaaccaatattatttctttcttatacaaaaacgtttattaataaaactattatagagcttttttctatgcatgatttgcaaagtttgaacgatgactacgatgctttttcatcatgaaatataaaagtagacttttcaagtgtgaaagggaactctcggaggaaaaaaaaagtgttaaagggaactaaataataatttattaatctctacaatatgtgacgttctccaatataaattatataaatatttgtacatttatattatataaattgtagttatataacatattatttttcttttaaaacattgccgcttaaatttaaattcactaaatatatctttatcattgtttatattataatataaaaatatttttatattattatttaaaaaaaaatagaaaatagtgtataatatttttaagggttttttttatttttacacctctaaacattttttgttttgtatttttacggaattctttttagaaactcatattgcaattagtattgcaacctaaattgcaataaaaaattgtataggaattcctattgcaactagcgctgcnnnnnntttagaaactcaaaccgtaaatttcaaaaaaaaaaaaagttaaaaaatcagtatatgaagtaattcccctatttttaaaagattaaaactatagtaaaataaaaattataattaacaataaattttaaatattattatgtttttttatagataacacttaaattaaattttttttaataaaaactattgattattgaataacttaaaaaaactaattatatcactaaaaatatgtttaaatataataatactaatctagtgtatatatctattttatataaaacatgattatgtaacaaaattcaatttttttaattttctacgttaactttaacagaatatctcaattactaaatagaatattctttattaattttataatattattatatataattaaaaaataaaaattatataaatattttatataaaaaattaattatatatacatacattttaaaataaaaataataataattacataaatattttatatatataaattaatttaattatatttaaaaataaaaagtacattcatttataataatcacatctatatataaaatgtatatatatatacttaaaccttaatttcatgacatctttttattttaaaaatgattaatgatatgtatatgtttctcataatttgtacactttattataatcacactctcttaactacaaattaagaatatagtatctatcactatcattatttttttaaaataaatttttagacataatatataaaaatatattttgaaagtaattaattctctaatcaaactcaattttgttaaaatatttttaatataatcttatattagagaaatattaatataaaatacctataacaattaaattcattcttttatatatataatcacatctaaaaagtacatctgcaatagttaaaaaaaaatctcaaaaattaaaatctcaaatcttattttaaaaattaaaaaatatgtattacacgtatttattttaaaaattaaaaaaaaattaaatatatatattatacttaacattacttaatcaaaaaaattaattataggtacgtaacataaaccttagtgtatatatatgcacaacaactgtcttgtttgattgaaagtctaaaataagaaataaaaatttgttgatgtcacctaactactaactagcgacaacctttgtataatgtatagaatttcatcgtcaatgttttctcgccattaatattgttctcttaatgaaagtttcatgttgatatttttcttaaaaaaacaaaatagcgtgagcaatgtttatttttaaaaaagtaactgtgcgatgaatgtcgacctttttcaaagaaaagaaaaaaaaaacatatatctttcgttataattatttacaattatttataaagttttgagaaaaatttaaataattaatagtatcaaaaataaaatataaacaattataaaccattcgtataaaagaatttacatatggaataaaatatttaaattttatttttagtattataaattattttaaattttttaaaatttacaaaaagattgtaaattattgtaaaaaaaaaaaaaatagattcaaaaactcttttaaataaaaaaataataaaaagtgtacccaaacacatctcaacatttagatggtgtcctataaatttttccctgatttgtatgcatcactatacttcctttttcttttcaatcacttttttatcctaaaaacaaaagccttttccttttctttgtcctttccagctaaaaaaataaaaaattgttcccttcctaactttacttttaagctttcacaccacaactattaatcaatttaggtatacaaaatatatatttgcttatcataaaatattattattaatagaaaaaataataatttagacattgttaataggtgattttttcttaaataatactttaaatttaataatttacaaaatagatcaaattggtaacttatataatagataatagtttgatcataaaatttgagttcaaaatataaaattatatatactttcaaattcataagatatccaataaatattattaaaaaaatagagtatcaagtctctatatattgataaaacaaaactagcatataagtattaaacttcttatattatttgagcatttaacatgtgtgtacattacatatattacatatatagggagacgattttatcttgtaatgtatttttatgaaatgtatttcgtgatgtacggcaaccattagataggggagttatttaatctgagggctggagttgatctaggggtaattagnnttaaaaaatagtaacgtaccctgagactcatctaatgtaccctgagacccattaaatgtactacgaatacattctgtgaaagtacatcacaggacaaaatcgtacatatataatgtataatattatgtaattatatatgatatcttcattatattatttaattattttattattataaaacagtatgtaatcagagtagcctagcctaacaaaagaaatgaaaaataaaaaatactttttgattaatgaaagggaaagcaaacaatacattgattagttaccatgcatctatgtatgaaaaagtttttacctattaaatatggtataatataaacaaaagagagaacccgaaattactaacaaatcaaaagctcttgaaattttgaggtgcagtttcatgctttatatgttcacggcatcatgtttgacttcattatatttatgttttgtttccaaaaaaaccaacatatgaactttttctttgggtttattataattttttttaacagattattgaatttaagatttttttttgagtaatttacggcataaatacataagtttaactctcagtgtaaataaatacttaagtttaatttttagcggtaataatacgtacctaagttataattctgaaacttttgtaagtacctgacagttaattgttaagtaaattgccacgtgacaattcctaattggtccaagtcattaaatttttattttaaaaaaaattaattaaaatatatcaataagaaaatgacacgtgaataatgatttaatatttcaacggttaggtacctacagagttccaaaaatataacataggtattactaccgctaaaaattaaacttaagtatttatttgtaactaggaattaaacttaagtatttatnccgcaaattactctttttttttttcaattttactaacaacgcttaatgtgacgattgtccatgtattatattatatatttaaatttttacatgtaccaaataatactctgaacatatgttcgtcaagcgtaagttagtaaaaaataaaattggacaaaaatctaataatttcaatagttaaaaatttttaacaacttcaaaaatttgaaagacatatatgtgttctggtgaaaaaaatctttacattttcttttggtcagaaaaacatataattaactttttatttagtattaatgattacaactatatacatatatttttgaataaaattacaaaaacatatttttgtaatcaaagaaatgactattaataatcaggccaatatttcccccaataatcgaaatgaagtgtcggttagcaccatgataaagagataaatcaaatttggtaaataaagaaaaacaaataataaaaaaataagttaataaattatcttgattgggaattaatttaatgcaacatatcatcatgtcttcattatagtatatcatcaaaagaaaaagagaaagtctttatctaaaaaaaaaaaaggtgaatatgaaatcatacaaactaattaatggatgatgataatgaggacacatgagatagatagatatatatagagagaagatatgataaagttacctggtgttgtagattttgagagcgaaacaaggacaaaaagagttctaacaggccagcgtggatcataacaggctgccgatcaccgtcacagtcagtgtcaacgtcaccgtcacggcgactgagaagtggtccaaaaacaacgtcgcctgctatctccaaaggaaccaaacgagcccagttggggtcggcgatggcttgccccgtttgaattgaggagaaggccaaatatcccacgtcgcctttttgttctattacgatacccatcggcgaaaacgacgctgcttcgcatagcctccacgactccctcaccaatggcgtcgacgccaagaatatcgccaccatctcactcgtctcaaacctgcaaatataataattattaattatttcttttctgtatatatatatttatatatatagctagtacataaatttgaaagtaaaagttttgaattcaataaagttagtcaagtacaaagttgggactatcatgaaacttacgctgaagcttcggcttccatgggagttattagaaaatgccactcttctcttgactcttgatcgttttttggtggatttgaaccgttctaataagtctcgatgtgtatgtctatcttcatattaatatactagtggtggtcacaatcataaaaataaattaacaaaataaaacaaaataaaaaatttaattggaataagtgattttataattaggagagttctatttgcacccaacttataaatacaccctattattaaaaaaaaaatataaacttannnnnnnnnnnnnnattactcttaatatttttttgaaattttttct

SEQ ID NO: 48169 - DNA, 1756 bp, Cannabis sativa
  modified_base (452)..(453): a, c, t, g, unknown or other
aaattaaaaaaaaaattgaaataagcacatttactaacatagtcttatgatttagggtcatttgctatatttttttgaaaagaggacataaactaacatactcctatgatttggggccatttactataatttccctaaaacttatttgaaaaacatttttgttaacttttacaattaccctatgtttggtagagtggaaaaattgaaggaaagaaaagttaagtggagagatggtaaaaatgagtgtgtttggtattagagaaaaatagatggaagagaaaaatagaaaggaaaaaagggaaaattaaatctagataaatacttttgtaaataattatagttataaatgtgatgttttgtaacattattgtttttcaatttttgaattgcaaaattgaattttacttttgaaaataaaaatgtgttctataaatatattttttattattatnntttttttttaaaaaaaaagtgtattatataactatttactgtatttttcaaaaaactacttattaaatataaaagttaaataaaatataatttagagagaaatatataaagaatgcacttagagtttttgtgtggttggggcgttagcaagtcttagtccatgagtcaatattattaagtattttgctaaaaaaaacttagagaattacaataagtatgggcacaatattctttgctttaagtaagtatgccaagaatttccaactctttgcatgaatgatttaatgagtatttatagtgttatataggtcatattagttacattttccctctaattgggagtttacaaatgatatattagcccggcccataagacaccttatgtatgctcacgtggaggccttatcatcacgaagttaaatgttcataccgttctatattcatggataattaatgatatattgattacctgatttctaattatctagtttccctttttagcaagatcttattctctgtccaaaattttggaaaaataatgttgagattttatatcctaaataaaatctattttaatataaacttatttactatcaatagaagattagaaattattagatttacatgtagatttcatgattattgttttaatatacaaattctattaaatttagaatatatagtactcacaattacagttttaatataatcttatttattattaataaagtattagaaatcattaagatgtacatgtagattttatgattatagttttattgtggacaatgtcccatatggaataaattgtagagaatttagccatatataagaacatgagctacttcactcattgccaattggttttgagatggaaccccataattcttaacaagttttaattatagtgatgtcaagtaattatgattatatgcttcaaactatttacaatgatatgtggaatgtcctttaaaagatgttagcaaattatactagtatctgatgtatttggctatacatcatactgaactgatattgatagtggagaagatataataaacttacagttagtcttttctaagttaaaaaacaagagctgtatcagttagaagtctcagcagtatcaagtggtggcattatccacaaaagagttagaatttatggccaccactgaggcatttaaagaggaaatatgcaaggtattttacaagagctgaagttgctcaaagacaaagggactatctattcggatagtttgtcatctattcatttatccaagaatctaatttaccacgagaatgtt

SEQ ID NO: 48170 - DNA, 655 bp, Cannabis sativa
aaaaaaaaaaatcttttttttattataattttttaatagtaaggcttggagttggtttagaattcgaaaatagttttacattttttaaaacttaaaatgcgggataatttttttttattagctgctgtgagtttttaaaagtttacgagttaaaaaaccaaaaatacaacttgaattactcaataaaaaattttaaaaaaatttaaaatcttttttttttttctccttttgaaaatcaaaattgttaaaagattatattgagtgaattataaagagtatagactagtctcgccacgactttatttttgtctcctaagaaagttatttgtgtatattgtagttcaagatttatctcttgactaaaataaaagaaattgatgtattttagtgtgataccgactctaaaatagcgttactaagttaagtcatgaaatttgaaataataggtcacactcatacaaagtgaacttaaacttccacgtggttagttgttagcttgaccaaacagtattattttatattttgaaaagaaactatgagatatctaagtttcaagatcataaagattgagaattgtttcatatgctcaatgaaattgactcgatacacactctaaggcggcgataagtgaacttaagcttccatgtggttagtt

SEQ ID NO: 48171 - DNA, 2433 bp, Cannabis sativa
  modified_base (1391)..(1391): a, c, t, g, unknown or other
aaactaagaaaactcacatctaaatttcacaaaatgacaaaataaattgactaaactaaaatgacaaaataaattgagtaaactaaaaaaactcacatctaaatctcacaaaatgacaaaataaaccaaaaaaaccttcacccatctttatatatatgtagatatatatttttttgaagaaaagcgtgcatgcattagattaacaaacgtcagacctcgcggtcattacaaaatatagtttcgggcatagaggagagaggcaaaacgccaaacctctgatgggaaaacgcccacttggccacattatgggccataaaattacattgtctactaacaaattcaaaagaacaaccagaaaataaaggggaggtgattttacaaaaagagacgtagttatcaatctcccaccgggaatcctgtccgttaagagcgttgatcaccactctcgaatcactttccaaaatagtttgaacattattttcgatactataaatataaactattcgtattttttaaaatttttacaagaaacataaatttatcaaaacaccgatcatagaaacataaacaatcatggaaggtatagaaaaacaattaagggtaccaaattactcttaatttttaagggagtactataaatttaccctaaaaaagataaaatgagatttaatcaatttttttttttaatttaagcgtttatatattacaatcatgcatactcgaactcataacttccaacacatacgcattctcttatggccacttgagctagcctcaaattactacaaataaaaattacaggaccattcacacttagttgctattaaaacagggcatccgattcaatctaaatatttttctcctcatttgatcaaatctaactttcataagagcactcccaatagatgaactaaaataactcaatctttaaattatagagaaaaaattataaaattgagcttctaacaagtgaggtaaaccttagctatttaacatatttttttagcttaatgaatagtgtttagttaaatgtagaaataactattcattgagttaaatatattttaatattattttctttaacttttttatatatgtgtgtaatattatatgaattattaatataaaatgaataaaatatattaaaattataatatttaaatgatatagagaaaaaataaagaagctgatgtatgatataatataaaaatttgagataaaatagataaaatagagttttaataatgtatttaaaaaaatagagtagagaaattgttaagagtactttaataatatatacaaccacttgagctaagtggtcataggtgggtgtgtgaatgttagaggttctgggttcgagtccgaactaaaacatgattgtaatatataancgcttaaatcaaaaaaaaaaataataataatatatacattttctatatgtgtattttttaatattatataaaggcattccttcaaaaaaaaaaaatatatattatataaaggcatgaaaattttgactttacagccgccattacataataatatatataataataataataatttgtatatagggagagaacacaagtatgcatgcttcttgggcaagtagaaatgaagaagacttttatgtaatgactttgatgtgtgaatacatacaaaaatcaaccttagaatattaaatgatagtatgaacctaaattttcttactctattattctattctattctattaaaaaattaataatattattattttagaataagaacattaactagatactctctctctcacacacaaattggcctaattgtctttaaatagtaagctcaattcacactacaaaaggaagaattagctccttttttttttcctaataaagagtaaattgtttaaagttattgttatttacttattttccccttataatttgtttattgtgaaatcattagtcattcaaattcatgagtactttgatcttaaaagaattaatggtacattaaactcttgtttgctcttacttaattttcactacatcttgactagaaatgtttttgtttgactacttaaaacttaaaaagataaggagatattctctaaaaacaaataaaaataatgtgaaaaatatactaaaggtgacgataaatactattttttcaacaaacaaaataaataaatattcaattctctcgttgaacaactcgaatccatttaagaagcaccaccaaaaacaagagagaagacgacttaattagtcgtcgagtgccaaaccaatccaatccaatctactaccgagacaatcatcgaacaaagctatcaaagctatcacgataccattttcatacaaaaatgagataacaagtgattaaaatatcatttctaggtgaataagcaccaaactccaaccaatcaaagagacaactaggggtgtt

SEQ ID NO: 48172 - DNA, 2387 bp, Cannabis sativa
tttgcttggtgttatttttttggatgatgtgtaggttgtttttcttgaacctgctgaagctcgtgcagcatttaaaggattggcatacaaacgttacaagtaagttaatatttgctttcttcatggattatttgttaaacctatacccattagtacctactcatgatcactattttatgcataaagttggagttttagatgatgttgtgctcttattgacaaacaagctaagtataattctttacctaccattgttttaatttctaggcaactgctgaagagcagttgttgggttagtcttggttttttgttacttttatgtttgacattggatctatatcttcacataacaaagcaatgtctttccctgtctttctatatttaaagatcaagacagggaatgaaaggaatagcagaatattcgaaggaaatgagagatcagcagaggatatgtgggagagcataagattttggacagtcacctgggtttttaaaactaagcattttgagaatttttcctttctagacttgtgtagggaatggaatgtgttgatgtaaataggatttatgacttgttacgctgcttacggagcttagtttattctagatatactttactttggtcaccaaggttttcctccgccacaagtgaggttattaatacataacgcccgcacgcgcttgagtctaagacaagtggcctctttctttttcaaaaaaaaaaaaaaaaattctaagatcaagacaaatgttgattagctagattcagaatgatcaactttggatttttaaataatccatgaatggaattcatctcacatcttgtcttggtagtgttgacatgaactatatatgtatccaattaccttttttcccctttatctacattagtaatttgtttctttttttgtttggtgtgtgtgtattaattgcaacacagggatgctccattatatctggaatgggctcctgctaatattcttagtcaaattccaacacccgagggagatgaaaagactagtgcggttgttggtgaacgtgatgtcaagagggctatcttagagcaacatgtagagggagtatcagatgtggatgctgatcctgatagagttgaggtgaggtgacttcaatattttttgcatttttttttcttctctttattctggaaatatgtttgttatataagtctcatcattcttcttgggtctaagtcaaaatgtggggctcacaactctttcacctcttcatttgacattagacacgattagtagcaaattcttgtattcatacactctttcccttgctctcttctcttattccctggccactctttatccccgtccccaccacaaacacacagacacacccggccccaattcatgaagctttcaacttggatgtatcatgtttgtcagagtagatccctcactctttccctggcttctattcttattcctccccaccacactcgcaccgcggcgcgcacactaccccaatccttgacttaattggaccatgtaaatttatttatgaagatcttttgccttaccaaatttataattagtttgtctcattcctttggtcactaaaatttggtgggtttggtggtatttatattattactccatttatttcatattttgttatcaaagctgttcaaatttcctttcaatgttaatgaatattaactagcctgtaattcaagctaaaccaagtacttgaaaaatatgacattttgttattagtacaatttgtatggctgtggaatttctgtaatcaactgtttgcttattcggtcatttcatggtcacatttttcagtcacgatctctctttgttaagaatctgaatttcaagacaactgaggagagtttgaagaagcattttatagatcacatgaagaaggggtcaattctaagtgtcaaggtaaccatctatacccctgaatatttaccatgaccaaaccaaatttattattttgtccatttgtgataagttttctatcctattactgcaggtaaagaagcatatgaaaaatggaaagaacgtctcaatgggctatggttttatagaatttgacaccatggagacggccacatgcgtggctagagatttacaggtaaaacacattttgcttcctcatagataacaagttggaaacatatcttaacacccgtatgaaattctgtgtagggaactattttggaaggacacgctctcacattgcagctctctcatgccaagaaagatggacaggctccaaaaaaactggagaaggataagagttccacaaagttgcttgtcaaaaatattgcttttgaggcaaccaaaaaagatatcaggcagctgtttagtccatttggccaggtgataactttgattactata

SEQ ID NO: 48173 - DNA, 891 bp, Cannabis sativa
aaggccctagataaagatttagcccacctaggcctatagccagccttacataggagtatggggcatccttgttaacacctagtaggtccattgacttttgagtcaatttgcaagtcattagaaattttgaacacagtctaaatgagaaaaaaaaaaaatagctcataagtagtattagctagatgtggctaaaggattttagattttagtggttcttttttaatttgtgaaatattcaagaaattaaattgtaggatgtgaatgagacttagaattatagcaagttggagtaggtcaagtcttcgttggttttcctaatattatatatgcttattgacaatgtcaccaaaaaaaacaaaaaaaaaccttgaatctttcatttctgatgactaattacattagagaaaaaataaagagaagaatttacaaatgaattattgaattattggcaatcatacaatttgaaagagaaagagcttcataatttaagaaaacaagttgttctttctaaatctttatgcctaattttctctttatctaaaaaagagacttaaactaaaatacactcttgtacttagattgagacttttgagagtttttaaagtttaaactacgtgcctacaacacctctctaaaaaatgtagttagtgttaagcttaggtttaattagttactctataaaagtacttaaaatgttcattaaattaatttgcttttatgttttgattgagatttgaactatctttttcatagtctttccacattaagatatcaactactacaacaagaaaagaatctcataccacagattacttcccttaacaaactaaccaaaaaaaaaaaataaagcactaaagataaagagccaaaaaaatcacataccttgaacat

SEQ ID NO: 48174 - DNA, 2660 bp, Cannabis sativa
aaagttaaaaattctgaaatttagtttgagaatgatttcagtataaaaaagaaaaagaaagcaaattttgaactgaaagtaaaatagcttcatatgtattatcacatgatgaatgattcagtctaagaaaacttaccaattcagatttaggagctacaaccatgagagtataaaaggggagaactgctactgttcccaagccaaaaacactatgagcaatttgagaatttgccaaccctacacaaataaaaaacaatcattttcatttgagcctaagacctttaatgaagtttgggacagtttcaaaatagatatataggagaaaaaaatcacaaatcaatggccaataattaatattgatgagcaacgataaggagatttctaacagaatatgccatctattcatatgcagaagatgtaagaaggtattttgcatattacaaggagggaaaccactgaatagctaacaagaaactattatcattttagtcatacccctgaagggaagatttagtaaaaaaaaggagtgagaatttatatgattcttttgtctgcaagtggagctgttcactctattatggaacattaaacttaatgaactttcttttacctgtagcaattgaattataaaaaaaaaaagaaactaacagtctaaaccaaagaaagcattttataagattgaaaagcttgaaatggaaagaaggatcacatgaggcattaattccagagactttgtgatatagaacaaatctctcaggtttaggtctaacaataactcttgatcctcctttgaaactccaatccccatgtaagtgagccctctttgtgacaacttgttggccaaagagtttagtgctattacttcggagtgaaagagcaaacctttgatccactctatcattatgccagggttttatacgcttttccaagatgtcaatctaaaagaaatgaagcactgaatatgagaaagtttcctgatctcagaaagatacaccaactttcttatgttaatatactacataaagaggaataaatatcatgtgattgttatgtaacgttttcaggttcccttccttcctggtgtctcatatttattttaataagaagttaccttagattatcaatatagattagatgcaacaaatgacactatatatctagaatgagggaatttgaagttaggtggactggtgaagtcaaacatttactttgttctaggacattcaggtaaggccatacgcattacagagtctaaagtgttaaaagcgaaattcacaatgactttaattatagaatgaaaagaaattaagtaaaaaggtccatttctggaaaagcttgatctttatggtattgctgggagacctgattatgatttagaaattggaattcagtgagaacacatccaagtttctttttggctgagtgaagaagagctcacataaactcaagaatacaactagaaattaagtatatcagtcccttactagtaatccaaatccatattaccatttatatggcctgtgtaatccttgataattgcttaaatgtatttaatagctaactgtgtttccttaaatatagtattaattgtttgactccaagaaggtttccgtttgttttctcctctctttccgaatgaaagaaagggagatccaataaatatgattaaacaaaaacaatgcaggcgtactcgaatttacataaagccaaccaatctcagatctctcacagaagtctgatctcaaacagaaacactaatactaataattgcatataaaaagagctctcaaatgagaattatgggacatcagaatatttatttcatgcaatgggaaaaacccatttgaccaatcaaaacgagtgttaaaatgaaactgaataaacggttatggaggtcccatattcataaaccaaaatgaccattaaccgataaccgagtagtcaaaaagaaattgaagaaagaagataccttggaagagattgaagagtggccaatgcagaaagaggtcatattcagagcaagagtaagaaaccaactattaagcagaggaatatggtatctgtatccttcatttacaagtcgctaatatagtatgatagagaagaacatagcaaaagagtttgccactgggaagttagcactgcagacattgacacacacaacttaaagaaagataaagagagaagcaaaaggtagagcaatgaagggtaataccgcactcaactcaaagagagagagagagagctttacaagtttgcctaaatcaagcgaataacgacacaaaccatcttctccttccacttggatggattgtttctttttatgttttaaaacatctgttcaattcaagactcaagtgaagcgaacccaccaattttgatggatgccaacctcagcccccccctttttttttaataataatgaatcattaataattttacaatctcaattttcgacaatagtaattcttttttttaaaatattaagaattcttagaatttttacatttataaaaatttagttcttttgttatgttctatcacattattcagtttaaatacggatgtgtttttgtaatttagcatcattactcttaaatttgaccattatcaaatcgtaccctctcaaaataaaaatgagaaaaattcaacattttttt

SEQ ID NO: 48175 - DNA, 2007 bp, Cannabis sativa
  modified_base (65)..(69): a, c, t, g, unknown or other
atagtttagtatataaataatcactgaaatagtaaaatttaatgaaattagacaaaagtccttannnnnaacaatctcaatagttcagtgagaatttttaacgaggagaaaaatttaagagacataatttagtacatgttaaagtttaggggtaaaaatcctaattagtcatttgattttattgaaaagggaaaaaattatttgtcaataaaatgcatttaaaaaatattatgtcaataaaattatttataagcatattttttttagtagaagaaactaacattaattataaaaatctatcattaattttgttaaagtgtgggtcacactattaacacttttttttttggaaacacactattaataatttaaagacaatatattttaaaaaatattaataaaataattataataagcaagaatacctttcataatatacttaagttaagtaagactgaacaaataatggcattgataacataaagaaatttagaatctaacaactttttttaagccaagatgacacgtaagtaagttccagaagtaaatacccaaagcctcaacaacattataacgatacccatggtaggtacccataagagtagacatccaaataaaagagaagttttcatttataagcttattttaatagaattacatttgacaaaaagggaattcaagttaaaatttccttttcctaactttttgacaatatgtgcaatgtaatgcattaattgagtgatccatttttattcatgctctttagagctgatgattgatgattgataagtgaacttgattttcgatggaaaatgatagcgtgtcaataaaaaagttctagtaaagctaatctcgtttgacgtgaacttgtgagaagaaacaactgagacagggtctagtctcatactacgccttgtataatcaaaagaataagcaggactgaaaaaaattcatactggtcgtgcatgtactgattatatgtgttgaccaagcaagtctctcctgcgactagtaaagatcgtttcttcacatatatttagtccgattgactaatgtgttcgacaacttgttgggaactcacatgtttcacgttgtcgacacatagaatgtctaactatgcgatcaaagatgaacacagaaatttagataataggcccaaaggtcatctcttgcgagtaagcgggcaactcgcggcttatcaagtcgcatacgttgttgcacttaattcaagaacgaatgaaaatgttcttcatttattccttaaacatttactttgagtaaatactgttatttattgtaaaaacgattctaaattaatcagatgtgtaagtctaaaaggtacttattttttatataaatgagtgatctaaattaaataaattaagtcgaaattattgcaaaagtagaccaagttctgactgaaccactataatcctcttattttctctttatattcttgctttcgttttgtctatttgatatactataattcgagtattcgccactctatgtgaatactcgcatatctgcaattgagtgttccaattttctttaaatattcaagtaaatttagtattttttaaatttcttcgacaacataattttttttttttgaaataaattgctctttattaatttaaatcatccaaaactaaagatgccacagcaagaggaatgtcccaactgtaaatacaatcagcatgaaaacccaaagcacactctaaagcgtgagctacatgatttgttaaacgtttaacaaaacataaagaaattgacataagttcatcaagtaacgccttgcaattcgcaagaatatagccataacgagaggctatatgtttaaaacaattgagatcattaacaagcaaaaggcaatcgacttcgacaataacatttgaccaagcataacatttaatccaactcaaagcttctttgaggtcaataacttccactatcgtaggctaaaatcttccaggacagctcatttggactgcttccaatgccgca

SEQ ID NO: 48176 - DNA, 1507 bp, Cannabis sativa
aagctaattccttcatataatatcaaaatttttcaatattgccaatggtaataaataaaaaatatccttaaaatatactaatttttataggtgagttgtctaatatattctcaccatccacttaagcttaaaataaataaaataaagtaaatgtaaaatgtaattttctaaaaagaataaattttaaaaggaaacttaattattggaatgcttaatagaccgaaatttgctttttttgtaattaaactcttcattttctaaaactactttgacacacattactccttaactaattaataattttcaccaactaccaatacaaagacaattatttaattataatcaatataagactaataaagttaaacaacaaatacatatccaaaatgattttcttcgaagttataagcatttaattaattaacacagaattaacatataaatataatatctagaaaaacctataatcaagaaacagtgacttttcttgattcttggtagtagtcatcatccctgcaagtgcttctagtcttccgccaatatctgtaatacatgtactgtaggattatctgtaaatttgttgtgttaaggaaaattactgtttaattaatattaattatagctcattaattaggaataattaattaagcttattagcaactaatattaataataataatgaggaggaggatacaaataagtctagtgccacgcagactatagcatccagtaaccaaggcatgttggctttgattttaccccattcagtgcttcttacaagaatgctgcaaaaaatatacaattattaatatataattaattaattaattaattagttaggactaattaattcattgaatttatattaaggaaattaagcaatgataataaccttcccacgtatgtggcatttgcgattagtgcgaagatgaacatgagtggattcaacccctgaattaatgtacatatatatgtattatgaagtagtatcaaaatcaaataaattaataagatgatgattatcaaaacaaatgatatatatatacctccacgcttcctcttttaatctgtaatgaaaaataaaaatagaaattaaattcaatgaaacaaaatgtaaattataagagttctaacacaaattaatcacacttgaattaaagatggttactatgttgtgggctcaggtttcatattttaaaatttatttgcaaaaatattacttttgtagaattatattgaaaaataccataattatgtagaagaagagtacttacgtttaaccatatctgagggattcgaccacccatatatatagcagccatcatccaccccaaccattgcccatatacactatgtccctctactgcattttcttgctataaatataaaattaaaaaaaaaacaatgataagaaagatctatatatatatatatatagatataatgtagcaaaattaaatccaatgatacatacatggagtaagagttttcttgcagccactcctat

SEQ ID NO: 48177 - DNA, 1726 bp, Cannabis sativa
  modified_base (41)..(43): a, c, t, g, unknown or other
gtgggattgcacagcttactcggtatttccccttacggatnnngggactactgactgtcacacccacccccgattccaacctccctggagccgactaaaataaaatcaataaatgaaaatgatatttacagaatacacttttatttttttgtttttaaaattgaaaaacaaaagtagttatagatcacatttttgtttctcaaaaataaaattttaaaaataaaaatttgacttttatttttgtgattaaaaaatttagaaacaaaaaatattaccaaccgcaccatagaaaattgaccaacacctgcttgctagattgacgatatgagatatgagttaagtaattaataagagagatacacaagatttatagtagttcactcctcgtgtcgcgacgattatgaagctacgtctactttgagtttttatttttttacgagaattacaagagaattgactaaggaaagctcagattactagagagaggaaatagagagagattctttaaccttgtagggacttttttgaatgtgtaaaatgagctagtcatggagctctccttttgtcgtcattgataatggcgtcattgatacatagttttcttgtagtgaaaccttaagaccccaaacgaaagatggtctggaagaccatcagatttgttacacttaagagtgtttggtgttggagcatatgcacactaaagtatatggaagttagagctagggccataaaatgtgtcttccttgtttaccgtaaatgtgtcaaaggctataggctttgggtaagagatcaagggagtttcaaaatcataataaacagagctgtaatttttcatgaaactgattttccttgcttgaaaggcactaaaattggtgtgaaggatgccaaacaccatctacctccactttaggtatgatattgtccgctttgaggctaaaccctcaaggttttgttcttgggcacgtttccaaaatgcctcatatgaatagagatatgtccatatccttatatatccatgatccttcccatttctagccaatgtggaactttgtttgcattcccaacaatcatcccctcaaacataggagcacatggcctttcctcaaatgatcttccatcttgcaccgctgctatcaccaaatagaacacgccacctgaccttcattgctaggaagactttcaacacaaggcaccaaataagatctccaatatgtccactctccaccaactagtgtacttttctctaatgtgttagaaggcacaccttacatggagccccaccactacctcgagagtttgctgctcattactaggccaactccaaacagaatcagagtatatcgcctaactgagcacatccatggacatcatgagagtacactaaggcacatcaccttaagaggattcagatgattcatttgcatggataatgttgggatctggctctcataccacttgtcaaggacgtcaaacaccaacatttccactcaaagtatgatattatttgctttaggcctaaggcctcaaagttttgttcttgggaacctttctaaaaaacctcatactaataaagatatgtccatccttatatatccatgatcctttctatttctagctaatgtgggactttgttcgcattcccaaaaattggaactttaggacattctagtactaataacacatcagatacaacccaaggcatatcaacacaacaagtggagataga

SEQ ID NO: 48178 - DNA, 1698 bp, Cannabis sativa
tatatatacattttatgtacctgaaatccttgaagaggagtgtcatagtgaagtggatggttgatcctttgcttgataatttcccttaggtgagtggcataagcactcatgaaattgacacttttggggcgataagtgagcattgtggagaccttggtgagcctattcgcatatttacgtgcagctttctcacatatctcctcaacttggggtgaacttagtccacctttctttgtaaaaaacttcagcccatttcttgtgtatggtaagtgtgatgccgtcatctgcatatacataattcacataagataaatgttaggggacactttacttaattaaggtttcaaaggaaaatggtacctataaatgtgtactaatgtagtagcaataattttaccataatagaagcatcaaaggaaaatggaagcaacactgtgctcatgaagcaagcgggagttgtcgcgagtcccatgtcaaacgtcgcacaacccgcgcgcgacagccccgcgaacaccgcgccacttaacaaaggtcctgttactctcgggtcttttccaagcgacactttaacaacttcatcgctactattactattactattactattaccattactattactgttactactctgcttcaacattgccaccacccactccccaaaactctccgaaattgcctcaaccgcggccggggtcaaatccacggcccgccccttctctccttccaacgccacacctcgaacatccgacccgttttgcagcctccgaattttatccatctcttcatcaacgacaacaacttcattgtcgtttaacttggctttaacactatagttactagtagaataataagattttgatgaacaaataatgggatttttaatgaatagatgggaagagaatgaaatgtaattgctgctgaggtttttggtcttggatggtattttcttttgggctctgaaattttggggagaaattgaagttgaagtcgttgaagccataattttgaattacgatgtcgttttgtatatttttctctgtttctatttatattggcgcccttttggttactagttacgttttctaatttgttacttaaaaaatggagagtgtttttagaccaaccaaaatttggagcttgggaaagataagatatcataggttgaagtagatactaaccatgaatttcatcataacaaaatatctatgaacaaaattccaaatgctcatatatatatattttttttttaattttaactcttggttgttttctgaactttgtatttgtttttgtttttattttctctttgaaaattgaaagggatgtctcaaaatagatttaagttatataacttaagcaaaaatatgtaatatagcaatagttttggcaaagttaattatgattaatttgtttaaaattttagaggttgaattagatacgtaataatgtttttgtttgttagttctggaaatagatattttgattcaacacatgttttcagtttaataccttccacgctgaatttttttgggctcaccttttaaaagctgtttttgagttttggaacatgttacttttgtttataattagaagtataaaataaatataaattttaatttatttttactgtttagatataaaaatgtaaaaatataaaaaaaatatttaaatttaaaaatgtaaaaaatttacaaa

SEQ ID NO: 48179 - DNA, 2056 bp, Cannabis sativa
gcaattacaaaagatttgagggtactaggaagagtactcttcgagaaactacgattagaccaataacaagagccacgagccaaacaatgagcgaccttattaagagatcgcttaacatgacaaatagtaacattaatcaaagaagataataaaattttgcaatcttgtacaataatccaaaataacgatggcatatccatttgactttgtaaagtttgaatagcagtaaggcagtctgtctcaataataatatttgacaaattggacgcctctatccagcttaacacttctttgatgctgatcatttcagcaatgggagcacttgatgaactggttgaataggttgaagaggccaaaatgacagctccattagaatcacgagcaataaaacccgtcccgaaagaattgtcggcttcaaacgttgcgccatccacattaatcttgatcattccatcatctggttttgtctgctacaattcgagcgtaaatgcagcagttcaaagcgacaactttgagcaaacttccattgaccaagagcttgatgtgtcgtagaagcaacttccgcaaccgagcttgtacgattattccaaacaagattattgcgagctttccaatttatttataggaaagttttatatgcattgcgtataattttttttttatgaatcagatagtttttcattactccaaaaatatctttacaatcaaataatgctttcaattgaagacctacaatatagtcactgtatagttatgtcttctatctcttctctttttttttttactatatttccaattacaacttgaaaaaacaacttgtatctataacatttactttcttcgaccaaacacagctaattctagctttaacattatttttagtcttatttacaatttgagtttccctgtccttactcgaattctacacaatctcatttcaagctcgccaaagttgataaaccaatgctgccattgcagcagcaaaaacctgcttgcgaaacctgctgcattttgcttttcctatccaccgaattagtttgtacagctgattcaattcaaccctccaagacaaccatattttcacatgttgaagaaatttgaaagacaaagaacattgaaaaaaaatgtgctgagctgtgtcaatatgtgtgttgcagaaaatacattttgcatcagcaataatgtaaaattttagcaatctatcatttgttctcaacctattttgtatcgatatccaaagcacaaaactatgcttagggacattgagtcttccccacacttcctagctccaataaactctattttggtttggacatagcaacttatatcctttagaaatttgatatttctccccaaaaaattgttgtgttgcagcaaattttttgaattgatctttgatagcaatcaatcttctcaataccaactaccatgggaaagaggttgctaattccaccaatttttatctttgatatatacactatgtaccctacgaacccataggttttcctcctttttggtcactgcccaaacatatttgaaaagggttgcaatattccactttgaaatcttcttaaaatcagcacctccatccatcttaggttaacaatctgaatcccaagcaataagtttccaaaggtaagcacgacaaatagcttctattttattaattactttctttgaaaaaaatcataatttgaatccaataaaaatgaatagaaagcatatcgaattaataagaacaattcgtcccacaaaagataaattcctagaactttaagctttgattctagtagtcattttctcagctaattaatatcaaacactccttgcttgatatccttttagaacatataggaattccaaggtacctgaatgtcatttctttcttgttgaatcctggcgcatcaacaatgtgttgtacttatcatatgtcactaacgaccgtacttacgtccagtatgtcgccaagctaaatcacatcacctaatcaggtgagcccgtacctacactcggtactcatcataaatcactgacgctcgtacttacgccaagtacg

SEQ ID NO: 48180 - DNA, 1233 bp, Cannabis sativa
ttttaaaaaaaaaatattaagttttactttagtttgtcccccccccccccccctctcagattaattcctggctccgtccttgaatataatataacaataattttttaaaagaaaactaatgaatgagaattggacagccaccttatttatcgcgtgtgtgtactagtattagtcgctatatatagcttttagtatataaatatttgtatctaggaaatataaccgcgttttgcgcggtccgatgaaaaaaaaataatttaatttgtgattattttaaagtttaatttttttcctatatttttaaggtgaatttcatataatgtaattgttataatatcaataagataaaaaaattaaattgtaaaaaaaaaatgtagaattaatttaaatataatatttttataattaatattatgtagattcatttaaaaaaattaattaattattaatattaatagacattgttattgttgagagctatatattttaaaaattagaataatatatgagaaaataattatcatatttttaaattaccaaatttagagttatatattctattaaatgtgatactaatataaatatatatatatatcagaattttttttatatacttttcattaaaaaaatcatcaaaatttatatagaattgaatgctagaagaataaaatcttctctcccatcttttatactcactattataaaagtatataaatttattattaagtttatttaattaattagtatctataaacttagtaataatttatttatttattatttaattttttgaaaaggggcaatgattttttttatttattacatatttatcacatatatattataattatatcaataaattattggttagttataataaaaataaaggtgcaaactaaaaataaattgatataattcacacttaatagtaaattatttagattagttattttttaaaaaaaaaaaaaaaaaagtattatccattttgtgtaaattaataaacaacaatattatatagatatctatatacatttattcaatttattaataatgaaagagaaaaatatataataattttttcagtgcataatttttaatatattcattaaaagagttacttatataattaaaaggctaattagtactttttctcccgaattttgacatgtactaaatcgtgcaccctgaattttttttgccgttaaaaattcctctcgaactattgagattgtt

SEQ ID NO: 48181 - DNA, 1461 bp, Cannabis sativa
  modified_base (1252)..(1262): a, c, t, g, unknown or other
  modified_base (1406)..(1419): a, c, t, g, unknown or other
tgtcctacggtggccgccgatgtcgatgtttttccagcatgagcggcaattttagggaataggttgaggggagtaatggtagtacatcccactcctccgttgatggtgttgacaggtgttgttccattaccagggagtggaacattcattgttccgacattgaatgatccagtgttgttgttgttatctccattcgtctagtttcctgccatgatgattttccaccaaaatcaacagaaaatttctttcccacaaacggcgccaaatgttgttggagaaatttagacaactccaaataaaataatatattaaaatataaacagaattgcgcgagtactcaacctagaatgacgagtattcaaactattgatatatggacgtgctggaaatatagagaacagaaagagatgatagttgttcaatcagatcacgatctgcttagtccactgttgcaagggttttctgtcctgtccatttcatttcggatcactcttttatattcaaagcaagtgtccctttgattacacagagattgattttattatcaatctgtttgtacattaaatataacatttaaatcaacaaaaatgtaaatataataaatgatgaacaatttcggcctaattaactaaatacgacaatgtatgcgacttccatggtacgatttatctattcatattctcgcataagctcgcaggctcaaggtcacatcatcccactgagtctggttcatgcgaggtttatactcaagaggtctcctactgacatctcagcccttgttgaggagagtgagtccatgtgtcatttttatgcgagcgtggtctcgagtttctaggtgagaaattctcactataacaggactcatatgtctccacgatttagaatactcatggacattatcgggcagaacttgtagtgcgtctaagaatgctgttagaggttaacaggtacattttcactagcttgccggtgtgctgcttgtacgggacgtggcctaaacctctaagagatgtggtgtgccttggccaggagtctcaacacgagatgacacgggtagtcattcgtgggctagtttacatgcgtgcatgggtcggatgcaccatgctggaatgagacagaggtctaacgtatgctactagtttggtggcttctcttgagggcctgccaacatgcgtggaggcatggcactttgagcattggttcatggacgtatgggagtccttgggcgatgagggagactgtttggacagtnnnnnnnnnnncatgatagaagtgttggcacgtcagcttattgttggcatcttgcctcacatgctaccttggccacgagtgagttggtgagcgtcagtgttgggatttgtctaatcatcctgagaacctatggtgtaaagcccgcttagtttaannnnnnnnnnnnnngttaattatgattaattatggaaattatttatagctatttaa

SEQ ID NO: 48182 - DNA, 653 bp, Cannabis sativa
ctctctctctctctctcaatttggcagatgtaaagatgaggagcctctgctacgaatgcaaggataccaagtgtcaaaggagaaagcaaaatctttgggagttaattacacacctttggaagtgactctaaaagacactgttgaaagcttgaaggaaaaaggctttctcaaactgtgattgaagttattacaaataatgaaatagatcttatcactggggatccactggttcccagctttatgtaataaactaggtacattttaaggattcaagccgcctaattttctacatccttaacttgtatcttttgtgaattgcatgttcttgtattatttcttattggatcattgcatcaaaataaaatgaattaacaatcaacataagtactgttgataaatgtaaaattaagttattttatgtcataagttcactatgtctggtgacaagcaataacatcaattttccgatcaagtgaatctaaaagtttacgatgatggagtattttgccagccacgttaatcattttttttctttcttttttccctaatgatgtttcttagaaagtgtaacgttcctgcttcaagcttctattgggtccttacacccacggaatgaatgactcttatacacgagtacgtcactttagctgctt

SEQ ID NO: 48183 - DNA, 1899 bp, Cannabis sativa
  modified_base (1316)..(1316): a, c, t, g, unknown or other
actgctctaaatgaacactctcgcagcgggtcatcccgagatgattagagttcattccagaagcttcactagagttaccttcatgtctgtggtgaggatcctcagttggcatcccgctgaactgccccacggtttggagcatttgaaacatcactggcttgagctcaaactgtggttcttgtattttaggcctcacaatgcctagattgagctcattaaacatgggagtagcatattcccgtgtagcccttgctcgatcatctgctaatatgatgggattaacaatctgttgggcaatcccatcatcatcaagattctcagccatgatgtctcggcccttagccttttgaacccttcttcttctttgaaatgtgcgttcaatcttggggtcaataggagcaagttcaaagtcctcttgttggttcatacactatagatacctgagatttcaaagaacaaaccagcaagattgaaaacaaaaaaattagaatgtcaattagttgataaaaaagaatttagaaattaaagtccccgacaatggcgccaaaaacttgttgtgaaaattatattgatttataattgcgcaagtatacacaatcacaaacaagtaatacaatgataagtaagcaaagttcgtattcacagggacttttacactaaatattgcaaatcaactaaaatcaatttaaaattttcaaagaaaaagaaagcaaaataactaatcaattcaagagaaaatttttttaaccttaattctagagttgagaaataatattttaagctaaataaactgaaattaagaagccaaaagtgattaaagtggtgataatttcaaatttagaaaatagacttgggtggttaattacccactagtatgttccagttgatacaacaatgactcagcaatggcttagcaatcctggcagagttcacagatttcaagaaaaaccaggacgcttttttcaaaacttgcaatataccattcataacctcaacaatgcattcctacaccagatcagatcacaaatagtccaatataacatcaaatctttagttatgcaaggtagcaaaatatgcctatttcactactaatcaatacctaaaagagaggtaaaaatcatgcaccaattagatgggttcaactaggtcttacttttccaagtaagatctagcttactaaatgttaaagctcgccaaaaattaacattcactcaaaatttcatcacatctaattgaacaaagataggattactcaatcattgcaaatcataacactagttcatacaagggttcataaccactcaaatctcaaagantttagttcatatctgaaattaaaacttaaaaccagaaaataacatgttcatggagttaaagagaatctcaaagagtaacaaatgatacaaaatggaagaggagagcaagagaaatgagttggcgagctcaaatcttctctattgaggttgccttcttcttagtcttctttgtattctcttccttttcttttttttttcttttctgtaattttcgtactgcctcctttctcaaagtgcagccaccatttcctatatcctttttttcttggctgcctcccaattagggtactaaagtttaccctatttggaaatccaagtcatggtccacttgcccttctttttccacatatttgctgagtcattgtacacatttttgccacataagcatcatttatttttcattcacgccaactggaatttttgccacaatacacttactgggctggccaattgctacgcgataattgctatagcaatgacagtcagcaacaagcctgaacctgctcttttttcttcttgtcccaaatatttcccaatacccatttcagcccttttcctacttaatacacacaaaaacagcaac

SEQ ID NO: 48184 - DNA, 1885 bp, Cannabis sativa
tccacagagacaattaatactttgccctggctgcggggcttttagtagtggaataggatctttcttttttgatattccttgcttggagacttgttgtgatagactatctaagggctggctgcgttactgaagcacctcgttgcaacgaccagtgtttcaacccttttctttttagtcttgattatctcttggttaatttaggaattgctcttcaatttgacccttttcttggtgttgtgatgcttttttgatttaccaccggaaatgttgtttgcttggccagaagacgaccccttttttttgaaacagtgtctttcacaatttcctacatcttcttcaaggtctacttccttcataaggtcacgtcccgggggtgatgtccacaattgccttagactttaacattttctttacttcggtccttgtcagtctttcattctggcttgccatgcaactcgatgggctaagttttcgtgaattccgtggagacgtgtaaaaagggatttaggcacatcttttctttttcaaaatagttttggctggacgtgcttcttatctccgggttcacttcttaagtttagcttttgagggaagatctcaagcgtatttctctcgaggggactttaattgagaacgtttctcatttttttttgcatgtatactttttggtgccgaatgactttggcaaatggacgtaagatgttgtagtcatcagcaatcgagcatatcatacccaacaaatgagctgggaattttggacccagattctcggtcatatgctcagagtttaacgtgtgtccccatctctaaggagttcaacgtagcttctccttgtttgaagaagtacattgcccttttgggttagtttcttagaggtgcacaaccacctgcagggtccgggaagggaaacatggggttctgggcaagaatatggttgtatgtcccaacagtctccacatggtgtcaaaccagcaagggagattctaggcctctttgggcatgggggaccattggtttcctggagggaaagctagacctgcgcctgcgcacaatgatctcccttcagttgggatatgtttaggcgaagatcgtgtcgaatcacatgcatggcaacaaactttcagctttcactaagaatggctaaaagtgcgtatggagtttgatcctgcaaacgcctaagggtttagtactgttgggttcgtgaaagtcgtgctaaattttatgggacaagcttcggcttcgaagcatgaaggctaaagttgtgtaaaaattgtagcttagacttcgcttgaaaagatcaaagggaaagcatcacggaaggtaggatagacatcaagcagtccttccaatctaggaaggagagttaaagacgtatcgtacccctagtgatctttcttgcacaaaaacgacgtgcatgcaagagtcatgttgaatttttatgtaacaatctatgttgcatgtttgtgcacaaagatggtacaggtcggctaggatgattccttggtgagaaatggtttctttcatttatagtgtactcgtaaatgttgaggaaacacattttgacaagtgtcgtttggtgttttgagagtagagacctgtgccatctttttgtacccaaagatggcacaggtcggccatgcactatgagatggtcctcttgtgcaatcttgactttatgttcaagttttagccattttggcctaaacaagtaaagcccttgttggttttcttgtttgatttatgtctctaggatgaaaacactcgcacgggcctataaaccctaggttgggcacccttgggtgtgtgggtccaagtatgatgtcttaacttatttggcctttgtaagtcttggtcaaagtcgcagggttgattttttttttttttt

SEQ ID NO: 48185 - DNA, 2324 bp, Cannabis sativa
tacattgaaatggaattttatttagggcataaaacccaacaaggacactctccctctttaacttggcaaggaatccattgggaaagagaattgcttccaaaaggtctaagatacaagatttgtagtgggttacatgttaggagtgatttggacccttggattccatgttatatggatttcaagccgattagctatactgggtgtccaaaccttcttgtatcgacattcatgtgtgatactatggtgtggaatataccttttctacaagagcatttcacacaaagtgacactgacagaatcgtcactattccattaagttattaccaatctcatgatcgacttatatggcatcataccaccaatgtgatttattctataaagtctggctttcatctagcaacttccatctcaaagaccaatgaagaatcaacatctaacaattagaaaagatggtggaattttttttaggctttgtaaatacctccaaaggtgaaaatatttacttggaaggtcattcaacaagcattgcctgtcgccactgccttacacaaaaagaaagctatcaattaatggtttgcacaaggtgtaagagtgcttgtgagtcaataaggcatgctttattcatatgtaaacatgcaaaatcagtttggaagtcaacaaaatttaacattgatttccatagtgctcatggtatgtataatggtgactacttcattcatctctcgacaactatggataaggctaattttgaactcctaatttgtgtaatgtagagcatttggaatgatagaaataaagtacttcatgggaaagtaaaacttgatgcttctgcactagcaacacaagcaatcaattatgaggataattatagatctatacatcaaaaaggtaaagacatctacaatggctcattgttgcaccagcaacaaaatgtgacacctgctgctatgcaccagtagccagcaaatcaacttcccttggatcggcatcatcatacataccaacctaagcagctgtcctcttgccaacagagcttgtcattcccaagatacatgcatcaacaacatacaactggttttgtatatcaccagcaaacacacaatgcacaactagtagctggtgctggtaattacataagtttaacagatatttcattgttgcaccagcaacaaaatgtagtacttgttgctatgcacaagaaaccatcaaatccaattcccttggatcagcatcatcatacatgccaacttgagcagatgatttgttaccaacacagcttgtcattcccaggacacatgcaccagcaacatacaaatgtttttgtgctgcaccagcaaacacacgatgcacaacaggcgactgttgctggtcacaacacaagattaacagatatgacaccatggcagccgccaaacataaattgctttaaaatgaatgtacgtagatgcggcagtgaatgacaaaaaaaaaaagaattggagctgtgattagaaatcacaaaggaaaagttgtggttgcattatccaaaccagtacaaggctgttttagaagtgatgaaatggaagcaaaggctctattccacagtcttaattgggcttttcaacaacaactctcgataatgcaagttgaaacagacgatttgagattgtcttctgctttgacctcttcacacaaacacttatcttgtttttccgatttaattaatgatgtacgttgtcttttgtcctttttccgtgaaattactgtcgctcatgttcgtaggtatgctaatcaagctgcccacggcttagtcaagtatgctctaggattggatgaagacgtctgttagatgggagaaattctacatcctattttctctattgttgtaaattatctttgatttataataatattgaaaatttctcaaaaaaaataaaaaaaaaaaaattgaatgttaatgaatttatttaatactttaatttattgtttctcgattgataaacaaagcacatgtaaagcatgagattttatctttctctcaaattttattgtataatttattggaaaacacatgcacgtgcaacgcacgtgaattatgtgactagttttcttaaacgtgtaaccttttagaactccgaccacaagacgagcaaagtgggggagtcaacttcaacctcgtctcgcctcttatttactagggttgtatgtcagttggcttggtaggtttatactatatatattttaacccaatgtaaatctcgggttacaaaattctaagtataacccacctaattataaagaaattgtaaaccgtccgacggattggtcagtttggtcgggttaac

SEQ ID NO: 48186 - DNA, 1788 bp, Cannabis sativa
agtggttgaagtcgggtctggctacgaaaactggtatcctggcggcaaggacttttaccggcaacagaacaggcggtagctcggctcagggggcaagaggagtcgatcatcaccaaatcccaatcgctacaaatccgggtgattctttattacccaataatcatgttaattttgataagaatttgtatggggagttaagaggtgcacgtaatttagggaaaggaaaatcccttgaaataagggaattgagtgaggaagaaggtgagttggcgccaggggaaaaaaaatcaaatgaagggctgacctttgttgataataaaaggaggagaatgggcttggttgatggtagagggtcgttgaatgaagaggaattagaggtaactaatagagcccatgaagacatcatttatgctgaaatggatgttgtgagtgatagtggaaaagtggcagtgggctcttcggatagtccaaaaaacttcagtggggcgggccttggtttccaagcccgccaatcattatgaatgttttaagttggaattgtcgggggcttgggaaccaacggactgttcaattcctaagagaaattgtttctcaaaagagacctcattttatttttctttgtgaaataaaatgtcaaaaatctaaagtggttagtttagctaatcttttaggttttgaaggagtctttactgttgactctattgggttgtcgggtggagttgctcttttatggaagaataaagatgatggtgtgttgttggattataacaaaaatcatattgatttggctattcactcaactcagtttggtaattggcgacttacgggggtttatggagaaccaataagaagtagacggcatgaaacgtgggctttgttgcgtactttagcaagacaatctgatctaccgtggtgtgttattggagacgtcaacaatgtggtaagataagaggataaaagagggggtaggtcgtaccctcaagggcttattacggggttcaataatgctctgcaacaatgtgatttggtggatattgaaattcaggggcatccgtttacctgggaaaaagggaggggttcgaataattgggttgaagtctgcctagacagagcgcttgcttcttcgacgtggcatcagatttttccaacagcttctcttaccaatttggattactcaacctcagatcatacgcccatttttcttgagcccaagccgcagattaatgttacacccatccgtcgctttcgtttcgagaactcatggttaaaggaacctctttgtgtagagatagtgagggatgttgggaagagggacatgactgaagctttagtgaaaagcttctgttgtgtgctgaaaagttgagtagttggggcaaagagatcattggaactcttaatcaccgaataaaaagactgaaagcgaatttgaagagacttaatcatggtagggacgaagcatcgattcaaaattataaggaagaaaaggaaaatcttttcaaggctcttgaccagagggagtgttactggaagcaacgtgcaaagcaattctggctcaaggaaggtgatcaaaatagtaattattttcacaaggcagctagtaccaggaagagcaacaatatgataagtacgctgcgagatgagcatggtaactgggtttcttgggaaaacggtcttcctcaggttgttgcaaattactttgatgttttgttcacttcatcaaatacaagttgccaagagataattgactatgtcccgaatgttgtcccggactggatgaatttagagttg

SEQ ID NO: 48187 - DNA, 1052 bp, Cannabis sativa
ctaaaatatgaaggactctattttcgattctgtaaattagtcaaaattttttaaaaatttatagggataattaatattgcaactataacaaatatcgttatgaaacgtaatttgaaaaaaaaaattctagcatgtgatttcaagcatgaaaattgactaaaaaaataatagaagattgtaaaaaacactcttaaacattgcactcttaatttgcatgcagttatgcttcataaatattttccaaaataaaaaaaaaagattaataagaaataattacaaagtgtacgtacgtatgtaactttgtgaatatatatactacccatgaatgattattatgagaaccatttgagatcttatatttaattttattataattaaaagaaaatttattttgtattatatagttgtggttgttacattaggttaagagagataaaaaaaataaaattgagtttgccttagacaatagaataaaaataatgttaaatataaacatatttttgatgtagttagcgtaattttttttttttaattaatagtaaaattaaatacataaattctaatttttctttcattacaggtcattagattaaaatctttttttttttaaaaaaatatttttaaaattgatatttaattataattattttttaaaattttcaatgaatagataataccccattaaaaaagaatccatttatactatctacatatataagctataatacgtaatgtacatatagtatatttttggtttttctttcccctttgaaagaaattgtatattatatagttatatataaagaaaaaaccctatctttatgattatatagtaatagaagactttaaataaatgataatgtgcacgcacgtctaaattccttgatggggcttggaaattaattaaaatgtcctatatatatatataatatactcacatttaaaaatatcccacacgaaaagaatataaagggatcgaaaagaagcaaatatatattagaagggaaagaaattaattaagttgatgtacacatatttatatttatatattt

SEQ ID NO: 48188 - DNA, 1535 bp, Cannabis sativa
  modified_base (28)..(36): a, c, t, g, unknown or other
ctcggtagttctgtgggcccagagtacnnnnnnnnnctcgtcaacccatctgcctttggtcgcgtctaacttcttcttgataatcttaagagaaatatctagatgtttaaccctaattcatctatttttgaggaagttcagaatgcaggtcaaagagggttgactagtctaggttcaaatggtgcaaaaaactctggaataactaaattcgtgaaatctagtgttccagcgaattttcgtactactgcgaattcattgcctgccgctacaagtttatcatctgcaaaagcaaatgttagggtttatgtatgttagggttatttattagtttttatagtccatatcagagttataaaagtagaagcagaatttgataaaaatagtttttatctaatatgagcaataagcccaaggatctcaacataatatatatagattaaatctaaactactacaacaaagtgttgacctcaaatttagccaaccgacagcagagtcatatttatgattgaaatcaccacgtgtacacgattagaataagaaaacaaaaatgatatagtaattttatagaggttcggcccccttagttagtgggtaatgacactccccttttagttgtattgatattagagataacaccaatcagatcacaagtagtgtgaattctatagtggctctcttaagattacaatagtgagaataagagacaaatctcaaggaagagagatgagatgagggagacttaatctcttctagactactaatggcgtgtagaagagagggtgagctagggtttagaacttaagagcccagagcttagagcatataacttagcccttagaacttttaggtttagtttagtgctctttatataggagagattatacaagagatagtaggttgatatcccttaaaatgaggagatatcacctatttattacacattaaattaataactaaataacatgttaattagttcccaagaataggtacaaaactgaagttaatctctactttttgtgggttattgaagcccaatttgtagctagaggtgttgtccaggctaaaagttgtagaggcacaaaagtgcgtgctagaagagaggctggtcggccttccctttgttggaggttagttcgcctatgttggcaatagggctagccaggggtggttcggtgagacccccttggttggccagtttgttatctctttgtcctacttaagtatttagactcctcatcgactggtacattatgcaaggtgacttggtcttcttactgacaagctatactcaacatgacattaatcttgcctacgtggacatggcacgtcatgtgggaaaaattaggataacatttttcccccaagtccctatgcgaacgtctgtacggatatggacttccaagcttcagttttgacaatcgaagtcttaaccaagaaagttttatgtaacaacttcagttatgaaatattttctcttttttggctactcatgttccccaataaggagctaataatattttttatggttatttt

SEQ ID NO: 48189 - DNA, 1154 bp, Cannabis sativa
ttgttgtgtgcaggaggacactgctaggcccggcggtgcaccaggccaggctggacaacgcccagcaggaggagcaccagctgctgctcgcacttgaacaaagtgacatgcaatgtttttgttccttgagcatcttctcttttgaggctttagttattggatgttaccttaaaagtctttttttggttacctaattcagttggctatgagacttcaatgtattagtgtcttgtggatttttgcttcaattttggtagcgttcttgttattggttaatgattgaaattacaatttacaagttaattcaagaaattctccgtgccaaacctactcgtgtgcatttgttttcgtaacaaagtgattattttgtattcgatagttcggaatctatctaatgaaaaagaaggaatatattatatttgttttttcctgtaaaggtattcctcatgtattcttctctggtttgttagtcaattttttagttaaccagagtatgaaagagagtcgtttacctttaatatcgtcaatttccaataacacaatattttgtacgtgaacttctaataaaggtaaaacaagtggaaaaacgacgcatgtgaggtgttgtaaattgtaattctaacgtaaacgtgttggtagtagtagccagtactgcttctgccattatttcattccataatatatgttatgagcgtctttcataatccctaagggtatttgtgatgagcttgagaaaatgatgtgcaagttttggtgaaagtcttcttcaaaagatggtactgcatacattagatgaattggaatcgtatgagtatcccaaaagagcaaggtggtatgagattttgacatttgcatgattacaatattgttctgcttggtaaacaagtgtggagacttcacactctcaaagattctttggtttgtaaattgtttcaggctagctactatcctcgaggctcctttattgaatttgagttgggaagtaattcaagttatatttgtagaagcattttcgaagctaaagatgtgattatcaaatgtggtcggttgttagttgggtctggtgaaaacatttttattactagagacccttggttccctgaccttgacaatccttatattacatcctatcatccaagtttatctgagcaaaa

SEQ ID NO: 48190 - DNA, 3058 bp, Cannabis sativa
  modified_base (2059)..(2062): a, c, t, g, unknown or other
gcataaaaaaattgaaaaaaaaaacggtataaaaccgtattatttaaagcgaggccaaatccgtaaataagtgcaaaattaggttccctggtgcaaaaacttcaaaaagaaaagaaaagaaaaaaaaaaaaataaaccacaaaaagaaaccacaaaaagacaaaatagttgaaccaaaaccaaaacactcattcatgtttatatatatgttatagattatagataaattatagataataaatagctctatcgactcttaagaagctcggtcatgagatttggtagattttaagaaaataaaaattattgaactttagttaaaatatttataatatttttaaaaaatactaaaaaataaatataattttaaaaggagaatattcttttaggtccttaagttaaatgagctctaatccccagcctaattcgtcttagctcaactagatttgtttcaaaccaattctttaaaatgaaaattatttaaatatctctacatgtagagaagctttaaagcttctttatatatttttcaataataattattttttttttgttattttctcttccaattaattactttttaatattttttgtaatttttattattttttttttttggaaaggaatttttcttttaattgaagtaattaaatatataaaaataaaatattttttatttgatgtagagaatagaataaaaaaattgttatatagtgtaatataaaaaattgatgtaaaataaaaaaaaaaaagtaaaaattaaaaaaatagagtaaaaaaatgattaagagtgctatgtggatatgattaatttattttgtgtattagaaaaagaaaaagaagtgatattattgatcaaatctattcaaatttaataaacgagatgttcctttctatttcctttcacgacttactttgtggtagttgtcttattcaagcttgtcatcttttatatataggcttttgaattgaactaataaagttgtttataaatatgaaatgaaaccataaatcaataaagttcattcatatcgttggaacttggaagccagctcttttatcattcctagctagctttacgccaccaattagctgtgatttttaatgttgtagtcaaacaaacatcacattactattaattaattttgtatatacaagcttctacaaaagtcttataatataacatcatattaaataagtggtagaactaaagaaagaaaaaagaaaacttatgggcagaatacacatgcttctaataagagatatttactgtgaaacttctttaaaatttacaattattacatacatatgatcttaataaaaataagtgataataaaagtattttattttacaattttattataattatagtattttttagtcatttaatatcaattcaaaaacacgtaaggatatataattagactatgtattaaataaactaaagaaatatatcaccacgtatttttgagttgacaattaacgaatttaattagtacttaacaagtgcgataataataaaattattaaataaagtactctacggttacttttttttattaggtttatatgtataataattataaatattaaaagaaaatacccttctaatgaaatatatcaaatatataaatattagtaaacaatatgtatcaatcatgtgcaaaaatattctgtcccgctcatctaacaacttttatactaattttctaaatgcaatgcaaccaatccgatactcaatatctttctatggttgatcgaagactaaaatagtaaagtatccaataaagattttcattttttccactaatttaattaatacataccccaccttctaccatgtaagtggaagacttcaaactttgactaaacatacaataatacatatatatacgatcgcatcagataaaccttttcagttttatttattcaacttaattaataattaagattggtattgattaaccacttgagctaggctagttcaagtggccataggtgagtgtgtgagtgttggaggtcctgggttcaagtccaagtaaaacatgttgtaatatnnnnacgcttaaatcaaaaaaaaaaatttaaatcaaaaaaaaaaaaaatggtattgattgttgaaagagtacataatatagagaataaaccccacaagtttgataaatatttttcttctcaatacaatccaccaaatttatagtttttttcttctttttttttattatttatttttttttttaaaaaaagactagtcctacatattccatcattcgaactcatgctttatttccttctacatttttcatctggaagatgtgatactacaacaaccaaaaatccaagtgacgattctttttttttttttttcctttggtgctattaaagtgttttttacatggtaatgagatgccttgtagaaaaaaaaatgttagattttaatcttaacgtttatgagttgatgaattaatagttgtttgatagaaaaaaaatattaaatttttattttgggcttacattaacgttttaattatttcattaaaatatgagttaatgaatagttgtttgccgttttagttcatattattatttatagttaatggacttagtattagtatgaagtagggcggttcatcgagtgagtgggttttacgggttttgaggtttttgggttttggatgtggaagaagggtgtactgaacacgcctattcaagattgtgtgttttcaagtttcaagtacaggtgggttgggatggtctaggtgggttaggatcgaatttcgggttgagttgggccaacaaatattatatattttttttaccatggttggctggctgttggtgctcttgtggatgttggagctggagtggtgacgccagagagacactacaaaaaatcttacttatagtcacaacaaaatttgtgactgaaagtaaaaaaaattgtgattataattagttttttatgttgtgactaaaaagttcgtggctaaaagcattagtcacaaaaattacaatttgttgtgactgaatgtatttttagtcacaaaacttattgtg

SEQ ID NO: 48191 - DNA, 1740 bp, Cannabis sativa
aggataatctaattaattaaaaaaaattatgcatgcatggttagtttgggcgctacaaaacaaatcatgcatgtatacgtacaataatgcaaattaaaattcaatagtattttgtagttagataataagggtacccatataattaatattcatatatatatatatatatatattatcttataataattaaggatatagttaaagcattataatatacaagaagtcaaaattagaacgagacaaagaaagagcatacaatggagaactatatagatggggcaatatatatatatttatatatatatatataagacttgacatttcacttcaatttaattatgaactgatcaatttcatgaatttggcaaccctataacctccataatatataagttcttcatgaacatgatagtgacgtatatagaaagaccattgcatatggatcatgatcatttaaaaatattgttaatatcaataatgtgaaattttgacttttagacaaataatactagatgatatacttttttcctttttatttcaatacgaaattgttaattaattataaaatgtcaatatatatagtgtgtactataggcaccttaattaatatgccaaataaaaatgatcttctataaattatatggaataatcaatctcattgaaatttgaaataaataattaagataaagaattatatatgagaattaatttaacacttataatcaaagttaaaccaaacatggtctatacaacttaagttatagaaaaaaatttattacttgctaaaaaaagaagatataatatttttaaattttagaagataagatttcgagttctaagataaacctttgttatgatccaaattgtggaatctcaaattatagtgaagcactaatagcttcactttaataagttagtgtatattaagaactacaaggccaatagtttgtatatattattatagagctactaatagctctaggtgagttattaggcataggtgggtgaagcctctaaatgagattattaacataaatttatgtgatactatagtttggatattttaattatgctaaagttagttttgagggtgttgtgggattctttcggtagtgttttagctatgctcatatgttaagttggaatcaaattgtttcaatgtcattaatgctctcaaaaattatttggtggatcattcaaatttaggttgtattattagaaaaattttggcttattgaataccactctagtgatttctcatgattgctaataatattgctcacttattggcaaaattgaaacgatcattatgtttggtggcatgattacctttgttgtatcagtgtctctttacaagcctagtgtctctttacaagcctgttcttgttgattaatgatattgtcttggtattctttttcaaaagttattttttatttattattttttttttgtatttttatggaattcgtattcgacatagaaatctctattgcaactagcagagcaacttaaatcgtaaccaaaaatcgtatagcaacccacatagaaattacgtgcactttagaaacttaaaccataaatttttttttttaaaaaaaatagtaaatggagtaattctccaagaaaaaatgagatttcaaaacttaaatcttttatcttaatattatttatgtgtgccgatatcattactcattatatataataccatttttaattattttataaattaaaatggacaa

SEQ ID NO: 48192 - DNA, 1866 bp, Cannabis sativa
ctgggaaaatcttagcagcagtagtaatagtgatggggtagaatcggagggtgaggagacggtgacggagttcgttgctgagccaacggcggcgttttctaaatcatgcgttgggacccacgagtacctcgctccggaattagtatcgggaatgggacacggaaacggagtggattggtgggccttcggggtgttgttgtatgagcttatgtacggaacgacaccgtttaaaggagggagtaaggagagcacactgcgcaatatagcgtcgagtaggcaggtgaggtttccggattttgaggaagaaggaatggatgaggcgagggagttgattcagaagctgttggtgaaggacccgcgtaggaggctagggtgcgccaggggggccacggacattaaacgacacccgtttttcgatggcgtaaagtgggctttgattagaaactacaaaccccccgcggaggtgagagggttggagaagaagacgaaatcgaagacgcacgtgagtcacgtgacgaggggatcactgtcacactctcatccccataggagacgccgattctctaggtggtggaagggactcggtttcaacaagaagaagaaaatcggtggtttgttatagctgtaaatttatttatttatttattttaaagaaaggataatgaaaataattttcaagagttttcacagaggcacattattatattattattattataattatgatgatggacagtttaaactgaaaaagaaaaaaaaaaagagttaggcagaaaaaatatattaggagacggtatatttaagatgtgttggttgtaattttggagacattaattaattattggagagttcttacatgtgggtggaagttatagttctaaaataactatttattactggtttcagaacatcatgtgttatgccctgccatgaagaaggtgtgtaagtctgtaatgaagttaagtatccattaatacatgaccgatattagatttaaagttagtagatttgactggtcagcgtattcaggcatgtcagtcagatcgaactctaatatttattcacatgtagcacagtagcagcagtgggaggagaggagtgttttttagccatgcccatgcatataaatataataattattggattaatattggaaaaatactgaatatttattcagttttatgtatccactaataaaactgaatatatataattctcaactaggaaaaatactcagtaccatatcattgagatatagagcaatcagcagaaaaccatgcgatataaattatatttactgtacgccaaatacaattatactataaactatatttttgtattctgggtattttccaagtatgacagtttatccattcaaaaaaagagaagaaaatgacaattgataatggtatatatatgtgtagctggaccctatatatgtactgcatgtcataggattttatcgttagtaataaaatataattaaaactggtacttatgacaggatcattagttatagtactatgaagagctagcttgctcttgctgctaattaaattaattaacattaataacaagaatcaaaattctactcatctccacatggctttatataaatatagttaatgtactataattgatgagaaccagtatatataaatatatatttatatgtttaacaactttcaaatattcttataatagtgtaacatgtatccttacttacaccagccactaactatacaaaaataataagaatagttctggtgcacgccaataaagaaagtaattaacagctacactagcgcgaatcgggctgtgcattattaatctaacataatttctgattaattaatgtatgtattt

SEQ ID NO: 48193 - DNA, 2084 bp, Cannabis sativa
  modified_base (1138)..(1143): a, c, t, g, unknown or other
aaatcatatccctataattgtattatagttgtcatggtattatttttctagttgtttttatttattttataattgattttatagttgtcgtgagtttgatttctcgatatttttcagttatttttttactttttatagaacaaagtgtattttgtaattttaaaactttataaacgtatttttataaataaatacttccgtcagtaaaattgtaaataaagcataaaaaaagttatactcggttactagaatcgtgataaaccttgataaggttacactcggtaatccaaccaggataaaccctaagtaaggccttatagtaaaatagacgtatgagcgtaacacgtggtgtctatataaaatagacttaagatgttgtattagtgcaatggcacaattattaacgcattggtgtattatatgtgattatattgtggatgtctttattgtttttcttactgagccttggctcacgggtgctctcagctgtgatgcagacaagggtaaggtcgcttctagtcaaccatgagttggagggcttgcgtggacgatgtacatgttccgactattgtgacatgtggtataggtcgttggaagactttttgtgtaaagtatgattttaccgttgaggtcagcttttggtgtaaacaacttgtaatattttgagaaaagattttacgggatcccgatcatgtaaatattattttgttttaaagtttaaattattacaagtttgttttaatttatcagttatattatttaaattcacttggcttatcagaccctgattatcgatattagaatcgtaacacatggcgtacctagctaattagttagggtgttacacattttcttcctcacatagacatttatagcgcgtttactaaactgtaattgaaattagaataatcaatgggagaaatatatcggtttaaaatagaaaataattagaaacaatattttattatgctgtttactaaacggtccggaaagaaaatcagaatcatattattttgttaacataactaggaaaggtaatcggaatgctttaatttgacaaaattgccattattagataatgtaattattttctgtttataaatttttaaaaggttgtctttttcatttttaattaatnnnnnnaaaattaaaataaattaagttaggaaagaaaaaagtattccctttaaaatggggagaacctttctctttgttttctctttaatttatgtgggtcccactactttctccttttccaaaatttagtaaacaattttataagaatcaatacaataccattcattcccattccctttaagtaaacatgccattaaggaagatcttgaggaattattaagcctaatatgctcaacccattatttaaggatgggcatatcctcataaggttctaaccacaacaaaagtaattttaaccaagaatatcacaagtgaacaatatgacctctatttatagagtttttactcacatatgagcataaatgaccactataaagccttgaatgtaacaaccataaatttggtatttatgatattaattgggtgatttgaaggagtttaacacatctaattgtatgctaaaaaaatagtaactagttactagctaccattttttgcagctttggtcaattcttttttaaagtgttccaaactactcccacttaattttgaaccatttatacactttataaatgaataaataaagtccccaacagctacattttcaatagttatcattcattcacatttacaaacaattagtaacatgttttactaatttaagagtaataatgtaaagagaaaagttacacaatttatgatcatcatttctcaaaaatttacaactcttttttttatgatcagtatcaacacatttataatttcataatgcatgttacaatttaataaaattaataatttatcacacttaactatttaatttaaatattatattctataaaataatataacaaaaacagctcaaccaactgtgtaatccatcaacacaactgttgtcgagcaaaattcgcaacaccaaatgtatgtaacaatattaatgacaggaa

SEQ ID NO: 48194 - DNA, 1171 bp, Cannabis sativa
aaaccttgagtaaagcgggtataattttgcctgtgccataaactaggagcttgtccccaaggtgagggaagaatatgctgttgaatgggtcacactttctaatagtggttcttctttctctgtcaaagactcgacgagtagtcttccctccaaccaccctcacggagtctcccctcccttgtttcttcgtcggctgccttgagatgcctagtctgtaagtcgcactgtttcctctctaatcgtgcgatacaatgatgataacctcttgccacccgaattccattcttgtagtagccaaacatattcatccgtcactaagtggtggtagttgatagatgggcagtacaccccaacatgaggaggatcttggatgaggaaggtgacgttcaaactaggtttaccatacttcctaagtcgttgatggcaaagggaaaaaaccagaacactcgaagaagagaagttgatgttaggagtccaacctagatcccacacgtgtgaagctatggatagaacttgcgcaccgaccaccacgccatccgcttgttgccgccagcaactcgttagcagcgattgtatctccattcctacgacttagaagtcgacatctttgattttgagtaacccaatggttgccgtcttcgccgcttgacaaagagaagctattggaaaagagaaccctctcatgacaaagagacgaagaagaaatctgagaagtgtgttgggccttacctgggtcccaaagggctggcccataagcttggttaattaaatttagaattttggtgatgtgggccagatttgggtaatgagttaatggattgggcctgtttagacagggtttggggatctgatcaattggcctttttctttcagtcatcttcttctcgcaagagacttcttgtatgctcaacgttagcgatttcatcctcaccatgtccaacatttgccctagcaattgggtcttctccggcatcaccttcatctgttggtacttttttggcgccatttggagcgtgttggagtgccggagtgacttttggcggggccgaggacggagagccatcctagaggaaggtcggaggacgaatttcgttgttggcggtgttcgtctccatcgtctattttcccctggcaaagaaacaggttaactgagccatcattatctccagta

SEQ ID NO: 48195 - DNA, 846 bp, Cannabis sativa
cgcggcttctcgatcggctgcgtttggtggcgttttattggctctgatcgaaggagctgggatcatgctcaataaagtccttagtcaacaacaaccaatgcctattataattgacgaaccagctcctaatatggcaggaatgcctgggtttcctccttcaggccagttaccgggtcggttacaggctccggaggtagctgccgcaaccggttctgcttcggattcgggttcgggttcttggtttggagggtggctcggtggtggagacaagaaggagcagcaaggagcgagtagtagtggaagcgaaacgaagatattggagagctttgatgcgcccccagtgcctagcttcgagtacaagtaatttgagttttttgatttgagaaagattggatttgaaaaagagaagaaaaaaaattaagtataccagcataaattttaggttttgttttagttttatgttcttttttttttatgggaactactaatttgtgctgcaaaatttagttttgaaatatagttacttatgatgaatgatgattgttccttcaatataattaattgttaacatttctttttttcttgtaccatttttttcagggttgatttggtatgtcttactacaccgtattgtatagtattatattaaattatattttaacaatcatgtaaaactatatgtggtattaacttttattgacatctaaatatataatatttttgtataaattaaagtttaatatagtattatacaataatatgatatataatttaatataatacaatacaacctaatacgatgttccaaactaaactttaggcagcgtttggttggaggtaatgaaa

SEQ ID NO: 48196 - DNA, 2349 bp, Cannabis sativa
tctacaaaattgatgtagaatttttacattattttactttaagtatatactaaattagtgtgtactaaattttacaccaccattaatagtgtttgatttcaaatctataccaaattagtgcataaatttttattttcattttaactcttctctttatttattttaaaataatcagataattttttgttgataatatgtataattatatcataaattagttatttttagttattgtttaccgagattttcggaaaccaaaataaaagaaaatgtttcctctgtgcttcattctttttcttttcttaaggatagagtttcctctgtgcctcattcctggcgttctaaatgtttttctaaggcaaggaaggcaatccttcttaaagttattattcaagcaatttctgcttatgcgatggcttgctttcggctgcatgttaagctttgtaggaaattgagggtatggccagattttggtggggctcttcaggagattctaggaaaatacattggaaaagttggtagtctctttgtcgttcaaaatttgttgggggtttgtgttttatgtctcttgtccattttaaccaagctatgcctgctaagcaagcttggcgtatcttcactcaacctgattctttgttgagtcttactctcaaagctaggtactttcctcactcttctatcttaaatgctaaggctggtcataatccttctttctcttggcgtagtattctttcggggagggatttattagcttctggtttagtgtggaaagtggatgatggggagaatattaatacgcttactgatcattggtttcctacttctaaatttaagcagcccctttgtgatatggattgctagcagtctaagctctcttatttcattgatcagtcgggttcttaaaaccttgataggcttaattcttattttgattcctctactgtcaatgatattttggaggttcctttctcaggacttgatggtaaagatgagcgaatttgggggagggatagctctggtctttttactgtaaaatcaacatatcatttagcccttgagaatagagacattccctcaacttcatctttccaagctttgaaatccttctggactaaaatttggcatgtaaatgttcctttcaaagttaaacactttatgtggagatttgtttcaaactttatacctgtggctattttgctctttcaaagacatattatcccttctcatttgtgccccttgtgtaataatcatcctgaaacaattgcgcatgctttgctagagtgtcctagagccaggaaagcttggaaagcttcaaaatttgcccatttttacttacaaaataaatattttgatattatgcattttattactaataatttttcaagtttggataaaggttctgcagatattgtgctgtgtatcttgcggacaatttggaatcaaaagaataatgctttctttaatcggtttgttcttgatccgaaagagatgttttcctggtgtcagaattttctcctccagtatttggatgctcaacagaagagacttgctcctcgtgaccaatgtgatcaggattcttctgaagtcatggggtgttctctaggttggtgccaggtttttatggatgcagcactagatgttaagaagagatttacagcctaagcgtagtggtgaagaatgattgaaatcaagtagttgtagagctggttaagtctttgtctggtttagttgctcctgcagtagctgaagccaaggctgtttctcttgcggtcacatggtctaatttgattaagttgcctatccaggtcattaaaaccgattgcaaaagtattgtggataaacttaataattgtaattgaaataatagtatttttgatgatttgcttgtagatgttaaaaactctttgtcttttagtcctagccttcgagttgcttttgttagcagggatatgaatactaatgcttataatttagcaaagttaggcttaggattagaaaaagagttgttgtggaatgtttctttatcttccttgtaatagcttgtatgctttgtttcttctctgttaaatgaagcttcaagttcaaaaaaaaataatttatagtcttgaagattaattttgcaattgatataccctcctccttcaccacaggtagttttgaatttgatgttgctactccagttaatggctccttgttgtaacagcaagagtgaataatcttctatgacaatcaaggcccctaaatccattagacatgtctttgggaatatagttgtttatataaataccctatgtacaaactcacgaatagatctgaggccactacaatagatctcgaagaaactgggat

SEQ ID NO: 48197 - DNA, 748 bp, Cannabis sativa
ctcctattatctcttgaaaatattttccaccacatggaactaattgaacctcaaattttaccttttcatcttttaacaattcacaccaaatgttttaacttccactttattggacagcctctgtccgagatgctatgtactcttcttgaatttcgaacatggaagaagaggactaggatgaagtcctctggaattccttcaaaaagtccctctattgcctatgttagcaaatgtcatcttcaattgagcagttgggctgataatgtagtaccttcctatagtaaataatgtgatacgtgaaaataggtcatggagttggtaaatttcattttgattagtgggatttgattataggaataattacataaggtactatgtaaaaaaatatatattttacgtttaaagaattttttttacatacagataacaaaaaacaacatacaaataataaaaaataaacaacaaattaacatgagtacaacataaaaaaaagtattttttgtaaataaaataaaaaaaattgtaaaaataattaaaattccgtgaaactatattcttgtaattttttttgtttatttttgtgtatttgtgaaataatcccttgattatggctattcgtggcccaatatgggcccaaagtcttctatgtaataatacgtgatgaaatagggaaatttacaaaaatattagaatttgggttaatttttacaaaaatattgtcacacggaaatcttttcaaaaatactgt

SEQ ID NO: 48198 - DNA, 1885 bp, Cannabis sativa
tattatggctaattaggattttgctcccctaactttgacatgtaccaaattatgttccttgaacttttaaggtcgttaaaaatacctcatcaactattaagattgttgaatttaaggacttttgtctttatctcatcttattatttattgtactggagcaaagatgctcttacaatactccatcatattaaatgtatgtcatatatttgggagtagtgcgttttttctaataaacttttcgcttgtttaattttcaattttaaaaaaaaggagaataattcgtgtaactattattatatatggagaaaaaataaaattaattaattacagctgaacaacttggcaccatatatattcgtacaccaccggagcttttgatgacagtgtacagagtctgcatatagttagctaggtaggttattatatgttattacctgtatatttatttatttatttttatacgttaaaaaacgataaaatctatatataaaatataagtcaattaatgatactaatttgttatcctcaccaatatagaaaccatatattttacacacaaaaaaagcatttattcttctgttttggcttttttaatttgacgtttcccgaaacgaagacctaattggaataatcagctgtatgtatattaatatttggtattttcataaaagtgacaagttttttaccaattattatacttgaatattctgtacagttctctgaattaatatttaatacacagtttatcaataatatatattattataattgtatatatatatatattactataaattagaataaaagagaaacaaatttagattgttgggattgtcttttttattttataaaaaatagatcaaattgaagcacgtacgtagatggcgcaataagtaatcaaatctatgcatgttcatgtgtagatttatacatataaatccacacatatatataatattagtatggaaatatgagatgtaagactgcatgtgaaaaaaaatatgtatatattttaattagttacgatatatatttataataaagaataatatttataaatataataattagttttggtataataattatattaaattgcatatacacgtaagatagaggtcaatagtttaaatttcattttgaatactttttatttttttaaaatttatttttgtccttactgagttacgaataaaagttacgccctactcactttaaatttttggtcagccattaaatatagattgacctttaatatttcatcataccacatttgaaaattaaattgagtttttttattatcaatttaacgtaattagagaaaaatatattgaaaacttaaatctatacatttgaatgtgagaagatatatgagataatttttatgttttgatgttttaatttgataataatttttgtttggcagataatattagtaatttttgtgtttatttttataagtacccatggtatagtagtagagtttgatgtttcggttggtaattagcttttgagtatggaagagctatagccatagcttgggtacttatttatttctttacttattaagtggtattagagtatctttaatgagaatgtttttttggacatcttgtaatagatgcttactattgaagtaaattagaataatgctaacaaatagcatccttgatatcctttcttttatttatttatttatttattattattattttgtgataaaagtaaaaaaaaaaaaaattaatcattatattgttttaataatttttagatgtacttaattactagggattttttaattttacacttcaaaacaattttttttacattgttacagaattctacataaaaatccttattgcaaccagcgctgcaacctaaattg

SEQ ID NO: 48199 - DNA, 1363 bp, Cannabis sativa
agaaaataatctgcatgggtggtggaatgtggatatcaaattagtgtttgtcagtaattaataatagtaattaatatgcatgttaatgttggtccctaaaaggccaccacaattactatctctgtcactttcatttttaataatttgtttagtactattaattttcaacacaaacaatagatagggttcggattaattaataatagatgaaattatatatgcatgggtggaatgtggatagatctaattagtctttgtcagtaattaatatatgttgatgttggtccctaaaaggccaccagtacaattattttctcactttcattttaatttaataatgtattaaaaataaaaaaggatataattaagatgaaaattactcatggtacagaaaatgaaatcttcctttttcaaaatatatatatatataatattgatttatgtatgaatagtgttgtaaatatgagttgggttttttgacacggcacgaacttggaaggcacgagcacgactataggtacaaaaaaatataaaggtttgggtacgacatggtacgatgttacaaattggcacgacacgatataaaaaatatgtctttgagcacacaacacgagaagcacaaaagacacgacacttaaccatgactagctcgaaaaacacgacatgggacaaatccgaaaaacacaacatgacatattaaaaaattttgtaattaataataatataataattataataagatatgaatttaccaattatataataaaacttaaatataatattgaatattataattttataattaaaactattaatacatgaaaatctgagattatatattaatttatttataaggtgtgatataaaattttgagtatttataattaagtattcaaattctaatgatgttaataaattttttcgtatgattatatgtaaaatatagttacaaaattatataaatataactaaagttataaaatataaatataatttagtaattgtaaaaaaatataagaaagtatatcgcacgaatttaagctcgaatataaaaatagactggcatatttaagaaatatgagatggcatgagcaaagcactacacgaattcgagtacggcataaaaatactgggcttacaggctgtgccagacctatcatcatttaaaaatgttagcacatgcgacatgacccatattttttttgtagcacaatacggcacaacctattttttaaaaagtacagataaatatgaattgggctagcacaacacgaacttacacagtgtatgaataagcttaactatcaaagcaagtgtctctcactacaaaaaactgctacttttagtgacaactttttagtta

SEQ ID NO: 48200 - DNA, 2454 bp, Cannabis sativa
ttgaaaattttgagtcaaattctgctgctaattatgtgaataaataaatattgtattaaactagtttatactatatttagttacttagatagtaattctagtaaaaattgcacagtccaaacatatgatttgatttttttaactaatttaattgagaaaaatcttaagttaaaagcttttattttttgtaagaagtgagaattgagaaaacgaatttttgaatatagattgatcttctgaattggtagaattaaaatttttgaaatttgaaaatatgacaattactagaggaatatttttttttttagaattgagcttaattatattttttttttatcacacatgttgcctcttgataaaaaagaaaaaatatataaatatatattggggatattttccttaaaaaatacatatatatatatcatataaattgtaatatcttacatactatatacaaaaaataagagcaacatttctctgttagcgtagcttgatcaaaaaaattcaaaatgaaccaaagaaaattttgctacggtaattatttattgtggatattgcccttaaaaaaaatacatatatatatcatataaagagcaatatcttagttttaatcatttagcaaagtaaaatatatatatatcggtaaaaatatatatacatatatataatatatatatagaaaaaaatatatatatcatcatcaatcaaaagaaactttgctatagtttatttttcataaatattagtcaccaaatataaaaaatattcgttgtttatttttttattttggctctaggtactgtaataaaatctcgaaagttaacttgtcatttaaatttcaaaatatttttagttagcctatttatgggtcaataattgttacattgtttgtcataaatttttttttccatttgagcgtcaattaatatatttttccaactccaagagtgacaacccttcctctttttcaaatatttcaatacctgtgaggatttggagttgagactttttacttaaaagatttttttagatattatctgtattatgaattaaagtaaataatatgatttgaagcacacacaaaaaatctagaattatatctattctaaatttttatatagtattttctagagtttacaccaatactttattttgtttcaattaggcagaatttgttttgatttgttcatcttggtaatattttgttatccgcttgaatggctagggactagcaataagctagttgagggttgtgttaagtagtaaaaaatgcatatttattagtgtaaaaatacaaaagaaaattaattctatataaagtttcatgaaattaatgtaatatatttttatttgaagatattgtagtattgggttaattttgtaaaaaaataacattttacgacataaataaaaaaagaaattaagaaaatgcattttctttatttaaagaaatacaaattaattagattttaaataaatatttttatttaaattattgtgatatattttgtgttgaaaatatttttgtttgtgtttgattgagaaaatagcaattatgaaaaaaaaaagaaaagaaataaaaaaaaaaaaaaaggtaaaactatggtccaaattcatagaaattagtatttttgaagcccaaaaaagagcacaaaaagacaaaagcctaatcggcccattttcttctccagccaacatgcacgccacgtggcggtctcctactcgcacgcagcaaccacgccaggggcttgtccccttctcttcctccacgcagcaaccacgcactagaaattctaggccacgcgttgctcatcacgccccagcccgagagttggcatccctgctgtccgagccccttcagcccaaagtggtttcagccactttccacgttgcattctctcatcttgccacgtgtccacatgcaacaaatgagaggatgacacgtggcaactccaaattaagttattttatttgtatttttaagcatatgcaatttgtaataagtttaattgcacattagtccttttcccttctataaatagaagcttaggattttagaatttagttatagtttcagagtttcagatagaaaaatccagagaaaacgctcagttagtttaccgcttttcttagttaattttcttatgggtttctaagttcccttattattaaggcggacgatgaaccatattgtatttacttaagtatttatatttattttaattctttgtacaatatatgcctatgattttcgcttcttaaaataatttatttcatctttaatgtcacatatttttgatagttagaaattattaatgcttggttctatattttactaaaaataatattctttcatttttttgtatttacatcaaattgtttcacatttaatgcttagaagttataattttaaagcgaaggaaaatctattttttattagaaaataattggttt

SEQ ID NO: 48201 - DNA, 1146 bp, Cannabis sativa
aacaggacagttggaattgatcagaaatctttttaacatgaatttattcttttaattattttcatccttttagatagaaacaccaacaagttggagtgggattttgaatgtttccatgaacaattatgcacttaagtatgattgtcatacatttttgaatcagttaatctgtttgaaaattaatgttgatgcaatccaaggaaatgcaccgatagaatagtcgcagactttaccacagctgtggtacttagaagctgataaaatataaggtaaaatgagggtttaaacaggacttcatacccaaattacaggtttttatagaacattgagttagttcaaacccttgatgcaacttcagttgaatttagttgtatgagtagaagtaggctatgcataagttatctgttaattattatatttttttagggtagactagaatttgtagtaatttgttttttctaccagtcttgtgttgtaattcttgtttttgaaaaatttctcacagctcagtgctgttaatttgattgtggtgattttgggaagcagttatatgattctgaaaaatctgatggaagacaagcagttggatttttatcagccacttttatctgtcagacgattttcatcaacaggcgcaacctcagaagccgataacaaacggaaaattgaaaaatcagtaccccatttaccacctcttcctgtttacaaatcagaactaaagtcaggtccagtgaggaatcctggaaaggttccttttgtgtgggagaaaaccccaggaaaacccagggatgaaagaaaatctcagattaagattcctgaacagtctccgagtgttccaaaactcccacctggaagggtttcaaataagaaacatcaagcttcagacaaaggttctataagtacaagtgttccccagtccccaactgcaagtatcctttctagttccagagatgtctcagacctggataaaagaaatgaaactaaagataaaagctctatacagggaagagaggagaatagtagttctgcttcagagggcggtgacgaggcctatgtagacgcacttgaaacgctatctagatctgagtcattcttcatgaactgcagtgtaacaggtgtgagtgaatacgatgatccagatgtcaa

SEQ ID NO: 48202 - DNA, 1079 bp, Cannabis sativa
aaaaaaaggttaaaaaaatagtatatagagtaattcccttaattaataattataattaatttaattttaaatataactaatctgtattaaagttttataaagaaataaattataaggtgactattaggttataagttaatcattatttatttttatttaattttcaaattaattacaatcattttttttttgaataattaattacaaccatttaatgataatttaatggctaaaaaatgtaaccatgatggttacatatttaatgtaactattgaaacctcttccataaataaaaatataaaaagtaataattacattaataaatatttaaaaagtaaataaaaaaaataatatttatatatattttgagtcaaatttgttacaaaattttaagtatgtgttaaatttagaccactatacattataattggaattcagttttatgaatacgagctaaaaaaaatacatatacaccatatgtattggaaatgctcgaagtagaagttcaaagaataatttatatacaacatatcataagacaattaccaaaataccttcactgaatacgtttcacgtttcactggcctaaagaaattaacaaaatcatttatttcggcttaaaatgctctagttcatatatgagctcaaaaaggcagtccgctagtactatggaaaatgagtaagcttcataaaccaggttttttttttatacttctcaacttcaattacaatatttaacgcatatattcccccatctactttcttgtaatctttagctttctgtcatgtgaagagagcattattttgtttgtttgatcaaaactgaacaaagttggttagatattgtactgtaaaccaaaatgaaatgagagataggatgctatcttaatattattctagttaatttcttccattatcttatgcaatttatcttgtactattttcgttacttttattgtcgttaatttgtttcgaattcttggtgtttctgacacgatctagtatcgatcgtgctaaggaaggtgagaaagaaaccatcaacaattaataaatgaaattccaatataagaaaaaatcac

SEQ ID NO: 48203 - DNA, 1484 bp, Cannabis sativa
  modified_base (681)..(685): a, c, t, g, unknown or other
tattcttgaatttgaaacagtcactgttttgattagtggtgttcgcggtgtaggtggtgcggttttgactattttttcaaatcaactcgcacatgaggtttttcgaatttcccaaacctcacccgcaccgtgaaactaaaacaccacaaaaaccgctttgcaagagatggtggggtgcggtggggtgcggtttttgcattttttgtagttgggactatcaccaaataattaaactatcacaaatacaacaaaattttagcaacatttatcaaaaataccatgacttgaaaataaatattaaaaaacaattaagtttcaaaaatacaataattagtgggctttgagtttaacattcacatataaataaatataaaaattggtatttttataatgtgtggtgcggtgtaatttttaacggatattaataattcaaaaccctaaaccgcaccgcaccgcacagtttaggaaaaattcatactgcaaccgcaccacaaataatttcaaggcacatttttttttcagtgcggtgcggtgcaggtagtttgagtggttgaagcgctttgatgacccctgttaaccccaaaaattgacagttaattttcgagattagtcaacaatcagccctaatagtcgagagacatcaattgtaagagtcagtcgaagaatgactgagtcaatgcnnnnngcctaaggatcgttaatcttggaaatctttgcttacaagtcttggggtatatccgtgcaactcgaaggtcaaccccgtaacaactcattactagagttagtaagatcaacttactaggttataattgttagaggacttttgtagtgatatgttcagaattagatcattccacaagcatagtattcaaacatctctttcttatttttccaacgcatcttgaattgtccgattccgatgtatattgcgaatctttggccaaaatactaagacttccaatttaagacagcttgctatgcgagatgacggctcccatgcgagttgaccgattgttgtgtggtcccatggctattgtgaccccatgggttgttgtgcaagcccatgggccaatgggtgagacgggggcatttgggtgagtcatggaactttcatgcaagtggtggagcatttgtttgacccgcgagtgaaagaaggagaggctatacatgtgtggatagacatcatgtgcgaggtattgtcggagtgagtgcatgggggctccatgtgaacccaggggggggcggcatgcaagtcgtggatgagtggtgaagggtgaccttggcatggtgcgaggcggtatggggctcacgtgcgagcccatgggggctagcacgtgagccgtaagtgcatgtgcgggagggagtgcaagtgagggggagtgtggtgtgtgcaagtggggggctcacatgcaagccatgtgtgcatgtgggggagtgtgtccaagtgagggggtgtgtggtgtgtgcgagttgggggctggcat

SEQ ID NO: 48204 - DNA, 1719 bp, Cannabis sativa
aatgtacgagggtaaaagagtaaacttacaggaacaacctaaaatcctccttaaaccctaaatggagcttcagtatccatctttctcatcgttgagagctcaaagctgagaagaagcttctacactcttctacattcggttgttttctcttctctgattagatatggcgagacggctgatcccattgttcgatcgcattttgattgagaaaatcgtccctcctgcaaagactaactccggcattcttcttcctgaaaaaacttccaaggttactcttttctccccacatttcttttatccgcacacacagagttcttattattctataagttttgttcgaaacatggcttctaaagtaattacaactccgactacctgattctgataagaaatgaaaagaaaacaccagtatttatgtaataaagtttgcctgttttatttgatttttgtgatttctgttcacgattcatatgtttttcaaatgtgtttccgtttttctgtatatctgtttgtatatacttgtaattagtttggttatgcttgcaataattatctttttgctttcgacttctttggggattttaatgtaagtatgaacctctttgttgttttcttatttaattcatttgcgtttcctctcttgctaatattgttatcatgttcttgattaggtccttcattttacacgaaaaagaagagaaactacttttgattaaccttacatttctgcaatgatttgaaatttgtttccaataagtttagcattatattaatcttactttttctttccttttctcttcatgggctcatttttgctgtgtgtgtttaataatttagctgaacactggaaaagttgttgctgtcggtcaaggaggtcgtgatagagatgggaaactaattcctgtacatgtaaaggaaggagacacagttcttttgcccgaatatggaggaactgaagttaaactcgccgataaagagtaagatttcgctgctatcttgaattatgaaaatatccatttaagagttcgtcatgttgtgttaatatttttaaactagatggagatatgttagttctctttgttcattagcttgtaaaatcaaatagtgcactaacatttttagacaaataacagtctttcatttctttttttttttttttcaaagtcatttcttctttcgttttgaacatcaaagagccgtgtattccattttgaaatgtcctcttcccccttggaaactttcttatctttatggtagttgtagttttgtatttactgatgggtgagatacaaacctgtatcagaagaaagtccacatgttcagacttcagagcatattgccttggagtactatttagtaattttatcttgggggcataccttattgttaattagtatctttgaatggtgtttatgctaaaggcattgttcaaaggataaagttatggttgagaaagagggcagagaaaactcggggtaggaatataagagctagtgaaaatgaaaagctggttggtttgagttattcggtttctgaatgtctgaataattctggtctcggtttgttagtttgtttttagtatttaaagatcccataaattttactctccaacgtctcatgtttcaagaatcaaattattgttaattagtcagaaacttattggttgacacggaaatatgcttcttactttgctcatttttttgttccaggtatcatctg

SEQ ID NO: 48205 - DNA, 1243 bp, Cannabis sativa
taccagcacagttcgctactgcgtggtaaaagtaacttttaccagcgcatttcgcaaactgcactcgcaaataggtgaaagttttaccagcgtacatttgaagtggctaaaatctaacttttaccaatgcatttatgcgctgagaaaagtcatttttgccagcgctttccattttatgctggcaaaagttctaatacaaacattgatttgccaacccccttttgccaaaacatcacaagtataaattctattttaccagtgcaatactaacttttgctagcacatttcttgtagtgatagcacatgtattaaatcagaaagcaacaattagtaataaaagaattttgttttcttatcatcatctcagcattttcctttattcctttctcttcaattagttaattctattcaatttttttcaaagcaaggtaattaagatttttttttttttaacttttagttatctcttcttctttccttaaaacaataagctaagaatattattttcttttcttttctatatgcttttttgttcttcttgatcatgaccttccaattttcttctccctcttcttttttctttatatatatacattcaacttattcatacatatattaatataattatcattgtcactcctttatataaatatacatatatctccttcaacatttgtctgtatcaaatttcactagacatcttctaaaacatttctcctaattgttgatcaatctctcaaccttctttcttatatcttagcctgtaagtctatttcaacatttagttgtactttaattttgtgtatgacaataccttcagctatatttcttttattagtataatatgaacttttttatttcttatatacttaatggaagctagttttgttatcttataatcttttgatgcttacaataagattatctttttatttgttattaggatgtttcattgattcattttttttaattgttgtttgtttgttttttacaggagaatacaagttaaaaataaatggagatgatccaacacttgacacattggaagcatgagcatcctttgctattagttaaggatggcatgaccacaagtaacatgtctattaaatgtaaattgtgttcacgttctaccattgcaggagatcctttttatggttgtgattcatgccaattttacttgcacaaatcatgtgctgagttgcctccacaaatatatcactcttttcatcttgcccaccctctc

SEQ ID NO: 48206 - DNA, 1905 bp, Cannabis sativa
tgaccatgttatcttggtcaatgacaacacagccagctattccaatgaggaattaattgagatagctgatttgaaaaggaagagattggatatggttttttcaagtggggccgtggactgtcaaacagaagaaattgttgctgaagtggagactaataaaaatctatctacagatgtgactaattcaaaaaacttgcacaaggtgggtcttggtttccaagcccaccaagcattatgagtacaataagttggaattgtcgtgggcttgggaactcacgagcccaacaattcttaatggacatttgtgtccaaaagagacccaagtttgttttcctttgtgaaactttgtgtaataaagatgctgttgagaaagtcagaattcgattgggctttgaaggatgtttttcagttgatgttagtggtagaaaaggtggtattgctatgctatggcgtgactcctctgaagcccatcttcttaactattccagtaatcatattgatatgattattcatctctctgatatggacccgtggcgtctctcaggcttgtacgaggagccaaatcgaaacctcaggcatcgtacatggaatttgcttcgagacatggtgtctgaatctaatttaccctggtgcattatcggtgatttcaacaatattctgagtaatgaagataagaagggaggtcgtccttacccctcctccctaattactggttttcaatctgctgtacgtgactatcatcttatcgatttggaactcagaggttatccgtatacctgggaacgaagcagaggttcttctcgtacagttgaaatttggcttgacagggctatggttacacaaagctggctggatatctacaatgaggtatcacttactaatcttgagttttcatcctctgatcattcaccaatacttttactccctgaaatggctactggtacaactttttctgctccttttcgatatgaaaatgcttggcatagggagcccctatgcaaacagattgtgtctgatgtctggagctcgaaccaaaccgaatgcataacaagaaaaattgaactctgtgggtttcaattggctgcctggggtcgtcacttgactgggaacttcaagtctcgtttgtctaaaagtaagaaattgctggctaaattttaaaactctaattttgattttgatgctgaaaactttacagtggaaaaaaacaactatttcgaaatcttagcacagcaagaactttactggaaacaaaggtctaagcagtattggttacactcgggcgacaaaaataataaatactttcatgctacagctagtgctcgtaagagatcaaaccatattcagcaactccaagacaataacgacatctgttagagttggaatactggtttagaattgcttataaagaaatattttgaggaactttatcattccacaaactctttttctgctcaagttattgataatgttaaagtttctgtaaacgccatacacaatgaagctctcttacaaccaatacaagatgaagaagttaagttggcagtgttttctatgcatcctgacaaagctccagggcctgatggtatgggacctggttttttccaacaccattgggatattattggctctgatgttattaaagccgtgaaggagtattttgatactgaacttatgcccgagagacttaatgccaccaatcttgtgttgattccaaagaagaaacactttgctgttatgggtgatcttagaccgatatctctgtgtaatgttctttataaggtcatctcgaaagttttggcgaaccgtatgagggatctgattgactgtgttacctctgaaactcaaagtgcttttattcctggccgactcatctcagacaatgtaatggtagcttttgaagtcatg

SEQ ID NO: 48207 - DNA, 1708 bp, Cannabis sativa
  modified_base (991)..(998): a, c, t, g, unknown or other
taacattatattattaccagaacagctttgaatattattatctacacatatatatcaaattgatcaaacaattctaaataagtatatatcaataaagtcttaattaaattacaacatttatttacacataacaaaagtgtatcaaatactagtcatttgtaattagtatttttaagtggtttgtatgaatattgtatgtaaaaaatatacgtaatatgtaatttgagtgtgggtaaattattatcaaatatatattatgaatataatgtatcatttctaattataatataaaaaaatgttagatttctctttttattgttaatattattttggtcttattaatttaatttcttactaggtactattctcatacacttaaacaaaatatttaaggttggctgaggttaattagcaatattcatatgttgatgtggatcatatattagctatttatatatgtcagattatatatatatagatagattaccccaatttaagagtagtgtcggagctatcaaggtcttcaggattggaaatagcagtgattgattcacatgattccccttgttctaatatttctacatctattattggaactacaccacttgtacctgccatctgctgagaatatccatcgtaaccaataattaaacaaattaataattaaacacccacatatacctataaataatataattttaattaagaaaatgaaaaaaaataatatggactaggttgagaaatggagacaggatgcaacgggactgaaaagagtagctcatgcattttatatatatagtgttacaatcaatttcgattcaacggcattttgagttggattcgaaggtgtcaaaacagcaaattaaccgagaggagaaatattcatactggtattcaatgcttgtacatatgcgatttggggataagatgaatgagaggttaattccatctcaaaactaattgacaatgagaggagtagctcattcctctnnnnnnnnctattatctttccacacattagctgtaagactctctaataaatatagtgaaaatagtagaattaatagtttagctgctattaaacaaatagggtatataaagatagaatatggtttcagaagttattatttggttgagatcattgtaattaggaaggaagtgatctgttgtactagtggaacattgaatataaatggcttatttactcaaaaaaaaaataattaaattgaataatatgaagctagttatatatatatgttcgatgatataatatgatcaggggttctggtcaaaacctaagttagttatatataattaacaaaacatatataagatgtaaccaattatagctgaagcaatatacaataaaagagtaaattaataatatgagtaaataaggcgtagttgaattgaaatgattttcatgtttgatcgagtggttaatgattgtaaggcgttattaaaagtatttttatcttttttattaggcgatcagctaataaggtgactcataactttattagagctactttattttatcctgattgcagttacaatttagagtttgtcccatataatttgttactttctttggtagctgaatttaatggttaataataataatatgatgattttctattaaaaaaaaaatatgagtaaataaaaaattcatataattaatatatattaaattacctgttgcaaatgct

SEQ ID NO: 48208 - DNA, 1061 bp, Cannabis sativa
tgtgtgagtgttagaggtcctgggttcgagtcctaggtaaaacatgttgtaatatataaacgcttaaatcaaaaagtactactcttttatatttatatacatgcatataataaaggtaagtctacagtcactaaatgagtattttggtgatcacttatttgttgtgtatgttatatttatttaaaattatttgtaaaaaattacgagtaagttataatgttaaaaataaaatttatatatgttgttgcatgtgattgttttgtttttatatgtgtgataagtagttattttaatcttattttagaattgagaactattcagaatttttagaaatttattagtgataaatagttataacgtacacgatcataaaaaattagattaaaaaagcattttaaatgccaaaacggataaaagaatttactataacgatcatttaagcagggtcagtcctgagttgaaatgggtcataggcaaaaaaaaaaaaaaaatagacatttattataaaaataaataatatttttaaatttttttttttttttatttagactcttaaaatgagtaggccttaaatacagccctaatctaactatgcttaaaattggccctggctttaagagggtctattacaacagaaatttctaaaatgttatgatttatagatatagatattgatcatgacatatactgatattgatatacatatgcatgtgttatatgataagatattaattgatgatgaaatatttggatgtgttatgatatatagggttatggtcaatatgtaattgtgtaaatgtattatggaggcatattgatgggtataagttgttattacaaataaattattgaagttggaaattgtaatttatatacttgtactctctcctaagtcaacttgtattgattatcattattgtgtgaagtatgtgacattaaatataatatatagaatgtagggcatatactcaaaagaatgatgtaagtgatgatattatttgttaattacatttttagtatatttaattgataaaaatattttcttatttattattattttt

SEQ ID NO: 48209 - DNA, 2453 bp, Cannabis sativa
atcctcgagaaggattgttttcctctgcaacttctcaggtcaagcttgaagcttacatagttgctaactgggcagcatgtcaagatacaaggagatacactacatgatttttttattttcctttgaaattcattgatttcctagaaaagcaagaagcaacagattatacttaggtcatcaacagaggcaaaatatcgagctatggaaaatacaacatgtaaattttttcggttgtaatctgtactgaaggaattacatattgaacatgaagggcctgccattatccatcgtgacaataaaataacttaatgtatagctgctaaccctatttttcatgagagaattaagcatattgagatcgattgtcttataagtctagaaaatgtttaataagctgtaattaaaattttccgtgtttcatctaaagatcaactagaaaatgtgttcacaaaggctctttttcctattcaattcaacaatttcaaagtcaagatggggttaataagtatatttaatccatctcgaggggaagtatcaagaataaaagagggctagtagctattttattgttacttgagtctgttaagaatttagacacttaaattacagagttagttactagtttgtaactaactcatgagttgtatctctacttgatcgagctatataagctcttttattatacaatcattgattcaatatagggaattcatttcattacttccactctcattttgtaatagtaatctttgttttttcttaccctctatttcactactcaaattttaacaatttatttatttacttatattaatgctcactgaatatgagactcgcatcgatgattaaatcccttccttgaggctagttcaactctagataagtgatacaccacagtatgaagatatggaaatagaagaaaagagaatgatctttattgataattctagaaaattcgagagttcttgtttctctcccaaaagcaaaagctcattccaaattagattaagcatacccttaacctttacttttgtacaatatattctccaaaacattctaaataaaaaagatacgaaattgtaatcttaattaattctaaaataggccatataaatccatataaatccttccttaccctattgcatacgcctatcataggtgtatctgatttaaggtctatcattacccctgcccaaacttgaaaagaaggaaattgatgtagaatgttgttgtacttctcccaagtggcttaaaagaatggcaagtccttccatttgatgagcactttcatttccttgcgaccatctgaatgggtactacaaatacccaataattttgcaggttcaaccaaaagctctaaatttgaagtcgaatgtggaggcatcaaaggagaagaattgttgtgaccaagtgcgacgatgctgcgtagtatgaaaaatagggtgcactaagtatgtaagtggtaaatccaacttataagatgcctcacaaaaatgagacatcatcttataaggaccataaaattgtagagaaatcttctcattatgactggtagcaagtgatttatggcgaaagggtttgagcatcatgaagaccttctatctcaccacaaaattctcatccctccaattcttatcagtggagaacttcatcttttgttgagctcataagagatgcatctttaggtcatctaactgagcgtctcattcctccaatatttcttccattgatgaaaccaaagttgtaccacatttgtatcaaataagagaaggtgggtcacgaccataaaatattttgaatggagtgtacttagatgttgaatgaggaagtattgtactaataatctacccaagcgaaccagccaagtgtgtggtttttcaaaagcataacaacgtaaataagtcttcaaacaccgattcacatcctctgattgaccatctttttggggatggtaaatattactatgccgtaactcaaaaacttgaagcttaaatagttcttgccaaaaattactcatgaaaatattatcatgatcataaataatgcttcgaggaaccccatgtagttgaccaatctctttcacaaacactttagccaccactcgagcagtataaagatgtttcaacatgatgaaattgaaatacttactcaatcaatccaccacaacgaagatagtatccataccatgagaatgaggaataacttcaatgaaattcatggttaatttgtctcaaactaaagtgggtaaagtgcgcagtgcagtgcggtttacggttttgaattgttaatatctggttcaaaccgcactgcaccgcacattatgaaaatactaattttatattattttaggtccaatatgtgaatgtccaatccaaagtccactaattattgtattgttaaaactttttttttttttcatatttattttcaagccttatggtaattttgacaag

SEQ ID NO: 48210 - DNA, 4017 bp, Cannabis sativa
taaaagattcttatttagtaataaattgtaaaaaattaattaataattaattttttacaatttattactaaataaagattttataaggaaataaatttttagcttactatcaggttacgagttatttatttatttacttattttaatttctaaattaatcataagcattcaatagtaatccaatgactaaaaataaaagtcaaatatgtaaccattgaaacctattccataaatatatatacatgtttcttttactaatttgtcttattttctcaattcggaattttatttaacaggtactgttcgtcgcaggcacggatacgactgctaccactttccaatgggcaatggcggaactacttcgtaacccagaatccctatctaaagctagggcagaactcgaccaaatcatcggaaaaggaaaaccagttaaggaatcagacgtttctcggttaccttacttacaagccgtactaaaagaaacgtttcgattacacccagcagtaccattattactccctcgtaaagccgaaagagatgtcaaaatcaatggcttcacaatcccaaagggtgcacaaatcttggtcaacacatgggctataggaagagacaatgacatatgggatgaccaagaattgtttaagccagagagattcattgggtcagaagtggatgttaaaggaaggagctttgagttgataccgttcggaggaggccgaagaatatgccctggattgcctttggctatgaggatgttgcccttaatgttagggacccttatccattcttttgaatggaagctcgaaaatgggcttaaaccagaggaaattgatatgaatgacaagtttggcatcactttacaaatggctcaccccttacgagttgttccaagtcttgcataatgttttttatttctagaaactttttatttgcaacttcagattttaaataagctgtttttattttgacttaataataatttgttaacaactgaaacaatttgttagtttctgatattaatcttgttatcaatttgtttattttttagaacaatagatctttttatgtattcttagcaaacaatgaatttacaaccaaactatatggacatattgttgactatgaaatttggattagacctttaagtcacactcgttcactagattggtgagattgaaaaaagtagttaagtaattaaaagaggcacaacaaatttatagtagttcacccccattattgcgatagtaatggatgtctactttgagtttttatttctcacaatatggtaattacagtattagactaagtatcagaaactccaaaatctagagagagaaagtctatagagagaagctctgaccttttacaggtgaaggaggcccaaaaaataggagaaaaatataaataagttattttccaccactgatagtgatctaaagctgaaacttagcttctggtggtgatggccaatttttagtgcccaaggggtcccgctgcgggttactcggagcttatttttataactccctcgggaatgaattttgatgacgatagcttctgaattacaactgatgtgtgagagatgacttgatagagcgtttaaatatcttcaaaaatcaagtcgaatcgtgtcaattgaataaaaattgagtgagttatgggcattttaataaagacagtttaggtccccactacccaggttgacatcccaacgcccaagttgacatatgatgtcaacctggatgttgggtaagtgtaaaaacgttcaagggatgtcgtttaagatgtataagtgatactttgatactacttagtaaatttatatgttctggcatacctggtcatcaattcttggggatgttgttattttgcaaaaataagaggcttgaaactcttcatttctagatgtgttgaaaatgagaagtgcaaagttgtgaatttgattcctatcaattcatagatcattatcatcgtaaaaaactaaatggacggtcataacgacatcagactaagcaaaacccaacgcaccaagcatttattgacctgggtgttgggccctttctctcgagctcctaagattttatttttgatacttccaaggcttccgaacttgagaacgtggtctcatacccggtttttgacaattttggattcaacagtcgcattattgaattatttgttggcatttgagcagcaatttaaggcagcatcccaagttgattgttaacttgggcgctaggcccagtcctaggtcaacttgggcactgggccctgtttacagggactcgagattgttattttcttccaaggtttacttgaatcttcattatttctaatggtagaaaaatatcacagaacactttttgctgaacttgaatgaaaatagcccagactgacaaaatgtcaacctgggcactgggcctcgctttcgccccttcaaaaattctgtttggtccccaaaaatagtagaatctcaatattttttgaagatggagaagattcttgaaagaattctttaaaaactccattttaaatggcctaggttgacaaaatattaacctaggcgcaaggccagccccaagtgtcaaccttggcgctgagccctgttatttgtgctcaagaattgttgcttttactccaaaaggacttctttccccatttttgataaaaaaaaatatgatgcaatagtcagatctctgatcaaacacttggaaggcgcctagattgacagattttcaacttgggtgctgggtgcacggggcccagggcctcggatgctcaaaactcaacttactccaattttgattctgatgccctgatgcctcaaatatgtcagtggcatgttggcatgtctaattgatgtttcaatgtaggttttgacaactttgcactaagacggtcccgaaaactgaaaccctagttgaggatgtcgacttaggcgtcgggtgaaaccctaggtgcccaagttcacttccaagttgcaagttcatgtaatttcagctctcagggcttggattaggttgcttcatgtcttcatggtacagaatactaaaagatagtagttttgattcgagttattgaagtctaaatttccatctcggagatcctgaagttaacctgggcgcaaggctagggtcccttcccaggttgactgctataactcgagtctactcaactctgtgacgtcatccttcatgccacgtgccaaacattgatgttcccatcaccagggaaagcttttgggttaacatttgccccacaagttaactttacacttgtgtggagttgacatgatgacgtgaaccgagcccgtttcgcttgaaactaccaaatgggcatccattttgacatacttagacacttgtatctgttcttcaagaattcccaattatattaggactttgaacactttttcatattgcttacgaatttcaaaaattaattaagaaaaaaaaggaaaaatcttatctttttttcacttatgttttatatcttcctttgaaaaatttgaaattttcttattttttgatatggaattaggattaattgaattggaatccttatcctatttgaagatgacatttgaaattagagagagaaaggaagaagagaaaatacttttggccttttaattatcatttatcttttttctttaatttctcaaatttttccttagtcccaataacatttgaaattgttgttactttttaatttttattactatttatagttgtataggaattttaaaattggcttagaaaaggagaagggaaaagaataattatatcttttacttattatttaccttttccttagaaaaccttaaatttaaaagactcccattagctttaggattaggatattggactcaactataaataagtgagttgatgtaacaccctaatgctaaggcacgctacaataattttttaattatagggttatctttcttaatcaaagaactttcttgaaaatcgtgtcaaattaaaacttttattttaattatgatactttata

SEQ ID NO: 48211 - DNA, 604 bp, Cannabis sativa
gaccaccccaaacaagaaggaaccaacctctaatccttgtgttttctgtgttttgagctaagattcaaggagtatttagtgaaggttaaccctaactatagcttttgtgttatttgagcatttaatgagattttatcttgcaattttgtgttattgtggttgttagggttaacttgatttatgggttagtttcttgggagtttatccaacctagtatattgccctaggcagctcttgttctatttgtgaaaaataacgatggttcccttagaatatgtattgattatagggaattaaacaagctgatgatcaagaacaagtatccgttgcccagaattgatgatttttttaatcagcttcagggaaagattatgtttttaaagattgtcctacgatttggctatgatcagctcaaaatttaggccgagaatataccaaaaactgtatttcgaaccagatatgggcattatgattttttggtaatgtcattcggattgacaaatactccagcgacctttgtggatctcatgaacaaagtgttcaaggatttccttgataactgtgtagtgtttatccacgacatcctttgttgggttttatgccc

SEQ ID NO: 48212 - DNA, 1751 bp, Cannabis sativa
taaacattgttttctgaaactatacaaattgatgcacattgagtttctggtgttttaattttattctatttttgacattaggtagggggttcgtacttggaaaagctagcaccattagaggctattatgctagtagtactatgctcttaagaatgcatatggtagttgagagtgaatatgcgttcttaggattgtgttactttggtagtttgcttgtgttgatccttcttaataaaatgtgttatgattttcatctgaagagaaactatttactattaaaactgttatgaactttcttaaatctcgttaagcattgtgcagattaaaatattggatatcttgttgttctgttacagttgaaaagaaggctcaagtttgatatgaaagttacaatgggaaagttaactttatgttcaatatgaaaccatacaattacaacacagctcgaaccaatggtttttcgtaaaccagatgtataaattgtgtcattgagtttggcctcaagtaaaatgatgggtaaggaaactgtgccacaaattaacagggcagatagtgttgaaggttgctcacctactcgcaatgacaatttagagccttactcaactcgcagttcagacatggaggctgacttagaaacttgtcgcgtatgccaatgtgctgaatcagacaaaaggggagatgctgccttagagtttctaggtgttactcctcctttacacgaagcacataaaagcgatggagcattgaagcctgataacaaactgattatgaatcatgctgacaaagatgtctctgttaagaagaatgttagagaatcccatgtcatggaatttgtgagtcctgatggggaggttctcatttgtaatgatgatgtagaaatgggctcgtgtggttatcaagatgcgttaactgagcttggttgcttgtgcaaaaatgaccttgctctagtacactatgcttgtgcactgaaatggtttgttaaccatggttctactgtttgtgaaatatgtggacatgaagcaaaaaatattagagctgcagactacagaaaggttttggcttctttgaaagaatatgaggcactaagggaaaggactgccagtggagaaccctatcatgcccaggttccctcaagtacaggtgtagaccctgatgctgtagctgctattcgaaggcagcggttgagtgagatttcgctatggtttagtccacacaacaacaacaacaacaacaataacagccatattgcactttcacaagcatctgaacaacctctaaataatgtcactgaagaggttttccctactgaaaatcctgcaactaggtgggctgtggaaggtactgggattttgctggctacaggtttacttactgttactcttgcatggcttatagcacctcgagtcggtaaggtatgcatgttttcgatttccacttgattaaataattgcagatacaaaatcagatgacacctttacaatgttaagatagaacatagcaaataccatgtactaaaaagcaattcaaatacagtgcttctacttttacttgcttgggtcaatcaaactaccacttggtacttcgattttctaaatatttttaggtacataacttataattgtaatgaacatgaaagaaaaagatttattgaatggggaaacgtttgtgacacttaggcatgcctctaagttgtactagggccaatcaagacttgtagggaagtcataacagagtggaggtttttttttttt

SEQ ID NO: 48213 - DNA, 1862 bp, Cannabis sativa
ggtatctctggaggacaaagaaaatgagttatgacaggtgcacatttatgcttttgtgtatacttttgtgtcaggtgagatgcttggtggaccaacagggggtgttgttcatggatgaaatatccaccagattagatagctcaacaacatatcaaattatcaattctatgaggcaaattgttcacatgttgaatgaaactgctgtcatctctttactccagcctgcactagagtcttacaacctttttgatgatatcattcatttatctgagggtcagattgtttaccaaggtccccgtgaacatgtgcttgagttttttcaaaaatatcctaacaagaaagctattattgactttcttcaagaggtaatgtaaatgtaaatgtaattttttattttttatttttttgttgaaacagttatcatctataaatgtaatttaatggttataattaccaggtaacattgagaaaagatcaagagcagtattgggtaagagaagaagaatcttatagattcatcactctcaatgactttgtggaagcattccaatcctttcatgtgggacaaagaataaaagatgagcttctgctctatttgacaagactaagaaccatccagctgctttagcaactcgaaaatatggtgttaaaagcaaaaaagagatgttgaaagctgtcttcagcagagtgtggttgcttatgaaaagaaactacttcttttacattttcagactcatcaaggtaatagtggttttcaattcttcggctgagaaccgttgcttatgaaaattcaatcctatttctgcatgagtttaatttatgatcttcttttcttgtttttttttttgtttttttttttaaaaatactttgattgtggcaatcatcgtctcaactgttttttttttgagaactgaaatgcatcatggcacaatagaagatggaataatctactcgggtgctctattcttcattgtggtcatgtttgtgttcaatgggatgtcagagattactatgaaaatccagaaactgccagtgttttaccctgcatgtgtctatgctcttacacgtggattactaagatccctattgcatgcttagaagtcttgatttgggtttccattacatactacctaattggacttgatcctagtgttgcaaggtaatatgatttaatgtgacttattatgaagaatcttagttttgaacctcttcaatagttgggctgagttctattttgtaaactattccagttttttcaagcaaggacttttgctcattttcgtgaaccaaatgggctctgcattattccaagctattgcaactacttctaggaatctaattgtagttgacactttcggctcatttgtattgctcatgcttttcgagctaggaggctttctgttatcaaagattaaacagactttcttttctttcattcattcattcatttttatttatgtatatttatatttctttctcattccgactgttatagtgtttcactacagatgatattaagaaatggtggatttggggttattggagttcaccccttatgtactatcagaatgcaatactggtcgatgagaccaatagagtcatgtaatttattggactaaaaaacatttgagcatgtagccttcatatatatttttcttttcacttttgagtaatttttgacaatggaattgatttttgggtttcacttaaaattataacaacctggaccaaatggaacaagacatctatgaatcgaagtgttagaatctcaaggattctttacaaaatcataatggtattggattgggcttggagcagtggttggttacaatatcattttcaatgttctttatgcactttc

SEQ ID NO: 48214 - DNA, 1621 bp, Cannabis sativa
ttaaccgtgtgtaggtttatatgtaataaagtgtgtaatttgtatttttggtgtaaaaatttcattaagagtgatatttaaaaattaattttctttttagtattgagatgaaaatttcttttttttttttcgagttcaaaataaaaaaaaagttcacaatgtattaatcccatttgtcgaaatgaaacctcgcggattgccagcgtggcagagcattcccacgctaatccggcccctatataaactcgcatccaccgttcccaccaaactcatcaaattcaaattcaaatcaaatcaagaactcaaatcgtttcaacaaaacctctcaactttcaacaatggaagccaccaaatcaaccaagggagccggaggaaggaagggtggagataggaagaagtccgtcaccaaatccgtcaaggctggacttcagttccccgtcggtcgtatcgctcgatacctcaagaagggaagatacgctcaacgtactggtactggtgctcccgtctacctagctgctgttcttgaatatctcgctgctgaggtaaatctatttttctcagatctgaatcatttcaaatgcgattctttgatttagcagaggttaatatttttgatcgaaatgcaggttttggaattggctggaaatgctgctcgtgacaacaagaagaatagaatcaaccctagacatgttcaattggctgtgaggaacgatgaggagttgggtaaattgcttcaaggtatcacaattgccagcggtggtgttcttcctaatattaacccagttttgctaccgaagaaaggtaaagctactgaatctgagaagcctggatcgaaatctcccaaaaaggcctaaacgtattaatggaaaataatagggaaaattaggtcttgtgtttcctgttttcttctctgttttagttattgttgcatatatgtagttcgatatatagtaaattcagcttatctcattaatgaaatgaacgaaattattcacttctcactccatttctccctatgttaatatatatattcattatgattgtgtgtacaattcagtagtgatggaaatgaggatgggaattgggtatcaaagaatcatttcaaattcatttggtctctgcttttcttggtagtaaaatttcatgagtctatgacttaaactcaaatgcatggaccaagtttttgacacaacacttgttccaaatctaaattttatgccttaaaatgagggaaaacttgccaataatttcagaacatttatataatcttttggtcagaaataaagctactttcaactgttaattagttaattaattatacagctactactctaactgtttatatgacaaactcattaatcaatgaagctaattattctcattttcatgtttcttaacagcttcaccaacaaaacataattaaggaaaataataatgctaacactattaattaatgaaagcatattagtcaaaacaacattcattaaatccaatattatatccaaaacaaatatatttcgaatatactacactttccattagtaacaacacttttaatatgagtttttgtcttgacatcaactccatacatctaagattttgaggtgtcaagtgttcttca

SEQ ID NO: 48215 - DNA, 1628 bp, Cannabis sativa
agagagaacataattttgaacctgaatccccaagtgagggtgttctttgatggttctcttattaactatgttggtgttgtgggtgtggtggcctattatagctcgggggttatccttgcgatcaagacagaggtgtttatggctactacctctttggaatctaaggtgagacctggccttctggttacctccttggcctgtgaaatggagtggctcaatttagtttttgtttcaaattgcaaggagttgtgtgatgcctcctcaatatacatggtggccttcttggcatgttgctggttcatggcttacgttgtgtgaagatttagatttttttttaattgtaatatttgttggatttttagagccttaaatgttgttgttgatgccttagcagtgtgggcaggcaaacaaactttagtacttctctttctttttgggagttaatgttagaatttttttcaggatcacaattgtatatacaaaatatatgtttggtaattaactaaataagttaaatttatgacttaaggatataattgttattattttaatatgtagatataccataaagacaatttttaatttgatgatcaggggacaaatttgaaatagtcaaaaatgattaattattatttttaattattaataaacaggtattagtctccattttcgcatagcttcatatcgtgtcattctctctttgtatttccatcaccaagagactaaggtttcagagaaaagttttgatgcgaaaattagaaaatcataccattccaaaattaattttatggactccggtacgtttccgttaatctttgattttattatttaaatctcataaattaattagaatttagatccaaattatactattttacagttaacaacttctgttgttaacaaacttggttttggttagttagtttctatgctatctcttctttattaaaaaataaaagttcataagcctcttataataagatagaataagtgtgaaaacttgtggctattttttagttaaaatttagtctctttattaggcgtattgtcaacaaagttagggattcgaacaaaattaatgataataattcataatcgacagctattcatgccgtagagggatcaattagtttggtgatcaaaattattgctaataataattaattaaatacgtacatataacatataattagtattatggtctaccttaggggaacaaaataatacatatatgatttacaaaattatatatattattcatgtttttttttaaaaggaactatatataatataaaatttatttgagtatgtatgggataataaaaaaatatatatatgtgagtttattaattactcacataataccaaaaaaaaaaaaattctagtatatataagagcatctctaatggaggagtaaataagtggtgaaaagctaaaatatagctcatttaataaaaaatgtgctccaatggtgtgccaaaaaatgatatagtaaatttgacccatagcaaatattgtgtcaaattcggaaaaatatttactatgatgtaaaatttacagcacaataaatgcactactttttaatttatatttatgtcatttcgattattttattagtatatttaact

SEQ ID NO: 48216 - DNA, 1709 bp, Cannabis sativa
attaaacatgtgtaaatataactactcctaaatatataacatacaatgataattttatgataatattttaagttttcgaattgtttatgttttcataatagaatttgatggtttattgttgttagataaatactaaaaatttataaacctaactaataagtataagttatctagttattataaaaaaaattgaataaacaagaagtaaaaatactgtcaaattgattattaagatagaataaggtagaatactttgcgaaaaaagaaataaattgaaagaaaaatgattttatttattagtttttaaaaaatattgctcatataaataaaaatataaatgaaaatttcacactattttttaataaatataaaggtacccaatataatacattaaaatcattatgattcgtaaagtgtgtaatacaaatgtatattttagaaaatcacacattaaatttcattgagtctaactataaggaattatgcatatatacatttataagagttatatagtttagttaatataaaatgaattttaataaatctcatggataaaattaatattaatacgaaaaattaattttataggagtaaaactaaaattattacaattttttgtataaaattgtaatttatgaaaacttgagtgggcccaaagatggtatgattttatttacatagaaacccttatagtattcaatgaaataaaattaaaaaaatagtatttagagaaattttttatttttttttttaaaaaaatatatttaattatcatatttctagtctcatttttattattttgtttaaatagtttcttattatatatttttattatatatctgtccaaattaaataataataataataataaaaacagcttaggacagataagacaccaccatcataaactctttctcattcatgaaaacctaaccctaaaaaatcgctgtcactccttctcgtctccaacaatagttcgacattgacgtctcgctcgttctcgctgtattcaaattcttcaacgtccctggcagcttaggcagtacacaagacgagagcgatcgccggagcacattcgaggttggaaataatgggaatcgagagactgatcatcattaagaatacatgaatggtattttattttgaatcaatttatcttttgtttttgatagacactgaatatcaatccctattctccttcttttttgttcttgtttatttttgtatcactttcatatatataattgttgatgaaaaaaatttcaggattcatgatgatttttaattgtttgacacatgttttgtttgaatatatgattccgatttaagataattatttttaagcctatttaatctctctaaaaaagcctatttaaaatctgaaatcgtgcacctatatctctctattatgcctttgcatcttttgttagtaatgttgtgtgtaatatttctaaggtttagtgtgtatgtataattttactaatgttttgagggtttatatgctttgtagtttgcttggctggtgatacgactattaaaggctttgttctaagtagttggatatctaattcttccttaggtttgaagttgtatttttgtttgtctctgttgatgcttttactttacaagattgtgaattcattagccaaagaaaaaacaactatatacatccgaaaaccattactacaatatgggcctttagcttccct

SEQ ID NO: 48217 - DNA, 1006 bp, Cannabis sativa
ttttatctatatattaatatttttttcacaatttcgtggccctaagcgttcggggcctcgaggcgcccgcctagcctgcctaccctcagagccggccctggctctcaccctcccggagcgcagagcgaggcacttagacaaccttaatgatttcttgactttttcctaattaacttccacgtgtcatgctaacgaaaatacaaataacaatgtctattagactatcattatgaaagttaggtcaaatatagtattgacttatctttcaactaaatttggtacaaactttacactacctattagggatggttttagagcatatcctattgttgatgcaaagttgtgatgtattactaaaatagttcatcttacaaaaaatttgctcgtaataaaagttgtaccaaatttaatagatactcaaaattgtagaattttagcaaaatatataacacgatgtatatatggagtaacattaattaattacttattttttaaatttactgttatatcattttaattatattgttattattttaagtatatgcattcagtgttaaataaacattcttatttttttattattatattttcgataaatattaaatgaacacaataattttttttttacatcaaaatttatatttgtgcattgaaacaaaatgtaaaagttgaatttgttaaaaaaaaaaaattgtaaaagttgaatcaaatgtgcatgtcacttattgatttttaattggtcactacaatttttgcatcttataatcaactaactaatgaaggaaagtaaaaaaaaaattgtataaatgtgatattgtattaaataataaataacactatatttaaataaagtaatatattgtattaattattatgacaaaaaattttaatataatgtaagttgtattatttaatacataataaatagttagtattagcttgtattataatattaacaaaagatcctagatcaaccctaattgccgacctggatttaggaatcaac

SEQ ID NO: 48218 - DNA, 817 bp, Cannabis sativa
ttttctaaattttatgctcagccctagttttgaaatatttaaaatttatttttagtactataaattatttaaaatttcacaaaaaattatgtaattgtctaaacaattataacgtataatgttgggaatttaggagaattattatgattttaacaacacattaatcgagtatgaacacataaaaaattcaacaacaattggaataacaataatagagattaaatcaacaataatagaataacattaatattgttgttattatgaacagcaagattaattcaaaagaaacaattaagaatgaaataaagattaacacaaatagcataaatattattttagaaaacatcactattgatttctgtgaaatcaattcttcaaagaaagcttaagcttgccacattagttcaatgatatccaaaaaaatctttactctaagccttcattaaattgctaatgacctctctcatggaataagatctacaacttcaagcatttgagttgtttaggattagcaaaaccctaagaacaaatcttggagagaactaaggaacatttagagagaagaattttcgagagagagtaaaaatgaatgatctaatcatttttgctctcctaacacccttatatagtggaggaactataattaatattaacccatatggttaggttacttgatgaggttatttggatcattttttacgtttaagaaactttgaaattttccatgcgaagctccaagcgacatgtcgccaatcattgggcgacatgtcacctgctcaagaaataaattacaaaatacaaacttctgtcatgctct

SEQ ID NO: 48219 - DNA, 1070 bp, Cannabis sativa
agtctcgtaatttgtaaagaaaaagaataagtaagttgtgcaatttcacatagctcgtagaaagttggtttaaatggattgatgtgtatttcttatgctaacaagatgtatctttttttcagtagtccatcatttgaaaactctaaaattaagtgtgattttatttagaacaatcttagatgttgtgagaagcttttccaataaacgtgtaagtaaagacaaaacacgatgaaaaaactcatattgttcttcatgcaaatgactttttttgtccaacttcaaaattggatcataatttccaaatatttgttaactagatattttcccaatatagaccactttaataattagtacaaataacaaatagtaaattttcctataatgcagttttttgctttaattggttagttgacaagagcaagataatgcttttcactttatttggtatttaagttttcatggaacatgtttatatagtgtttcaatttcaaactccataagtcattttattagtttccaaagggtccaaattaatcaaatcacaccctaaccacccttaattttaccaattttaccttaaattattggttttattagaaattaattaaggtcaaaagttgagatttttttttcttcctctaacttattttagttggtctctattagtttattattatcatgacataaactctattattttaatttttttttctttttgaaatgaaactctattattaatttttttccacctattcaaaattatgcatgtttacatagtaatgtgttacaagagtgaaataaaatggtaatattagagcaaaaaaaatgaaataaaattggttaatttaataaaaattgaggactaaattagacaagaaaaagaagaaaaaaaatgacaagaacgtgacgtaatgatgacgtgataaaataagcggctgaaaaacaagaagcacgttctgattggacggctaggattgaatctcttgaaagaagacaaaacaaaccctagactccactcaatggatcccacctgtcaaaactgctctctatcatggttgccacgtcatcaa

SEQ ID NO: 48220 - DNA, 788 bp, Cannabis sativa
tttttttttttttttttgccatatgtcaaatattaatgttcaaattactagaaattttttttgagtcaagagtaatgatattacttaatattgttttaagattttttttattgttatttacgtaactttgaattggaaagaattttagtaaaattaaaatgattgaacaattatttaaaaaaaaacaaaaaaaaaagaacaattatgaagtacaaactttgattttgaatactcttacaaaaattaaaaaaaaaaaccaatggtttcgaatcaaattagtaaattattaagtgaattagtttggttcgatttaaacatttagtggttctaatttaattttgaattgtaaaaaatatgcaataatattagttttgttcgaaaaagaaaatggaggtcaaacgcccaatccgtgaacagagtaagtttttcctttaatgttgtttctcatttatataattttatggcagtacatgattaattataaataatttatattttgttgctataatcaaatttaatattatcaaaactcaaaacacttaacagcacaaccattttctcataacaaaaaagaaaaggaaaaaacagccattcggaaactctttgccctcctcaaaaactggaatatatataaatatatatatatatttatatatattattgcattatcttcatggccacgttgagcaacattattaggcaaaaaagaattaattcctcaaaaatatattaatatagctttaaactttacatgtacattgtgagtgaacaatgtgcaatcatcaaaa

SEQ ID NO: 48221 - DNA, 1109 bp, Cannabis sativa
atgttaataggtaatgtataaaaatgggtttgtgtttgaaattaataaaactagtttagtttatgtttgtgatatatttgtgattggttctaggaatgcttattgttatttgcatatgtaatttttgtaggaatctgattgttgtattaggaacttgttagattatattacattttataaaacaatataagacataatttagtaaatatttcataagactttataattctgacaataaagatgtaaatgaaaataattttcatttattatttttatcacaaatgaaatatattctgacaattttgatataaatggttcaacacaaatctgaaaaaaaaaaaattactcaaaataatattagtagtataaatgtcaactgtaaatgatataaagataagtcatacatccaaccaaaataaattttttatctggatgaccttgttaaatgacaatattggaaagtaatacaagatgtgaatcatcaacaatcaacaagtttggaacattattctagacatttagatgggattattgatgttgtatttgccatagatcatagaaatttagttatacaacaatctgatcaactaccagattatcaaagtaatattgagtattaatttatgaagatttcaaagtagaatgttttttattatatatgtattgagtattagaaaatatgtttcatacttactaacaaattttgtatgcttagtataaaatgtctgcagatattgctagttattatagcggagatagtgacagtctagacccaaatcctataaggatcccaaccatgtgcgagtcttctggtaaattttctttcattttaattacactaacaaaatgattaacatgtgtatagtaatgtatttattttcgttattcaaaacaaaatcaatagctcatgagaagaacaaaggttgtgattctagtcttgggataactttagagaagaaaaagaggaaaaataagggacaaccgcatgtagttgatcagattgtcactatgccgtctgatcacaatcccaacacatatgcgcccccatcacagcagcctatgccatctgatcacaataccaacacacatgggctcccattgcagcagcc

SEQ ID NO: 48222 - DNA, 859 bp, Cannabis sativa
gagctgaatattcagtcttatctgcttattcatctggcagaccttataaaagtattctcaggttccagggttgagaaattgattgacgatgtgaccgtgtacctggtttcaattacttcagaccctttatatgacacagatcagaaaagcatgttgagaaattcatgttggaagggcttttgtaagtgtttggatgaagcttcaattgactctttagactacgtatctcatgttgagaaagccatggaggtgctcttttctttgttgcccctgttgcaatctgatgtcactatcaagatggatcaggcgaattgtgaggaagaatggtctaatgccgttagatgcttagcaaatgctcggcgaacttggatattgaacttcctggaggtatagctactctttattttctatttctgttggtttctctcttgaaaaattcttccaacatgctaatctgatttcataagattagcagccttttgtcctgtgaaaatgtaaggttgtaatttccccttactgacactattgctatacagagtgtaagagttcttgtttattggtttttgcttgagattatgtggtgagttattttcaagttcgtcaagatgcatgttttataacttcaacattttcatatcccaggtgtccaagacagacctgctacaacatgatcaggttattgaggttctcaaaaaaattcaagccaaagctaggttaactagaattggttgcttggcatccactgagttgggcagactaaaatctcaattgttgaacttcaagtctcatggttagttgtactgtttcttcttctttttttccaatttttacagttcttttgatctattttcgttatatt

SEQ ID NO: 48223 - DNA, 1519 bp, Cannabis sativa
agacccatctaatgtaccacgaaatacattccgtgaaagtacatcacgggacaaaatcgtgttcctatatatatttatgttatattaaatgtaaatgttattttaaatgggactatataatagaaagtgttattttttttttcaaaacaatacaatttaaatttaaactctctacatatatatatctcttgtattttatattaattagtatgactatataaacccattgcacatatttagaaaaatatttttcaataacaaaaaagaaaaaaaattgaatatatatcattatgtatatcatccaccctcaaacgaaagggtgttgaatgcactttgagtttgttcttgaaataagtaaatatgtccttgcttaatgctttggtgagaatgtatgctacttggtcgataaagggatcacatatctgacttctatttcctttgccaaaatttgatcacagacaaaatgtagatcaatctcaatatgttttgattgtgcatagaacacgagatatgtagctaaagaagcagtgccctagttatcgacctatatgattggagaagtcggaagttatccatttaacctctgctgttgagttttcctatacacgaaactcactatcggtacttgaacgagctatctttttttgtttcttagcagaccacgagatcaagttctctccaaaaaatactgcatagcacctgtagatcgacgatcatctgggcaactagcccaatatgcatccgagtaagcttgaagatcaaggtgaatagaaggcttaagaaagagtccctcatgaactgtacctttttagtgtctacacaaccttttataagcttcccagtgaactaaagttggagcatgtataaagtggcttaatttgttgacaatatgaaggtaatcccttgtcaaagtcaggtaatggagagcaccaagtgtgctcctatataggcttggatcatgaaaaggttcatggtaagagaaagttaaatggttgagctggttggtgagggactaggctacatcctagatgtatagttctgaagatttcgacccccaaaaagtagtgtagagcattaagatctttatataacagagaattttgtatcaagatccttgatcagttgagtgataagattttgatttggacctgtaatttctcatattatttttattgtgactaaaacttttagccacgaactttttagtcacaacgccgtcacaagaaaaaattgtaactaaaacttttggtcacaacatttttcacatttagccacaacttttgttgtgactaaaaagtgaagttttttgtagtgaacaaatatgggaatatagtttaatctcttgtattgttactctcttatcaagtaaaacatatcctaattactgtcaaattttaaggttcatttgagtaattttggctagttatatatatcgagctttgtgggataattcggagaaagtaacaacatcaaatttacgatatctttctattccgtaacaataattatcaaacaaagg

SEQ ID NO: 48224 - DNA, 1204 bp, Cannabis sativa
tcgagattgaaattcccacttgactcaaattcttttcaaacacttgcaaagtgccaaagcctataaaaaaatataaaacagagtaaaatcaaatgaaaccaataattcatgtttgaacacttatatgaattgaaccccaaatgcatataaactgccaaagagcatataaaaacaagtatatatatatatgtgcaggcacatagtattaatctagtatttatatatgtatataatgactttttattcaaagtttgaaaatatatatactgcaacaaactgagaagaaagagcattatgaaaagatgatattttattttataaagtgtgtatgactaagaaaactctgcccaagaaatttaagaaactcataactaactaaaaaccttcttatcagaagaaaaacaaactaaaaaacctttagcataatcttgatgaattaattagcacataactaagtacgtaacaatataaattgatgaacaagagagggtcaacggtcaaaaggcccaaaagggtcaagttgcttgcagagattcaagtaagcaagatataggactcgatctttagccccagtttgatgaatctcataatgtttgaacacttataatttaaatggagacaatgtaatagtgtctgatataaagcctctaggttctgcgacatcactgctgactttgacttttattatcaatactaccataataatattctattatatgttatgtatgtatataaacagcacaaacttcctcatatctatctatatttccatttctaaaacacaagatttccactctctcattttagcattatccctctgccctcatagcgataacaaacaatttaatgaaaaattaaataaaagaaaattagagaacaaaaatggaagattagaagaaaacatactctgagatattgagagagtcaacttgggtctgcagtagaagaagagcaatggaacttcgattgtgaagaatgccaatctcagatattgagagaaacaaactgagactacagtacaaaatttaccacttatatgcatatatatagttaatcaactcggatcagaatctgcagattacacagggagtaaactcagttcagaaagaacttactcagaatcagagaaggccgatcgagaaaagggttgggcagctagcaacctgagctctgtcgtcgtcgaagtgagagagagagagagaga

SEQ ID NO: 48225 - DNA, 970 bp, Cannabis sativa
ttttttctttttttgtatttttctatttttttccctattttttatgggtttatggctttcgggaaactaatttccattgtaatcatcccctataaataatggaaccattgcattgaaaagggataagaaattatacttttgagtagtctattacgctgctcaaattcctataaaagctttcaagagggatcaatctgttcttgcttctctactcacaagtgaaatacaaccaaaaggggagtaagttattaccaaataatgggaataaacctatataaaattcagtgcttctagtttatgcttgataatacatatattcttatttaatactaattgatttcatatcgcttttgagattcaacgtcgttggccaaaagtgaagtcaacaatgtttactaaaataaaacttcaatatttgacacctaacccaacctcatctagacttggaactcggtctcggacctcaagccatgggctcaatcctaggcatgtgaaataaaatgtaaaaaaaaatatgttagacaaaaaacaaataaaaaaatgaaatagaaaataatattttaatattttcgtaaaactatttttaaaagatttagctaaacaccctctagtgctttaaaaggtgaaaataatttttaaattatgaagttaaacacctccaaatctcctaaaggacaaatcactctacgtggcacttaagatataaggaaagtatttcacaaaaaaaaaaaaaaaagatgaggaaagtacagtgatcttaaattcaattgtcggtattctatttagaggtgttcataaaatactcaatccaatctaatttgcacgatctaatataatccaatctacaaagtttggatatccgcacttgtacggattgaattggattggaaaatctaaatccgctcttgtgcaaattggatgctggttgacatatcaaagtaaccgattcaatccaatccacacatattta

SEQ ID NO: 48226 - DNA, 1561 bp, Cannabis sativa
accacgctttccagttgccagagcgaaaggatgaggaacagtgcacttcgtacgtccattgccaacgggtgattttgaaggaggagagctagacttctgagctgcagatttctcgtttttggcctcggacaggccctcatcaagatttatgcttttaactcctagaacagcttgctcctcttgatgtttctcaataaccgaattctcttcagtacattcctttacttcgtagtccttcgcttcagagctgtcgtccgatgttgtcggagcagcatgaactctatcatgagaaataccatttggcttcttctccatatccaaacctgaaagttccctgcccatgacactgcacataaatgatacagagagttgagtatttatgtacgtaaaaaacccttttcaagacaatcaaatctatatcatttatattactgttcacgacaatcaatcacaactgtaaaaaatttatttacagttacacttaggtgagaacctcatgaagaaaattatacctcagtcaccaaattggattatttaaacattcatattcatgtgctttgtcctatcaatgcatactttacaaaaaccatttagtgattttgacattttctggaaaaacaaaacgaaacaggaggaaggaaataccatataaagcaggcatctcatgttgagaagaatttttgcagagaacttaaatgaaaaactgaaaatcaccagaaaatggaaaaaagaaccaaaatgaacattaaataaaataatatatatatatatagcaagagggaaacaagtagacatgtagatagaagaaattgtaaaaagccagctcacattcttgaaacctgtttgccgtacttttcatttaaaaatatgatggactctcaaatctgaccaaagatgcaatacaaaagtttgtataattctataaaccccaccaaacttaaaggagtagtacagatctgggataacacagcgtttgagctccaataattaaaaataggtatagaatttagcatggtaaattgttgtccaaatttcccaacacaaaataaggaaatattcaaaagaatacgcactcatataacatatacaacaaatataaacttgtataatcagcaacaccgacgagtaagatgatcacctggaactcagaataaaatctcaaaatgaagccaaaaatcaaactgggtgtcctaggaaaggcgtaaccactattcacctacctatgtaatcatgttgactagaaccaataaggcaaaacaaacttaacaatatattgaagtagaaaaatataaccagcaaaataaaggcttgaataaaatttgcaagaatacaacattagaactttctaatgaaagttttatcaaaagcaacaagaaaagatggcctgcaactgcaaacttcaaacagttcattttccccttgtttttgggtgtgagtgtgagaggaaagcagggtcttaatctacaaaagagaaatcaacaagagcaaaaatacagttgattggcccatcaaataaaaccaaaatcaaagggcttcaactattattttattttattttatt

SEQ ID NO: 48227 - DNA, 2157 bp, Cannabis sativa
attggaattctcatttttaatgcaatgcaatgttcaatcacatcaacatataatgagcattacaatgttcaattatgttgtttttctcatggagactaagaagagcaatttggatatggaaagaatttggcaaagtttgggattcaatgtgggcgtggctgtttcatctgttgccacagctgaaggtgttgccctgttctagaaaatcagatgggacattcaggttctaactctggatatcgataagatcattgtccgcttcagggaagataggaactttaaaccttgggtgtgttgttttgtttatgctcctccgaggaaggaactttgtgatgattactgggcaaatttatcaggggccgtggataatttgaacatggcctggatggtgatgggggatatgaactcagttatcacataggaggacaaaattggtgggaggcctgttactgatacggagggccgtgggcttagaaatttcatctttgattgtggtagtgtggaccttgaaggtgtaggtgcaatgtacacatggactaatggccaagactgggagcatctcatcaaagagaagttggacagggtgatgttctcaacctcttggctggaacaatttgctaaggctgagactaagaatctccctattcgacacatcaaccattcagcgattgttcttgatttatttcttgaaggtgatcattttaagtccccctttcagtatttagatgcctgaaatatggacactgaatgtaaagaagttattcaaaaagcttggtcgcaaacaatttagagttatcacagttttattcttagtgctaagttgaagtgtaccgcgattgcgttggctaaatggaataaggaacgctacgggatatgcaagaaaaaactcgagttattggacaagccactcattgatgttcagaaccgtgctccctctcttgaaaatgtgcaacttgagagttccattttacttgaaatagatgaaattgagacatgacaagaagccatttggaggcaaaaatctacagaaatgtggctcaaagatggggataaaaacttaagattcttccacacctcagttcttgttagaataaagaggaattttatttggtccatcttggaggatgggactcattggatagaaggttgtgatcacagttactttattttaaattttaaagagatcttttcctcttctaatcctgtgattgattatgagatttactcgttgatcaacccttgcttaagcaaccttgagaatgagtcaatctgtgctattccctccttaattgaaatcagagcggtggttcaggaaatgccccaacttaactctctaggttcggatggctttcctacaaaattttacaatactcacggagatgtggcggggaaacaaacagttgagtttgtccaagaatttttctccattggaaaattcactaaggtaattaaccgtaccttcattgtcctcattcctaaaaataaggatgcatgctgctttaacgattatcgacctataagtttatgcaatgtaagctatacaattgtggctaagatcatggcaaacagattccgtcctttgttagagaagattatatcccccttccagtcggcgtttgttaaaggaggatggattgctaaaaactttatctttgcccatgagattgtgcatgacatgggcaaaaaataggggagttatggcttcgtgggaggtcaaatgtgatatgtcaaaagcctatgataggctggaatggtgctttatcgagtgtgtgcttaaggcttatgggttcagtgatcaagtttgtggccttatctctcagtgcatttctactatttggtatcaactctttctcaatggtggtctctctaagacattttacccatttagaggtctcagacaaagggaccccctttcccatatctctttattctttgtgcataagttctttctcgattgatgcttgaaaaggagaggctgggtctgattaatgggtacaagctaactagatctagtatacctatttgacacttgatgtacgaagacgactcaattttctttatttaggctaatcttgggtgcttggatcagatgcgtaaggttctggataagtattgctattggtctgggcagcagatcaaccaaaataaatccaaaat

SEQ ID NO: 48228 - DNA, 1099 bp, Cannabis sativa
aaattattttgggccattgcctctttatcaaatatggcatctgataaaacaactgatgaagctccattagcaatatactctcccactgaatctgcaagaagttggaaaagaaaatcaaaatcaaccaaattcagaatcaatgcaaaagtttgcaagtaataatacgagaaatctggatggagggctttgaagttgatgcagcaacactaaaaaaacatgcgcaaacaaatattgtttcccaactcaaatattgttgttattttttttatatgcattaattttaacttccacagtaatagattcgcacctatagtaattccttgggaagcaaccattgagatatgaggaaaaggcttcttaagtgctgatatgtactgtacaccacctaatactgaaaccggatatacctgtctccatataagatgtagattataaacttcaatccctataaatttaactaagatgaaatagtcacaatttaattaatctatgttcaatacaccttgataaaacacaatttcagaagtaactacctttaattaatctatgttttatcaaggtgtattgaccattagattaattaaacaaaaggaaaaaaagacagttaaaaactttaacaaaccctatgttgcaaagcaaaggggttcacattttcttgaacatgatgggaaaatgataaatgactgatgatatctgaaacaatttggcatgttgtcgaatttagcagggcaaattaccaagactcaccttcacaattttggcacccgaatcatgagcagacaatatctgtaaaccatatatacatgcttaagtactccttgaaggataaagttacagttacaatcttaaacagaatgcaaggatgcataaaatgctcggagattcattgaagaagatcacatgatacttatgaaagacagatataaaagctggataagatatttatacatatttagttttatttaactgaataactagagaatttagtttgttatgcattattagaattagttacctagttgaaatagtttttattttttaatgttctttcttttaagtttgatacttagtctatgctttgttatctataatagttgta

SEQ ID NO: 48229 - DNA, 4884 bp, Cannabis sativa
ggcgcgtgtgtgtggtggtctagtgtgtgagtcctcatccatgcgaacaaaattggataccccttggggccccaactcatgttccaaaatttcacattatatacacttctaatgaagtattcctattccatgtgagattcaatacactcacacacttcactttgcattttataaaatttcactaagttccaacaatcccccacttgaaatttttaaaaaatattttatcgaggtttagtctaagcaataagatttagcatagacaaatgtatttttttgatttgaacctttgcattgtgaatacaacttagaatatactagagtgactcgttgtaccacgcacaacgtttcttaggtgtagtccaaaagctcgtgttttaatggtcatgcacttctatcgcagtgtagtgaatgctttagaaatttacctaaatttcataggaagcgaccccacttccacattcacgtaggcgagtctgtcaatatagtactcctgtagctcagtacttcactccacatagagtatagatcttattaagattttctattatctcaacccttagatcgcttcaggaattcatgcttcacatttttttataacaataacatgatctcattcttatcacatcataacttgttattacccattgaacctatttcttgggatctccagtgtataggccgggttaccattatgagtgactcattattctaagggcaatagtcctataccttttgaggttttaaaaactttctctctagctaatcctttagtcaaaggatcagctaagttttcatcagtgcgtacatgatccactcttactgcttcaatagagaagaattctctaatagtactatgtttacgacgtaattgtcgtctcttactattataataacagttttgaactttcacaatagtcgttgtactatcatagtacatcaacacaactggtatcggtctttcccataaagggatctcacttagcaagcttctcaaccaacttgattcttcactagcagttgctagtcctatcatttcataaacatgtttaaaaaactgttttaattaattacattaaaaataataattttataaataaattttctccaaaaaataaagtaacaccacactcgtccccagcttgatcggtcagacaggtggcggcaacagcgcgcttgtgcatgtgtggtgctctggcgtgtgagtcctcacccatgcgcacaaaactgggtaccccttagggccccgacccatattccaaatttttacattatatacacttctaataaaatattcttattccatgtaggactcaatacactcacacacttcacttctcattttgtaagatttcactaagttccaacaatctcccacttgaaatttttaaaaatattttctcgagcagtagtctaagcaataagattgagcatagacaaaggcattttttgatttgaacctttgcattgtgaatacaatttagaatatactagagtgactcgtagtccttaactctatctctaacgatgtaccacacacaaccttacttgagtgtagtccaaaagcctgtgccttaatggtcatgcatgtctatcccaaacgctctaaaactttatccaaattttataggaagcgaccccactttcacattcacgtaggtgagtctatcaagagtactcctgtagctcggtactctactccacatagagtatagatctcattaagagtttttattatctcaaccttagatcgcttcagcaattcatgcttcataatttttataacaatagcatgatctcattcttatcatatcataacttgttattacccatattgaacctattttttgagatctctagtccatagatcaagttaccattattagtgactcattattctaagggcaatagtactatacctttcaagattttaaaaactttctctttagctaatcctttcgtcaaatgattggttaagttttcatcaatgcatacatgatccactcttactgctctaataaagaggaattctctaatattactatgtttacgacgtatctatcgtctcttaccgctataataacggttctgaacttttacaataactgcagtattatcacaatggatcaacacagttagtattggtctttcccataaagggatctcagctagcaggcttctcaaccaacctacttcttcactagcagttgctagtgctctgatttcatgagactccgtagtgtactatgccaaaattgtaacaccctaatgcttagacatgctacaatgattttattacttactgtgctgtcttttgctaatcaaagattttctcaaaaatcttatcatattagaactttgaaataaaactctataaatatatacatccatacaaaaagttgagatcccatctttaattaaaatttacaaacatattcaaaatacactttatataaacacgtcacagcaactacaaaaatgaggcactagtcgtcttgagaccgaactctccaggtcgaaccaatcttaacatgtacaatcatccccgagctctggactcactgatgctcagccttagtattttctttacctacacatgttgataatatctgtgacttgagagactcagtaagaaaagcacgtagcacataacatattactgatttgtatttgggccatacacttatatacaaggctaagtacgtgatcaagataataatttaataaataatttctctaaaagataaagtgacaccacacctgctagctcagtcggatagcggtgcgtgctcatgtgtggtggtttggtgtatgagtcatcactattcaaaactaggtattccttgggacctcaactcatgttccgatttcagacattatatatacttctaatgaatcttatcccatctggaactcaatacactcacacttcatcacttctcattttataaaatttcaagttccaacaataatgtataagaataataatatattcttaattacaatttttcaaccaatggtcataaataatattgtataaaaaaaataaagttaggccatctctataattaccatagaaattaaattgtatttttctttttactttttagtggagattggagaatagattatatataattatatataatgttttttattcacgttgtttctacaaaaatcttatgtttgttgtttgcatgttacttgtacatagttatttttacgtttgaactattttttttaaagagtttttatgtttgaactatagttgttttaaattattataacttttctataaaaaaaaactgtaattgaaaataaaatcggtaaaacataaatcatagcacgtacaaattttttgtttttcttttattctttatcaatatatataaaaacaattagaaaaaaagaaatgataagcgtgtaacaaatattacaagaaatattatactattattagtatattttaatattgagtactatatatttttatttaataaataatataaaaactactaactaattataaagtatcacatcaatatagtattgaacaatttaaatttctcgttggttcgttattttgtcatttagtatggtaataatatataatctatctataatttataactattatgtaaaagtattatgtaaagatagtgagttatggtaaagttattctgtcatttagtatggtaaagttatttaatttgtcatataatatatattgttttgttaatatatataaattattacttttaaaaaatagtgggtttttatttttatttttattataataattattttgatattagatttataaattaaatatttcgaagaacaatatattgtatttatattgtgtaaaagttgcctaccaaaaatatgattagtgtttttttcttttgagaaatttttactattattacaaatcaaagttcatttacaataatagaaaaaataggatgaggtattttccctatccaaatgacatcttcatccaactctagagcatatttcacaaacccgtgagcagcttgattagcatgcctacgaatatgcgtaacagtaactctagggaaaaaggacaaaagacaacgaacatcacctactagatccgaaaaagaagataaatctttacgtgacgtggccaaagctgaagaaacccggagagcgtcagtttcaacttgtgttattggtatttgttgttgaaatgcctaattaagactgtgaaaaagtgctttggcttccatttcatcacttctgaaatgaccttggactgatttggataaagcagcaactacttcccctttgcaattttgaactactgctcctatacccaaaactttatccatagcattaaaagccgcatcgacatttaagacaattgacatccggcggcttccatggtatcccattcatagcagttgtggttgaaccagcggcattgttcatggagttatgttgcattttctgtggaccatcagaaccttgtctagcaacatgttggtttggcacactctgctggcgattgctctgctggtatggccttgtagatggaggttgcatctagtttggtggaaattggtctggtacatggcctctttctcttccttttgccttagctgatcgatatttatcaatatagatttgagcctaaaatacaagaacagatgaaacacgatttgtaccaccatgtaacacgcagtttcgatcattccatatactccatattaggcagatgaaattttcaaactcaaccttatccatggattttgctttatggataacataatctccattgaacatggcagggacacaattaaaatcaatactgaaatgagtttgcttccagacagccttagcaaacttacatgtgaataa

SEQ ID NO: 48230 - DNA, 1555 bp, Cannabis sativa
atatatatcacttttaaacacgcgaggggttgaattggcaagtgattttttttttactttttggaagataaatcttctcaattatcatttcacttgtgctttaccttctaagacaatttttaatggtagatataaaagttgtgctatatttagcataaaaaataatattatgatatatttgcatcaatttttaatattgtcattcaaaatttaatgtttttaataaaatataaaaaataataataattttatcattacttttattgtgtaaagtaataagaaaataatataaataatccaatatcatttaatgctataactaaacatgctaataaaataatataaatgacattataaaataatataatccttgtcttctggtccttgatcctctacgtcttccccgaggtcgtctagttggctaggaggggcatcgctgtgcacagcctttgcagccgctgcttcgcgctccaattcagtgtttctccgatttgactcaccttgtcgttgtcagagttatctattttctagttacactaataaaatgtatctagtgggacataggcatcctcacttcgtctttctgaattccacccaaagtttgtttaaattctccatcatttcctctctgagagcaaggagtatcaattgtgtttgtcctatggaaattctaatgttctttccctggatgctgagttttttctcgtggttgattatcttcgtttcaaggagtatcgtctgccatagatgtaaagttcgaatatgtttcaaggaggatattttttgagtttttttttttcttacagggctctcaataaaagcatcaaactatgtacagatttttgttaattaacaaataagtctttttgtaataaatgaactcaagattgaaatataataaaagaaataataataataaataataagaggattttaacatagttttaaagttaattcttcaaattctacgagtccatcttattctgagattttataaagtgtgtacataatacaataaaaagattggtataattctctctttctcaaattgatcgccccttttttattccctaggttctatccctatttattggacttttagagtgatagttcttctcttgggatctttttcttgtaaccgttcataaaatatggacaatcctcacatttcacatttacatcgcatgagataatagtaaataactgcttataattgctctttagctttatttgtaagcggttatactgactatgtcttatttttctcgcaatacaagcaatctcctcaagacgctttattctgtagagggttgtcagcgcctaagtatattttaagtaatacttctcgcgttcttctataaatatatattgagtgaaataaatgcgagatgctagtcacagtatgacaattatgtgatgaatcatgttgggaatgttgtccttagtctttcaacatactcacgagtatgtgggtcaatgagctgcaagctctttgaataatctattatctatcctttccaagcagtcaatctgttgtgtattttgtgtatcctga

SEQ ID NO: 48231 - DNA, 1262 bp, Cannabis sativa
  modified_base (53)..(53): a, c, t, g, unknown or other
ttataaataatttgtaacagataatttttgctatttctttcatctgtgtaaanctagtaacatgatagggcccatctaagtcaagtggttttttcttttaggttgagccctcataaatgtaccataaggcttagcaacgtcctttggagatgactcaaacagtttcaaacaaaactgttcggaatgatcaataataccacagatgaaacaaaaagtgggaataaactcatacttgaagttggtccaaaacaactcacctcccatatgcttaatcttcatgtgtctttcaaggagacagtaatatcaacagcatggacatacaaataatcacgccacaacccttgaaagtttttcgtatctgtttccacaagagtgctaatatacttagccaccccacataatacatcgtcagatttgaatccatacagcaagtcatgatcctgaacccacaaattcagattattaatcacaaaagatcgtggatcctcccctcgctttaatcttgcaaacacaaattacattctattgaactttcacggagaaccttccacaactcttttcagatttagatcatgataaaattaaaataaatatggattaacattcagctctttcacatacattcctttgccaggctaccataacgaggccatcaagtgcctcatcatgtcaaaatcaatagatctatgagtcaaaaaacgacccacaatgcaccaacactcatcaatcttttgctcctcattctcagggaaatcacatatgaaatcatgctcttcttccccttccatcacaatattggcacactcctcctctatatcacgaacagacatgctattagaagccatagttgacctctaaaatctttacaactcctctgaattctcacgaccaacgtgactacaaaacttccacagaaactctagccttgattcccatgaaagaacttgacacaaaaaccctagcatgcaagacacttgaaacacataaacacactagaaaaaaacccaacacatgtcaataaataagactatttacaaagagacagttatattctatttaatttaggagaagatgaaacttatagagttaatattattagagaacattgtcccacatgaattaaatataaaagtattgagccacaaataaaaacacaggctactccactcattatcaattgattttgagatggaatccgatgatttgtggtatgttattcctattagtggtatgttattggtggaacgagcttagtgtgatac

SEQ ID NO: 48232 - DNA, 1866 bp, Cannabis sativa
ggagaaccgagacactgatgcaggacatggatgtgctattaatatgtcattaagggcatatgaagatagctgctgtgagtttacacgtattaacatccttgacaactgagaaggagctcttcgaccatcgatgatgctatcaagaacctggaagaaaaatgttctttataaatttgtgtattgggctgagaagaactttgaaattaaaatgtcaggcaactttgataaatctcgttgacacatttacactgcactaagttgtcctaactcattgcgttgtggcctttggctatttactttaatcataataggagagatgtaccaaaatatgaaccttagtattaagtgatgactggtgagtgcttgtagaggtaatcataatcaaaagtactaaactttttcatgtaattctattgcacaaaataagtttatacacaaatttcagtataaactttccagccccataaaagttgatttagtttaactcacttaaatttattattctcttattagtgttttgccttctttcatacacatcctttaaccaaagaggaaaaaaaaaacaaatgcttctgtacaattcaatcttacaatagcaaattgtggctgaggtatccttacttgttcaaaattgttggtggttgtcgcgcaaaggtagcctgtgcttctagtagcatcaaactcattgctgcactcttccacctatccacaaaaaagtacagtaacaagttccccaatggaaggtgtctgcccccaagtaaagagatattatgtaagggctaatacggataattaaattctttagttaaagaagccaaaatctaacctcttcaacttgtgtggggtcagaatttactcctagaactggaatagaatcatcaatgaaatggctggactgtaaaagagtgccatcacctccaatagtaataaccaaatccacattccgaatggagtatgataattcgttacgaaatataggcttccactcaacaggcttattccgtaagacatcctggcaaaagtttatggcatccttgtgcactttaagcctgttttccaagtaacgcaatacctgcaattcctttaaaagaaaaacagaaaccataaactttagcataatagaattattaaatgttttgatgttgattctaaattttgaaccagtcttgccaaataaatttattgtactcgttggtatgtgataaagttctccaagttgtgaaccaaacttatatatactaacattcaacaaatcatcttcttttaggcattatatcaaacaccttgaatgcataatataatgaatagaagcatatttggtgagactaagcttcacaaagaaccaacaaagacaattataataacaacaacaaaaaaaaaatacaaataatgcataataataacccattaggggaaatcatccaaattggtcaattcaatacagagaccaaagcttaaggattacatggtaaaattcaatatcagaaagcagaaacttagaactacctggggattagtgatgcgagaaagcccttcagtttgccaaactgggtaaatgtcgaacggtttcaacaacagaagcaatttcctcatagccattgctactgactagttactatgttcgtgtagtatagcttccacccacataagttcataaccattaaccgctccctccttaagggggtttgtttgcttttgggcctgaaatacgacacgaacagcccagctcactcttccagtatcactctataccttttttatacgggctattttaaaaaatatgggaaaaattattaaagttatgataaatatggcataaaaagtaaatgtcactaaatatgccattatctaaccaatcaaactaaa

SEQ ID NO: 48233 - DNA, 733 bp, Cannabis sativa
gtaaagtcaatcgagttttcttaattacatacgggtcaaattagggtagattaatatggagcattctgactgagttagtgtagcactttttaaatggctcttctaaaagcatgggaccattcggccaaccaaaatatacacatcaccttaaaatatatattttttttattattttttgtctcattcacgtaaaatttgtcatcttgtcttaaaaaaatactttaatggtccaacattacattttattttggctaattaagatttttgttctctaaactataatcttaacttttttgactgttaaaaatttctcctgaattattcagattgttagatttaaggacttttatctcatttcattcaatttttaattcaatgattggttatgtaataaatcatgctccacagactttaataactcttaaatcatgtccctctaactttggtatgtagtactaaattatacctcctaaactttcatttatgttagactttccttgctaaaattagacaaaagttcttaaattcaataatctcaccagttcaaggtgagtttttaacgaccttagaagttcatagggtatgatttgatacatgtcaaaattcaaggaataaaaattctaattatcattttttgggtcccatatcacattgaattaaggctaattaggatttttgccccttgaactttggggtaagttgaaaaatacccctttattaatcaattaatcaa

SEQ ID NO: 48234 - DNA, 1420 bp, Cannabis sativa
aaggtctattaatttttggtctgcgttgcaatcgccccatggtcattggccagctcaaaatgctggtgtcatgttctacattcctccattggtaagttaattaaatacacaatgttataatcataatcctttttagcttaataattaatcaattaattacaaatgataactgcatgtaggtattttgtatgtatatatgtggacatttggacaaagtattcaataaacatcacaagagagaaatgttatggtacatgtattgtcatcaaaacgaagatggaggatggggattacatattcaaggcccaagcatgatgatgtgtacgcttcttaactaccttgccatgcgtattcttggagaatctgctgatggtggtcttgataatgcatgctctaaagctcaaaaatggattcatgatcatggtggtgctgttggctctggctcttggggaaagacatggatggcagtacgctattattctatctatacatgtttatctattaaataatcatgatgtaatgttagactatacacaaattctagcttgtgaattaatatctttttaactgcagatacttggtgtatatgaatgggatggatgtaacccaatgcctcccgaattttggttttacccatctattgttcctcttcatccatgtaagtattcgactaagctactttatttttttctaagttatatgtttggtacttcgataaattaaaatttaatgttgcttacattgcaatttataatatagttgcaaagcaactcttacaattatttatttattttttaatatttttttagacaaaaaagtactttaggatggtaaaattaagattcaaatagctaattgcacacccacttctaaggatatttatatgagtgccaataatttttttgagtcatcattttcatatggtaagttattcttaatcaaaaaaaaaaaaaaaacattaggaaatcaaatgtaactacattatatattttcatgtaaaaaaaatgaaagttacaacttaccgaacatataaagaatattggattaattacaccaaaatacgttaactatattttatttatggatatatgatgacttaattaatttaggtatatgcccaatatcattttacttaaattgatatagcggtatacatttaaattggtatgaaaactgctttatttgctttctcttcctgtaaacttttattaagcatttaatattaattttttttttctttttctaaatcgttttctctcttctgtaaacattcaatatcatttcattggctatttcattccactaaaagagtaacttccacatttatatatacactacattaatttatatagtatattcataattttcttacactatattcataattttttaaatattaaaaaataattctttctctttt

SEQ ID NO: 48235 - DNA, 745 bp, Cannabis sativa
atgttatttgaatcatgcagttttacctcttctggtcgagaactctctgtaggtctcacatgtttacgacgaacagcgggcttacgaagttttatttctgtgctcataggaccaatcctgaacacagagaaattataccaatataagcatctgacaaagcatcttaaacaaagagaaaaactatactatgaactatggctattacatggtgcagcatccaggagctttcctaaaaacatctgacacagcaactccaacatccttccaaaatgtcaagctcacctgctcctccatggttccactccgtccaaattccatcagaagactgctgacaaagtttgaaggagttataccatgaattccatgtgctttgactgaggacattaacgtacttgtaatgtccaaaagtgcttccgcatcagcaacttgctctctaggtttttgaactgatatatcaaattttgaccccaaaaaaaaaaaaacaattacaggtaagctaactttcttggtaataatgtcaccaaacaaatatatcttaaaagggcacaggtctaccaagttgatgcaagctctccacctcattaatgattgaactgaagttatctgaatttgcatctgttaaatcatctctcttatctgcacataatcacataaggtatatatattatcccaagagtattcaatcaagaatacagaataaaaatgtaagcgccaaatggtctaaaaaattagcaaaaaaaaaaaa

SEQ ID NO: 48236 - DNA, 1982 bp, Cannabis sativa
acaaaagttatagatgtatgtataacgtcaaaaatataagatattaaaatatgtattgttgttgcactgcaatgaagatgtgtaaaaaaaggattggtatgtactacaatcgtgtgttgtaggtgcattaacgaaattttaacaatccaataaatcatctcataacaaattcgggtaataactctactctttatatctatttatttctacgctatattattagtatttgtttctaaatttttttatgtatgtactatatgtaaatacagcaaatgttgacagggacttcgaatgggtggactaggctggatggaactacttccaacacagccaaatatgacatccaactgaagctccccctctcgcggtccacaacgccaacatgggatgagcgttcttatacttgagggaccgaccacgggtgcgccaaacccttgaaaaaaatcgagatgcaagaggaaatcataagaattgagttccacttaattgtgcctagttgcaattttgtaatggtagttggttggttacgtttattattaaaaatttgtaatgttgattacattgttaagaaatatctattttgccctatcatgttactttgaattccattggaaatattgattgtaataacagtgaggatattttcgtatacatacaagttactttatctcattacaatctatatttacagtgtcaaataaagcatcatattgaaatacctcaaagcaaacatcacctaactttgtacccttcattacacacaaaaataactttcatcatttaagcaaaagtggttcctacaaattaattagcaaataataaagatttctttattctaataacgtatttctaggtaagtcttcaccttcccagcgtatatcattaagttcaaagttttgaaaatatgtacgtcaaggtctgtacacagtacgtcacttccaaatttcaataatgcgtgacctgttgagggcatatttgggtattatgagaaaaaatgaaaaaatattttcaatttacaaatctttttcgaacatgttacgttttctgctgttgtgttaatatttgatatggtatttttttaggttatgaaagtagatagtacaacctactgatttgatcttatacggattgatgggaaaatattattaaaataattattttaatgaaaaactaaaaatatagttgtcagttatttaatatcgtactttagggttttttaaaaaaccgcaaacactataacatgtgttgtttaaaaagtttattggaaacacaaggccttttgaggtctttgtcattttcaaggctatgtatagaaaagttgacaaaagcttatgtgaagattgtgttgtattgggtatgtctttccaaccctaaacttaaatttgatttggaataatactttcaatgttgaacctcctagaggcagagcattaacaacataatcaatttcatgaaaatatgtgaggaacttatttcaatgtacgttagaagttggatcttctatattttaataagttcaagtttgaaaataatgtacatcaatatttgtacagagtacttcacatcataaatacagtatggtatcacctgtttactcaatatttggatatgatgagattccattttaagtgtaaactttaatttcagacatatttattcgtagaatactttaataaagtttaaagcatttcccttttagaagttgtactaatttttgactactacccattcttaattgtccccgttcataagttgttgggaattatttaaaaattatccaaataatgtaatcttctcaacgatctctgtactatttactctaattttaaaatctaattactcacttactaaaccagaggatgtcttatcactttttaattttctatgtacgtcccactgtgtaattactgacgttaaatggggtatttcctatactttcaataacgtacgtcagggatttcacagtgtaatgtcaaatcaaa

SEQ ID NO: 48237 - DNA, 774 bp, Cannabis sativa
ccgacattaaatatatcgattaatgaactataaaatatttgtcaaaaaacaatggagaataccttgaaatgacttgtgcatccaaatcgaaaaataactaaaaactaatcaggaaaatatatagagtataacaagacacaaatgaaaacaaaaaataataggattgatcatcaccaaagcttccttatctaagataccccaatcgtacccaaccctctttgaccattagaaacccgaaaataaccaccatgacccatgaaaacctagccaaggagccaccagatcaagaacccccgccatcggccattcctcaagaaacccacccaaaccacactacaacaaatatgaattttagaaacgacaacataagagtattagtaaaaatattaccaagtcgttcctaatattgttggattattattattttcatttaacctttttcgaacgacattatatcttttagactaatgtcgttcataaataataattttctcatactcgatctttttaagttttttaacctggagaaattaaccttaaaaaatattatattaaagcttaattatttgttaattaatattctccacatttattggtttgtttttatttatatatataaaatatattaatttatatatctatttatatatgacccattaaagtgacagaacatgtagtgtataaaacatgtgaatacatattttggtatatataatatacataaaaaaaaaatttaaaaggcaaccctaaaaggaatctaccaatacatctttt

SEQ ID NO: 48238 - DNA, 1214 bp, Cannabis sativa
ttcagttcctggatatgtcactgcagattcaagattgtcaagtccatttgtcacatgattcgtggcacccgtatccacgaaccagcctaaatcgtcaccaaagttaagaatgaaagatgtggcaaatgcttgagggtcatagttgaattcatgctcagccatataggcatgaggggtgttgttggtgacagatgaagaagggcccttggtgcctggtttaggtgtgacccatgttttgtcaaatctgtggtgacaaactggtgcggtgtgtccatagcgaagacatagttggcagagaggcttattgtgttgattctagggtcgaaagtttggtctgccaccatacttcgttggctgaggtgggcgatatgaagggttgcgtgagccagtaaatgcaacatttgcttgaagtttcatggttgaatcggtgcagaattgtgatgctcaagacgactttcgtggaaaagtaacaatgcttgaacctcttcaaatgttagaatatcacttcttgcagtgattcctgagacaacaggatcatattctggttcaaggccgttcaacaattgtaagatgagatcttgatcaagaattggcgaaccggctacagcaagcgagtcagcaatggcctgagttttgtcaacataatctgaaatggattggcctcctttgcggatggtggagagctgattcttgagttgcagtaaccgagctttagattggctggagaatttttgttctagagctcgccaaaccgcatgagatgaagaacaagtagcaacataagcaagaacaccttctgtcatcgatgatcggagccatgataaaagcagctggtctttgcgtttccactgatggaattcagggtttggttcgccattgacaagagtgggcgatggaggaatgccagcaagaaggatctcatctaattcatgaccgatcaccgtataatcacctgagatttccaagacaagaaattagttcgatcaagcttgacagttaaaacagaggttaaagagtgagaaaacggattccagttggaatgcatctggtttgttgtcgcggtggacggagttctgggaacaggagcaggatctgaggaagtggactccattgacgacgtcagaggcgactgataccatgtagaatctcagaatatgagattagagaaaacatagtaaaagaacaatgaagcagaaaaacagagaagaggcaaa

SEQ ID NO: 48239 - DNA, 1188 bp, Cannabis sativa
cgttagcagaatttcatgaattaaattcttattgcttatatggattgataatgtgagcacagtacttaaaattaataaaatgtgatgcattcaataaattaattaattataatgatattttatatttgtataaataatagtcaaaataataataacaataatgataataatatataatataacaatattatttaaaaaataataattcacaagccctttgaattcttgtaaaaaatttattagtcttttctctgccacttgctacataagaaaatatacttatttattattactttgtattttattacatataagtactataagtatatgtaataaaatagaaagtaataatatgatcaataaattaattcttatcaatttgaccaaattgctcttacttatatataattaaagatagttcaatcatatatattaaccaaattttaataattaaatttgtgtttatatatcaaaatatatgataagataagtatcattgaaaactcaagtagtgtatagacaggggccggacccacattatagcgagggggggcgaaccccctgaaaaaaaaaaatcgagaaaaaaatatatatgtattttaattagttacaacatatatttgtattaaaagatgatatttatagacataatagtaactttggtgtaatggttaaggtagttggtaaataggttagagggtaaatgttcaaaccccactaactacactttatattttctttttaaatttatttacaccccctcactttaaattttgggtcccccactgtgtatagattaccaaatatatataggcccttcaaatattataaataacttggcatagttgtacaaggtcaacatacgtttactgtgtcactattgcctcaataatttatactcacgttaaaagtacaagatatatatacctaagaaattaacaacacgccatttacactaccttctttgtaagtaaataaataatttcaaacgttttcaaccttaatagtatatatatactaaaactagtcgttacaaggaatggacgtcttattttatagaaaatagtatacttttatataacgcctattttcatgataaagctagttgtactgacagttagttgtattgttagttaggttcttgagtggaaatatcttttctgttatgtctgttacagttagtttttc

SEQ ID NO: 48240 - DNA, 650 bp, Cannabis sativa
aagactttatatagtcactctagttattttgtgaattgtgatatgttctcttctttctttattaggcaaggtctccaacattgaattgtatttccaattccaaccatcaaaaccaacctaatttttaattagtaagatccactcaaatcacacacattttttagtattcttatacacaataatgtgtaacttatctaaaccacacaagtgatgatgtcccatttcaaaaatataaatgactacataattgtacttaataagtttgtaacttttgtgtcacacatttgtgttaaaaagaaaagaaaaaaaattgatacagaagagttatcttatagcactctaattagtttatctaatttatcatttatacatcattaaaattttattttctctattttatcacaaatttttacattacacataatacaacacaaattctattttttatttcaaattttaatatattttattcatttcaaaaatatatttagagccatgaatagaacctaaagttatgtaagtgaaacttctatttattattaacttgtatatattattataattattcaaatttacattcataaattttcgtcgatagaggatatcaaaaatatctatagcaatggtattttacaaagtccattaactca

SEQ ID NO: 48241 - DNA, 1363 bp, Cannabis sativa
acattatggtcaatatgattatcaagtcttcaatgccgatcattttaagtattattatgtgtttttgttgaactttgttgatgatatatataataacttaattaattctagtcctaattgaattagtaaaaaattatgtacaaatatattatattattgtaatagttggtaaatttaaatttaagactaagaaaaagataataatatattatgtgaaaagataaataagtgagtaaataatattatataattatgaaaaaaatcagttcatcatcgtcgttttcgctctctccactcaaatccccgccatcaaatttcaccatcattattaatttattattactattacaagtttttcaaataaggacatcaaaagaatatggctttgatatatagaacttcaacttgttcacatatatatatatttcctgtcctatatatatatatatatatatgctcaagcaaattatcccagtccacatctgagaatctttcaccattgatgatgttaattgtttgtaccattttcatgagcagctatggtgacatgcttcactctcttttgttcattttcatgggctcgataatacacgttataacttattgatgatgtcttccaccaatttttcacttcacgatgtgaatttgcaactcatcttaattctatgtatatatatatatatatatatatatatatatcccaactcatcttcttcttctgatcagaaaaactaactctcttacatttaacttattgcatgtgctgaaacattctcacatgtctctgttcgaaatctaccacgtccaacggattatgatatgatgataatgttggtgatctgatgttaattatttgaaaaagtttgctaaaaattcattattatttcaattcacaacataagttttttccatttatatttctttgacattttaaaattgattagttaatttttcacaaaaaaattcattccgcaaaattctatgaaaattactaattttgtctcactattttctctcattttggttggcaataatgttatatataattaatttttgaataaatgaataaaatataagtattaataagttgacaagacctcatataagactacgtactacatgatattcacacgtgcacacgtttacgtgttgaagaatttcttaaaattattattattttatttatattttgcaaaatatttactatattactttgcttacctcttcaaggtcccactccaaatattgaaaaatactaaatgatattatatattggccctactagtattttattttaggctaattaggatttttactttctgaaatttgacatgtaccaaatcatgctctctgaacttttaag

SEQ ID NO: 48242 - DNA, 937 bp, Cannabis sativa
agctttatccttgacaaaaatcaaacaacaacttgaagaatctttgaaggcctttctaagtcactttagcatgacagcaacgaaggttaacaatttgaatgatagaatttagttgatggcactccaggttgggataatcactaatttgtccactactggaggcaaactatgggatgatttgcaaggacgcccaatcaagtcataaaatgaatttaatgaaaggtctcttatctatgtcagaaaggaggaagctcaatctatatttaaagtattaaaagatggctcgagaaacaaactcaactcaagaaatgtagaaacaaacattgtaaacatgagaaaaagccacgaaccacatggaaaaaggaaatatgagtccaatgactcgtccaaagacaaaaataaacaaaaaaacgtatgaaaattatgtctcgatatataccatgtacaccaaactgaaagaaacacgggagaatacattccttgcaaatgagagtaagatcgtgtttcgcaaacctaaacctatgaggaatgcaaggaataagtgagatcagaataattattgtcgctttcaaaaagacattggtcacaccactgaggagtgtcgacaactaaaagacgagattgaatgtttaatttccagaggttatttttgacagtatatgaagaataggggaatgagcaaactcaaccccataactagaatgaaaactagaacgtccagtttccacctatagaaggtgaggacatctttgtgatttttgagagccccattttgtaggaacgagtaacactgcacaaaagaggtacacaaaccaagtaaagaaccaatctttagcttttacactagaattgacaaaacgagctaagactaaggagcctctaataactttcactaacgacgatgtgatgcacgtgagatttccccatgagaatccac

SEQ ID NO: 48243 - DNA, 1164 bp, Cannabis sativa
  modified_base (113)..(119): a, c, t, g, unknown or other
acaatatttcatttatttcatttacgtggcatttttgtggcattttttttcatattaaaacaacagtaaaataacactacaaaaacggtaatttgttgttgatttagtaattnnnnnnntttgccagatttcatggttttttcctggtgtttctatgattccggtgttgatttgtccgttcccaaccacgaaggagaggttccgtttgtgttttgttactgtttacagtataaaagtaaatatattgggtctgggcagtataaaagaaataaaaatgggcatggacaataaaaatgtaaagtttgccgtaccccagtatttttgaaaacatttggtaaaaaaacagtatttttgtaagtttccctttttaaaaaatagtttttaattttttcaaaattgtgccaaacgggcctaaaccttcccttagtttattaaagggatctttacattaatatatataattaagaaattatttacaataataaccttacacaagccattattaaaaattaacattccacctaccgtatattcaacataatactcgtccgtgttctttttttgagtggttttttcaaaattgaaattaagaaattatttacaataataaccttacacaaaccaatttgggactatcgatctgtccaattttgacagttccctgctttcttcttgagcagatggctgtttgtttgctttagtttttttaagtttctttgtttaggtctgttctcttaagtttggttagtttgtggtctttcgtttttgttgtgttctggtttttggtcctttgggaccttgtgtttgttcttggctggtcttctccgatccgactttgtgcgttgtgtttcgtgttttggtgctttcttcaaaagccagtaatcaaaaaaaaaaaaaaaaaaaaagaaattaagtatttttttattatttcaaaatcaaatatattattgcatcaaaaaaaaaaaatcaaatatattaatttctctcttaatattttttttttcagaaaattaattctaattacacactagttattctggctcaaaaaaatttaccatcacaacctattttttaaaatgatcatttaaatatgtgggaaacatattttttttgctattaaaaaaaatatatcttttagtgtcttttatatttagttaacaaaag

SEQ ID NO: 48244 - DNA, 3780 bp, Cannabis sativa
ttctaacttagaaaatagcttttcaataagttgtcaaatggtaaccataactatttaactagagactaataacagattaaagaagactaataacacacttaactaactaatacttttgtatcaattaatatataattagtaatgatacattttagaagatgttgactaatgatcctatcagttcaaatagtgactaattaaagtacattcaactattcaaaaatatgcaattaacaataaaaatgaaaatccaacatacataaatctatttttttttcttttatagaataagaataatcgcgttgatagaattttataatagaacattactatggaacagcaaggtgcctaactctactatgagatgacgatctataattagttaacgattttttataatttttaataaagtaaaataagtaagatcagatgttaaattacatcaatagcgatattacactttataaaagtgctaagaaacatggttgccctttaacacttctctttgtaataacaaccaaataacatttgggggctgagggcggggaatttgagacttcttttttatgaggagaagtgtagtacttctagggaaggagagagctctgtctctctctttctcatgaaaccataagctctcgtaagctccattttcgcctctagagctttgccttccgttgtctcacatgcatcgcccttgctgccccaccttcacccagaccctcgaagcaagacccaatcattgccgccattttttttttctttagataaatttcgaagataacttgtaattagaattgagtgtaattgttaggtttgaaatgttataagcacttataaataagtatacatgattaattttcatttttatttacaatactatttaaaagagttttagaaagcattttgaaaatcacccgttattagagttgagttgagtataattgctaggtttggagtgttaaattgtttgataattacgaaatattataaattttaaataattaattgttacattatttcttttgtataattactatatctttttcaccaaacatgaaaatcataattaatatttaattagtactgatattcaaacttatatatatatattttttttgagcaaaacacattttgtattttaaaatattaggagtagtgtaattaattactatgtctctagaaatcacattaattgtttattaataatgaaacaatttttttctaaacacacacgtaatgaattttaaagtaattagctttagtaattgtatgattaattgacctatacatttgctttctattcaaagttaataatttcaaagagctcataatcatgggccaatatattaatttataaagtaacttttgatagttttccactaattaatattactattacgtggcagacaaaaatttaattatagttataattatgttcaaatcacaacaattaataattatcagcttttagaattagattacatcaagggtggtataattaaattttgtttttagcagaaaagaatttaatgtcaaaaaagtttactgttcataacctaatcacatcccatttgtttttccatgagttaatttcaataattatataacagattaagtacattttattttattggcctatttgagttattgcatgttgcatcaaattaatgaaataataaatttaaaaaattgctagaaaaattaaaaataaaaaagcacttatatattttcttttctttctcaaagccatatatattttaaaattatttcattataattgaaggtaaatatgaaaatagaaattaattaagaaaatatactatagataatattgtgtttttttttttttttaattattattatacatatgcatgtacctatttgctttcaacaagtataatatttgcatttgttaataatatgacatttttatttctattttttttaggggataacatattgcaatcttggtataatataataaagctgaaatggttacaaccctaatattgccaccttttcatttattttttttatcatgaagtggggtacgtgccttatgcatgttacctaaattagcatgttgaaaatgaaaagtacatacaaaattaattaaaataaataattaagagaaagacaaaaaagaaagagatacataagaaaatgacaatatataaaaagagattattaattaggttagattgttttgtttatttaaacttactctcacctttagatcatatcgtatcaagggtcaagatcaactattaactgaaaactgaaataaaaaaggcagattattttgtttcttggggttatatatatatatatatatatatatataaaattttgacggttaaactctccaaactattattttttacatttaactttataaatttcaattttagtggtaaaacttttcaaactactaaactgttattcatttaccaccattaactgtcaacttccaaactaataaattttaaaataattttttataatttttaaagggtaatattattttagatcctgtattttgtcaaatgataaaatatacttgtattttctaaaatagtacaaatagaatactgaattgatttttattaaaataaaacttaataataatccaatttaaggatgttatgacaaaactgttatattttttgtatctattcgtgttaaaaattgtcttcaaatgagttatattaaaaaataaaattgtcaaaaattaagttcaatgtcctatttaatttttcttttttagaaaatataaggtccatattatcatttaataaaagaaatggtctaattggtaatttttataaaatacaagatttaaaattgtatttatccaattaattttaaataataatatcaggtataaacttacaagtaagagtgtacacataaataatttatattaacagttaattatggtaaatagatcacgtcataaattttttaatagtttaattgtttagaagattttactactactaaatgttaaattttaaaaattaagtgcaactaaaataatagtgaagagagtttatagataggtttggagggtgagtgaatatatgtacaaaatttataatgaaaggttcattattaattataggcttaattattaggtgaggtggcacactcattagagatcacataatctctctcccaatacaccatcacaccccattcacacaataatattaaatatatatatatatatatcttgtcttcactcttcaccagatcatgataaacatatatatatatatgtatatagcataatatatagtcattatattcatatatattacatctgcatgcagccatggcagctggttcttctaccatccaaaacgccgtcgttcaaggtggttctgccgaggtacgtacattatattatttatgcatgtattattaatattgattcattaaatattagaaatttataaactagaccaatttttttttaaaatataccaatacagaaaaagttcatttgtttttatccttttaattttttacttacaaaaatatatttgtcgtaaaaataataaattggtttttttttatttatttaataatttatttatagtacgaagttgttttataatttatttatagctgccgtgaagtttatttcttcttatcttttagttactttttacgaaaaaaattgtatttttataattttaaaacttttaaaaaataatactataaataaaattttgaagttgtaaaattataaataaaagataattttaaaaa

SEQ ID NO: 48245 - DNA, 1033 bp, Cannabis sativa
tgtcacctattgaccccctagaacatcaaaaggtatgaagttatctttgttttgtgaaatatagttctccaaattaattggtttattgttaggtggaaggacaaagtgtccatcctagtttcctctcttacaattcaaattgtctcgaagatcattcctgaccccatccttcggaagatagagtcgcttagagctcttctattaggttggctcgtagaccataccagcccaagaggattagcattgttcgaaggattttcttgatttttttatgggtacaaaaattatcacgatgacggttgttatgttgtccactatcagctccatcaattctttctcatgtacgactgtccactgtgagaccttgttcaaccttgatgaggttgctggctggtatactaattagacttctccagctagtcgagaaggtgcatcatcctttctccttttaggttggagatgaaaattgtgctgatcatctcttttgaggtagtgattgggtagaacttggtcatctatcgggttgccaacagtttgattctggggccaagaattagaaggtttgtcatgtcggggtgattgcacataattaaatgggtgctcctccgggtcatactcttattctccagaggggatgtaaagtgcctttcccaagttaagatctcttctgagcggtgggttctccaatacctgtcccttgtctattaatgaaatcttctaatcaggtcggtagcctttcttaattgacggttaatctcttcttattttacacgcatggattcagcttgtctatccgtccattcttggaattcacgcctctactatttgaatacacgattaactacaacatgtgtttcttcttgattatggtggagggcattggtgtgagtcttgatttgtcccagtgcctccctcagattctccatatcaatgtttcacccatattaacttggggctccccccagatggatgttcggtgcctgacccaatttctccagcacactcatggctggtatttctagcctcttagaca

SEQ ID NO: 48246 - DNA, 3212 bp, Cannabis sativa
ttacagtataaaagaaaataaaattggccaagacagtaaaaagtaatttctgccatgtggcagtatttttgtaaagatttggccgaaagtcagtatttttgtaagtttccttatttaaaatacactgagttcaatttattatttaacaaaatagaagtgcaaaccgatatcttctagaaaacacagagttcaaaatgatatttaatttatataaatacatacattatagtgatttatatgtataatatgtcattatggccaacgatgccatcccctcatgtacttttgaagaaatgacttccacttgtgaaaaaaaacaaagcgaaacatccatgcaaaattatttaattattttaatatttaaattgaagacatttcataaatagagtattatttttttataagattgtaaactaatacttaaactatcctaaactagataatacatgtgttgggtaggtaagatgactatacagatttagtaaaaaataaacggtttcgttttcaaaaaaaaaaataaatgactattttgtaattttggattgaatttgatgagacgtgagaacagagacagagcttttctttttatgtgttaaagtttgaaacttgaaatatattttagagaaaaaagagtgtagataatttgtgagagagaaatagaagagatagttatgggaaattatatagcaaaaaataaaataattatatatttcttaaacattagattaaatgattgataatcatccaatggtcattattattatttttatttttaaaaaataaagaataaatatataaaaatttgtaacgtcattacactagactccaaaaatttgtaagtgtttggacttttgagttttgatatggcaaaagaaatttaattgattaataaattattaaagtaatattttaactgctaattttttatttatctatttttaaaaatacaagtgactaaattcaaagagtcagttgcttatattatctttaccatatagaaattttttttaagcacatcaacagttacatcatataaaataaagtttctatgataagttaattccacttgtatatatattttagagaatattgatggaaaatatgattttttttcatttttgtttattaaaaaaagataagcatgtcatgtttatgtttattaaattgtataataaatttctacacttttaatttttttttttaaaaaaaaattccttgtaattcctcataaatattaaataggctaatttggatttttgactcctaaaatttcgacacgtgccaaatcatgctctattctatcaagattgtaagatttaagaatttttgtataattttactaaacaaagtctaacatggatggaatatcccttaattaggataagcgtgtaagatttactccacactgtgtcagtagatcttgacctataacgatcaagtaagtttgaaaccatatcgtcatagaaaattatagttatttgagcgatccatcgagtagctagtttttgctacctgatcagaccatacgattgttgcgaaataccctctaattaaaataggcatgtaagatttactccacattgtgccggtatgtattgatctataacgatcgagtaagtttgaaagcatatcgtcatagagaattacaattatatgagtgatccactgagtagctagtttctgctacctgatcggaccatatgatcgttctgaaataccccctaattatgataggtgtgtaagatttactccacattgtgccagtaggtcttgatctataacgatcgagtaagtttgagagcatattattagagagaattacatttatttgagcaatccaccgagtagctagtttttgctacctgatcggaccatacaatcgttctaaaataccccttaattaggataatcgtgtaagatttactccatattgtgtcggtaggtcttgatctacaatgctcgagtaagtttgaaagcatatcgttatagaaaattatatttatttgagcgatccaccaagtagctagtttttggtacctgattagatcgtacgatcgtttcgaaatacccttagttaggataggcgtgtaagatttactccacattgtgcaggtaggtcttgatttataatgaacgagaaagttttagagcatatcgttatagagaattatagttatttgagcaatccatcgagtagctagtttctgctacctgatcggactgtacaatcattctgaaatactccctaattagataatcgtgtaagatttactccacattgtgccaataggtcttgatatataacgattgagtaagtttgaaagcatatcgtcatagagaattacagttatttgagtgatccaccgagtatctagtttttgctaccttatcggactgtacgatcattccgaaatacccccgaattaggataggtgtgtaagatttactccacattgtgccggtagatcttgatctataacgatcgaataagtttgagagcatatcgtcatagagttacatttatttgagcgatccactgagtatctagtttctactacctgatcgaaccgtacaatcgttctaaaatacccctattttggataggcttgtaagattcactccacattatgtaggtaggtcttgatctatgacgatcgagtaagtttgaaagcatagcgtcatagagaattacaatcatttgagcgattcactgactaactagtttttgctacctgattggaccctatgatagtcccaaataccccctaattaggataggcgtgtaagatttactccatattgtgccagtaggtcttgatctataacaattgagtaagtttgagagcatatcgtcatagagaattacagttatttgagcaattcactgagtagctagttttagttacctaatcagaccgtacgattgttccgaaatatcccctaattaggataggagtgtgagatttactccacaccatgccgataggtcttgatctataatgatcgagtaagtttgaaagtatatcgtcatagagaattatagttatttgagcgatccaccaagtagctagtttctgctacctgatcggaccgtacgatcgttccaaaataccccataacgatcatttaagttttttttaaacaatttatataaaaaaaaaatataaagtaaaaataaaatgaaaatctaaaattttcaaagatttttaaat

SEQ ID NO: 48247 - DNA, 2043 bp, Cannabis sativa
  modified_base (1141)..(1149): a, c, t, g, unknown or other
agaaccacaggtaatagctattatatatatgaaatgaaagatatatatatatatatatatatataaactgataaaggagacatttggaaaaagaagatggcgaaggttattgctgggaggtaatttttgtagattttgaacgtgagtttcaaaaagataatggttgtaagatggtttgggctgacatgaatgaatatgtgtaagttgtattttgggtaaataaaagctcattaataaataaaattattatccacattttgtaaagataattttataaataaaatattaatttgtattttttatataaaatatttttaattcatttcttattcttatattgttattgtcccaatcaaaaattaattattttggactgaatcaatcacgagtatctgtaagtctgcttcgttgagctcatgcaattcattgtcaaagattaataattgtattattttgtatatatatgtatgcagaagtaacttcacatacccttatataataatcatatcacatagtaccatataccattggtctggtcatacactcaaagaataatgatcattgctattgtgacaatgtatatatcatcaatactaaaccatacatttgtcacatgccaaatgatcaaagagtaacattaatcatatatatattacaaggtgacagttcaagtacatccacataaatatgttatagtagaacaaatttaaaaactgcggagtgtcatattatatatgcgtacatgtacatctaacattatatgtaacataaagacctatctttttaaatgtattatttttacacactgatcgatatatctatcttaatatataaagagagattgaaaaataaagatttaagaattatcctaccatgcattaatcgccttggacatttacatgcatagctagagctatttttttataataaaaataaaagtaaatttatatgttagtgtactatttaggagtatgaggtgttcaaaataatttgattatcgagaatattatgaaagagaatatgattatagagaaatgtgttaattgtgtttggctgtataggataatatgtaatcatattctccttcattaaattatattatttggttgattacatgaatcttatatattattttaaaaannnnnnnnnaaaatatttttttattatatctatataatgttaatcatacataaaaataaaataattatttattaaaaaaaatatatttattaattagaaaatattaaattttattgtattttttattaattaaaatgaatatttttatatattttattactatgttatttatttttgttcgctatgtcatttatttacatcatcctcattttatgtataatgcatacatatgttattgctaataacataaaaataacataaaaaaccgatcttacaaactaaatatatatcgtaatattttgtttataataaatcataatattaatggtatttaaatttatttattaattaatttaaaaatattataccaattaatataatggaagggaataattaatcccaccattttttagggtgtttggaatgagttaataatgttagcaaggcaatgctaatgttaaacattattaccttatttatttggagggtttaatcttaaaatatcattctcttagtaatataaatatcttttaagaaagtaacgttgatccattaaaaaatgataatgtgttggaaataatacaaaaattagtctatactaaatattacactaattaacacaaaatttatatacaagtgttttaggttaaggatagtaggtttggcaatttgtccaatcgaagtgatgtaccacctaacaaaagctagctaggaggggtgcttatgtaattatttattttcaacatcccgtttaaaaaaaaaagagtctttaaaagcaaaatagatgaaattatgaagtatgcagtatccctctcaatttttggtttatgtataatgtgtattttgttaaaaatatctacaaaataaataaaaagtgctcaatattttattgggtgtaattag

SEQ ID NO: 48248 - DNA, 1265 bp, Cannabis sativa
aataataataataataatatgtttctaaatattaacataataataagatacatgatagtaacttgttaaattttagttacttttttttaaccaatttagaaaagttttttaaaactaacttgtttatgacactatatgttaacttttacatgtcgatcaacacactagtaactcattaattttctaaattagatttgaatggaaccaaaatgtatcataaatagtaagataatttaattgtcatatctttaaaggtaaccaattattgtcttaaattgttttgaaggcaccaaaatgtatcataatcaataagataccttaaaataacttaaaaattaagtcatgtattaaaaggtaacaaattagtatcttaaattatttcaaaggcaacaaaaagtagcttttaaaatctcataataacaaaaaattctaacattttgtaaagaaagtgcctaacttgaaatggaaaacaatttgcagtagctttgcaggcatttcggccttgaactcggagctgaaagccatctggttagcattgaattgggcgttaagaaagaattagagattagtggttatatttttcgattgtttgatagttattcaggctttgaagagaagatgcatgtcgaattggcaattgacctcatgcttatatgaagttatggaaaaaatagattcttttgtgtattgtaagatttgttatgtaaagggggagcttattgtgtgtgtgaatgatatggttgtccaagctaggatccaaagaattgctaactcttgttttgtttgggaaggattgccctttgtcaatcctactttgctgatttaatcttaatgaactgatgttctctttaaaaaaaaaaaaaactttgagctatgaatccaacatacatacattatttttaaatgcctgatagtattttaaaacaaatttatatttttgtaaataaaaaagtaagtaacaaaatctctaatatttgtaggattatattaataaatctattctagggtgagattactttgaactaatttaaagttacataaagtcaagtatgaacatgtatatggaaatttgatgggaacaaataagagaaaattattttaggcacttatttagaaaaaaaacaatataatatttttaacaataaaatatatgtattttcttttaaaaaaaatcttttaacccttgagttaggtgggtcttaaactcaggcctaactcgcttatgctgaggaccaaacctacaagagctatagagtaaaactcac

SEQ ID NO: 48249 - DNA, 1630 bp, Cannabis sativa
tttataacagttactaactcaatgtttaatatagggacagggtattttttcttatataaattaattaaaggaggagagattaataaattaattcattttattttatataccaacttttaatgtgcaagaaagctgactggttttgtaatagtctgaactgaaccattggatttgaagtagcaccaaaattcagtgcaacgtcatcatggattagcaactagggagtagattctttcttgaaggtgcgtgaggtaaacaacaaaagttaaaaataaataattatattaaaagagaaaaagaaagaggtgttggatatgattatccgaacattatgacacgtggcaggcatgccaggtgtcgtgggccattattgtggatgatagtgtgagctataatattaataataaatcgtggggtttgaaaaactaagatcacaattttttcggttttgttttgtatgttaattattatttataattaacttgtaattctctaattaagagagtggataattgcgttttttatgatcaatatattggcaccttaagatctaattaacacaatttcaaggctaaaattatgcaaacttttctcttttacatgtttgactttgttataagtaatgacggattttgtccatttcaaaaaaataaaaaaaatgacggattttgtgttattttgttgtgaaaggcttactttttttttttttttttaatgtttatcaatttatatttatcatcaaaagataatggtatatggaaagatgttgtagctatcatttaatacttaaaagatatctattttaaagttgtttataaaaaattgatgtaggtgttacttgttttgatcaaaaattagtttggttttttatgggtaaacattaaattaatttcttaatttttgattgagagttttttttatatatatagaatgttttctgttcctttacgtgattctcttttcttttttatagtacgtttttcttgcatgcatggttgtgttgtcaattgtttattactttttttttcggcacgtgttacttttattttttttttctcttcatttctttaattttatcactcattttaattgtcttattttaggttttaagaatattttccttgattggctatcatcatcgactatccttttgggctatagtgggtctcccgagttaaatggtatctcggtgtaactggtacattgttgagatatttgcagtcttagttctttctggtccatggtaagtgacacatcaaatttgtacaattcgagatacatgctatctcgactcgttgacatctcagatttgtaagatttgagatatataatgttaatgcagattttcgttaacgataatgagtctaatttcgtgataggttaattaagcacaaaaagtatagaaaataaaagaagcaagaaataaccccaagttttttacgtggttttgcagttaactctgcatagtccatgagtcaatcttattcaaattaatctgatacagaactatgattcttttttttctcaaggattttctttcgtacattctgtccctatatttataataacataggttggcagttaattacattcaaattcaaatcccacaatattatttttccaacattgt

SEQ ID NO: 48250 - DNA, 1183 bp, Cannabis sativa
  modified_base (298)..(298): a, c, t, g, unknown or other
  modified_base (1102)..(1105): a, c, t, g, unknown or other
ttaggcgacgacgtcgtttttagtctttcacccttacgggacagaaggaaaagaaatgacagttgaagatgtggcaatgccactcccaaatattaatttgggattgtttgtaaagataagtgtgttggactaacatgggttatatgttgtaattattaatgtttataaaatgtatgtataatgtatagatagagatgatattaaatattaattagtagaactgagctcaaattagtaaactagatgtctacatcatttacactatatatatagtatttcttatatatatatatatatntatatatatatatatcacacacactccctgtgttgcaacttgcaagccaccattttgtatgtgaatactgctatgaagcaagcaacacaatcggccgttggttttattaaaaaaaaatgaaaagttaaaagtacaaaattatattttgaaaaaagaaaagtacataataaaataataaatagaagataatctttcaaatattatttgcaccgttatagatgtacattaatattaaaaaataattaatttaaattaatttttaaaatcacttttaatatatttttgaattttttttcatcttattttcatttaatatcattagttagttgtattttattttcatattttttttaatatcatatatgatttttttaaaaaaaaaaattaataaaatttcatttaattttttttaatatttaaaatatattttatttttattttataagcatattttttaaaattatgacaaagaagaaattttttttaaaaaaaatagtacaaattaaagatattatattttataaaataaaaattattaaaataaagtgtactataactttatcaggtgaaaatacaaatctcttaaaaaatatatttacatacatttttttttagataaattccaattacttatttatctaattattaaaactttatcattagtctatggcttaagaattatgagtgtaatataaatttcacaacataagtaatatgagacattttcttattttataaaatccaatcagcatttcaattaaattttgatagaaataattatataaggcactattttttataaannnnaaaaaaaatacatttttacgtttaaagaatttttttttatatatatgtttacgcttttccataaaaacaatacaaaaa

SEQ ID NO: 48251 - DNA, 1258 bp, Cannabis sativa
  modified_base (653)..(656): a, c, t, g, unknown or other
gagagagagagagagagaaatacattgtttagcaaaagaaggatgaagaggaaggggaaggctagggcttcactaagctaagctagaagatgttaattttccaggcaaatgaaacacaatgttttgagaaatgttaattttccatcagtgtaagggcaagggtagcccacagtaaaaatgaaaaccccctaaaaaaattgaaaatacataccaaacactagttaggcttaattttcccattcctgagtaagtaaatctgtgtaccaaacaacccctaaaaggaacatgcttctctcatctcatccaactattgacttttcaacctgccaaacatagttttaattctctgacaactagtagatgagagacaccttctatagtgatttgaaccctccttcattgttcttcatccaattcccccttagtgatagagtgccatgcccacacatagtacggaagacggtggtaaccaaactcgaaggagaaaaagagatccaggctcagatcttgataacattttgcgacagaaagaaacaagggttaaagatctaagcggaaggagtcatattatttcgctgcaatcaatgtaagattttctaactcttataagtttaatttcattggtataaagatattcatatttaggatgttannnnaacatacttgttagtaaatcaagttcctcataaaatattcccaacaccccgtacaactactctggctgtgtgagggttgtgtggggtcaccctgccatttctttgtttcatatcaaccataactacaaggaagtttaagagacctacacggctgtcacctccccaaacaaacacatggcaatgtttgcatggaagaaataaggggaggtgagcaacctgacaaagctacaaatatattcaagtcaacgacacacaaatgtatcttccatgtaaagtaaagggtacaaggtcgaccaagtaccgtcttaggtacaattaccaagacacagtaaatcctaagttgcacaattaactataatggacttattatctagccttatagagagtttccaaggaaaaccatgcataaggccacagttgtgtatgcttccaagctcgttaagagaccctagctaaggttaaaagagggagaaaaactagctccccacttggagctgtggccttggtcggctagggttccaggtcgtagtggccagccagaccccaagaccctgcctagtggcttgccaagaaccctagttccaggcataggctggccagcc

SEQ ID NO: 48252 - DNA, 1770 bp, Cannabis sativa
atgcctcagccacctcgatttgaacttcctcctccatgattgttgtggtagttggatcctctgccatttcctctaccagggttgttttgattgtaattagaatactccctgcctccaggattatgatgattagactgcttgttggctagagcagcagagggacctgcaccagatgttgcagctgagttcttgtttgttgcagtcaagagatgcaatcgctccaacttgctatcaaagctcaatagtgtaaactgtgtaaagatcatttgtaatggttgagtgtaaactgtcatagaattaggaaaatgtaacttatgagatttacctaaacaacatgcatgacaaaaatcaaagatagttttattacttggggaaacaatacatgatgtcattatattttgtacaatttgagctattgggtgccccaacctactatgccacaactgaaatttaaatggtatatgaaattgagaaagaaatacatcagattgtaaaggtagtgtctttggtggtggttgaccagaggagaaaagagagtgctggtcacttatttgagtgtgattaaacacatagagaccattgttaaccttgctaagtagaagaatcttcttggaaatgtagtccttcacaaaataagagtcagagtgaaattcaaaaaagacattattatctttagtaaattatggcacactcaaaagattcttagtaattgtggcgatatgcaatagattcttgagaactagggattttggatgtaaaggagaattaaaagatgaatgagcaatgttagttatgtgcaaacctgatccatggccaaccaaaatttgttcttggcccaggtactctgaattgttgatcagattttaagcatcaggtgtaaggtgatttgttgcacctgaatctagataacaattcaaatcttggacagtgtctggtgtagcaaccatggcatgcataacttgcatggggttactggtggcaagtgttggagctgaactagtgaaggaagttggtccaagaaataatttgtcaaatttgtagaaacattgaagaacaacatgaccaggtttctgacagagttgacttatggttcggggtggttgctgccaagactgatttatccatcttcttcttcctgagtagcctctgccaccacgattgttggagccaccataagtatctctaggagagttgtatgagtcttgagtctgctgaccattatagacaggtggatttgtaacatatcctcctttgttgtgttgaaagcctccacaactattatgtgctagattgacttctgtagaggatatgtcaagatccttaacaactttgtcaatcctagttctttgagccataaaatgagcttcaacttcagcaatagcgagcttctcctggtgcatattgtaggatgtgtagaaaatgtcatattctgatccaagaccataaagatggcttcgacatgatctgcagtggtaacattatggcctatggctttcaacagatcaacaatatatttgatctttaacaaataatcactaatagaagaggaatttttcttaatgttacggagttgagtcttaaattgaattatctttgagttagtttgagtactgaagaattcttgaagcgcgatccaagcttcagcaaaagtttcatgtccaatcatacgagtgttcatctgatcattcatggaggacaacatccatgacagtttgagatgatcttgtgtttcctagttggtgtagtcatgtgagactctatttgtggttc

SEQ ID NO: 48253 - DNA, 2144 bp, Cannabis sativa
taggtgaaattgtgttttgcatttattttaatatgttaaatgtgaaaatttttgcttaacacaattacatcagctacctttccttagcaagtataagggcatggctgaatgttgttgtacctatattgatatttatgaagattctctctatgaaggatgggggccctttctccgttttcgtgctaccaatgatatttccaagcctctgctcagggggaaaatggttcgtccgtttttgtatggagaacctttcacatggctctactagtcattgtcgagctccatcgaaggcacattgttgttgatcctctttgtcctttttgtagaattcatcatgaaacgatatctcacactttacttttttgcaaaagagcaaaggaagtatggcatctttcggggttgcaaatcgatttcattaatgtttgcttctcatcttgtgaggattttctactacatctctcagcaagccttcctacagtataatttgaacagttcattattatttgctggtgtatctggtttgaaaggaatgttgaataccatggacaagctgctaaaaaacttgatgcgatgctcatgtttgcgacttcatatcttattgattaccaatctgctcgagcccctacacaaaggcctgaaacgcacatttctgtgaaaattttggtttcaagtgtaccttcttgcacacatctaaagcctaaacacttagctccacctttgggaagacttagactaaacagagatgctgcatttgatgactctaaaaatattgttggtgttagtttaatcttaagggactcattaggtgctactattgcagctctttctaaaccaattcttggtcgctacaaacctaaagaaatggaagcaatggcccttgctttgagtctgaaatggctaatctctcacaatatgtcagcggagttcataaaaaccaattcacttatggttgtccaagaattctaatattctaatgtgtttaattatgctttcatgctattctaaatgatattaactttctagtatctaatttcctacgagcacagatcattcatgtttacaaatctgctgacacttatgcccacactttggctaagtttactcttacggtggatgatgaatgttcttagttgggggattttccatcttcaccaatgactgttgtgtaatttgatccaaattaatataatagtctttctctaaaaaaaaaaactaaattatgacagtgatcttaataacattttatttataatcaattaaattaaaactcactcaaatagtcttatttattttggactaaattattgttattattattttaaaaaaggaatgatattatattaatcaaagagttccaatgattacaatcgataaaagttcagcaggagcaacactctcactgaaaacacgatttgaatagaaataagaattacgtgcaacacaatggacaactttatatacagaacgtttaacaaaataaatcttaacaaactttaaaatttctaacataatacgacaatcactagccaattgtccaaaagaataaggcataaaaatagaactaagcactgcttgaactgtaactaagcaatatgattcaagcttaacatcttaccaacccttctttttgatccaacttaaaacctcattaataccaactatttcaataaaagaagcctccatgtgatcatcaaagcacaatgaaaaagcttccaataatcgaccgacactatcataagcaaccccactgacaccatagttcccactcaaagaaaagattgctccattgacactaacagagcctatattgacgaaactgtacgaaaaattacagttttactaacattgcatacttatgtcactaagataattattaggttaatgctacttacaaacttaaaactttagttacttattataccacaaatattccgaaaaaaaatatatatcatgtaagtcatgttttatttataggttaagtgtatgggattggatagcatagtttgttatcagataatttcttcatttaaatgacgagtgcagtctcgtatttaattaacacattgacatgttgctcttagaagaaagataacgtgttaaggtataattccaaaaaggcgataatccttgcatgatagaaacat

SEQ ID NO: 48254 - DNA, 1987 bp, Cannabis sativa
tcttatagtactcgtcatcagataaaacgaacatgtgaagattcatctgatcaacatcgtcacgatcatgatcaaactcggccagcagattagttggtgataagtctgacttgagggacaaatgtttatttcaatcagtaacttgtgaagataataataaaaggaataagcaaaaggaataagaaaaatcatctcttaccttagtaaagaaggaattgatgttgttagcagcccttgaaaaaatgcctttaactgacttaaaaactttggtaataaccaaaatattgggattaccaatcccaaccttctccaccatcttcatctcttttgccgtttcatgcatcatgatttttagacttttagtgttatatattttttttttggttgttttagaatttaaagagtatatatatgtggtttgattacgttgtttgggatcagtattgagtttccggtgccatcaaatttaccttcagcccctcaatatttctttttctctatttacattttctacattaattaattaaattagtcatacagagaattatattattttatttttaattagtacagcaagctaaattatcttatattatcattaattatcttatatatatatgaagagtagtgtaagaattagttccactttagaatatattaatgtcaactatcctttcactttcaatttcatttcatctatacacatgtttatcttcgattatatatgtacattattatatatgtggggggtggcagtaattttttttaattattccctttgtcaacccttatttcgtattctcttacgtactatgaatatggaattgatcaacgtcctaaattataatgcaatacaaagaagataatattcattatttgttatataaattaatttaataagtaagttagcatcatgcgtgatgcacaactttttttcttttttttttggaaataaactccaaaaaccaccatctcttgcaaatcacaagagtacttgagcaccacactcgacattcagttttgatcttttttttttctttttttttttttaatttttaattttttgagtattatattttgaattgaaataaatataagggtttttaattatgaataacacaattatatacactacaaaaacagaaaaatattaatatgatgttcaataattttgttatcattattttttgagtaaatactagtttagatcttacatattttgtaaaaattaccgattgaacattttattttgttaaatatcaattcaaattttataattttctaaaagatacaaattaaatatatatatatatatatatatatagccttaatctcaatggtatgatgcctccgcttcaagtttccatgggcgagcttcctgtgaaaacttttgaagaggttagacatcttctaggttaaatacgcttaactttgtagttcttaagtgatggactactgaaaatagaaaactattatttagacaaaattatacattttccaattattatttttctagcaagtatcttatattaattcacttagattttgcttgaaatggaaaattattataactaacatatatattttaaacattttgtaaagttttaaaaaatttaaaataatttacggtgacaaaaataaaattccaatagacattagcatgcgtacttctttctataataaaaattattttaaactttttaaaaatttatggctgattttaaatacaataaacactattttgtcaaaaatataaaataaaatcaatgaaaacaattttgatagaaacacttattttagggaatgtattctagaaacatctatatcatagatatgtaaaaatttaaaatctaagagaggcagcgtattaacgatgatgttaagtgattctacggtaatattctgtttattctgttaagtgtatatgtgtcattttaattgaaaagttcaaatatacataatttagacaaacgttttaaaattttat

SEQ ID NO: 48255 - DNA, 1042 bp, Cannabis sativa
gagaacttattactattttttctcgtaccaaaaatatttcatatcttgcaattgatcgaaaatcaaatatgataagagaacttatatataaaacgaagacaaaaaaatctgtccaaataaacatacggagccgattgaggaggagggcgattctatgcccccaatttcctttttataaacttttgataggtttttctatttttaattttttaaataaaggatagaattttattaactcaagtcaaataacaaagcattgtgaacctccataggaaaatcattccttggaaacacagtccaaaagaagatgacatgcaaaattaaataatttaaataataattatatacatgtaattattaataactggcttcccaaaattaaataattcataatttgtgtatttatttgcactttcctcttccctctgtacaaatggctctcatacatatatagtaacaaaacttgttagttgatggccttacttttcacatcacactaatggcatgtttgtttaaagggaatgtaaataaatggtatgatattggtatggtattgattcttatataattgtttactaaattttagaaagggagaaactagtggaacccacacaaattaggaaaaaaaacaagggaaaaggttctccccaatttttatagagaatgcttttcccttttcttacttaatttattttaattataaatttattaattaaaaatgaaaaagacaaatataccccttaaaaaatctataaacagaaaataattacatattataataataacaattttgtcattaaaattcgattactttctagttatgtaaataaaataatgtgattctagttttcttttcggacagtttagtaaacatcataataaaatattgtttccgattattttctattttaaactgatacatttctctcattgattattttgatttcaattacagtataataaacgcgagagaaattttcagataaactcttatatcttttattttagtttacttcaactttatttgtaaattcgagataaa

SEQ ID NO: 48256 - DNA, 1437 bp, Cannabis sativa
  modified_base (1378)..(1396): a, c, t, g, unknown or other
tgacaaaaatgtttaataattatataagaaagcaatattttttagtaactaattttaaaataaaaagtttttagtaattacattaatttttatggcccccatgagaatttaggtgacgtttggttggaggtaatcaaattgaataaaatggaaaggaaataattttggttccattcatttgtttggccatttaaaatcattggaataccattccgatggaatgacctttccatcattttggtagaatggctattccattttgaaatggaaggaaataccgttccaatacaagatttgaaaaaatataatatttttttttatcaattttttatgcattttaaattttattttatttcattcctattctaattctcattctcattcctattcctatattttcatttctcccaaccaaacgccacctaaattctcatgagggccataaaaattagtgagtgtaattagaacctttcaattacctcgaattacacagttagttacagtataattacatggttaaacatgtcaaattgtgtaattatctccaattatatacaaattcaattacacaatagctttctaaacacatcctaaaaaattcttcatttctttggaatcagaatggaatcttatggtagaaaaaccttaccataagaccccatttagattcctccatagatggtacaccaacgaggctatcaccatgactaaaatttgcttcttaaaagttgaatgtcaagctcaagagatccctctcaacagcccttttaatcgacttacattagcaaaccaggacaaccaacttttaatactttccaagcaacactggctatagtggcattcaaaaaataggtgatactgatttatgtcttccccatgttcaccaaaaccctaggcaaaaattatctcaagaaataattctcgtagcaaccttctctagtttggaaatgatccttaacaacaagacacactatgaagcaatgttaaggaacgttaaaacgcccccacacttggccactccaattcacaatctcttgactcgaattgagccagttgtaacttttgctaattttataatgggtagagaggaattgttgtttagagcgtacttgtttcatcttttctttcttttctttcttttttttttgttaaataagtcattttattgaaagaaaccaaacaaactagaacaaactcattgccacagagggggcaatgtcccttagcaaaccttgagaacatgatttagagcatctcgcccaacccgctaaagcatcaaccacaatattctcagtccgcggacaaaaacaaaaaacaacaagatcaaacacttacacagtattggagaacattgtcccacatagattaaatgtaaaannnnnnnnnnnnnnnnnnnaacatgggctactccactcatagccaattggttttgagttg

SEQ ID NO: 48257 - DNA, 1680 bp, Cannabis sativa
ttgttcaggtaaatttcgggacaaaatatttttaaggagaggataattgtaatgccttaagattaaggaattggattagcaaaccctaactagttaaatgtgtattaatgtagaattatattattatataaattaatatatatgaattatactgataaatgatatattaatggtgagccatgcgcattttagtaattttgacccgagaagggtaaaaccgtaattttaatataatagtgtgcttatggactatattattatatagtatatttgttctgtctttctgaatgtattttttgacaagtcggtgcagtatagtcacaactgggtattttgggccgaaccgggttcggggcccgaaatacatttttgggatttattttggcattttataaataattgaataatttgaaatttagttaagtttggtgtgtgatgaaatgaaacttttgcccctgttgtttgcatatgtggtttattggccctatggacattttggtcatttaacatttgactttattttcaacaaaatggatttttggagaaaatgaaaaacacattctggttttattaatgcccttaaccaacccccttttctccctttctcatctctttgaaattttcttgattgtaagagttgtgcttgaagttggaggtgaattgtgtgtgattcttggtgttagaagcttgggatttgtggtaagcttctaagttttcttttgcttagttttatatctgttatttgaagttgaaaatcatgttttgttgttgtttgtgttcttgaatgcatgtatgttaaataggttaaatttgaggtgttttaactaagttttcttgctagttaggaattctagttaatgctatggttattgagaagatttgattgagttttgaatatgtgatctcaagtttaatttttatttttttgagatgaaaggttgtattgaacttttgaggtggtgtttgaatatgtgaggttatggttttggtgattttaagttcaagattttggatggtggtaactcttgttgagtttcacttggaattgtatatttggatattgttcaaagcttgaatttatgtttttaattctgtgttgggatggctataatctgtggatattgaatttgggtttgagtgtgtttttagttgagtttggtgtatgtttgggctggaatttgtgttgctgaattggagttttctggttttggaacccaggcgccgcgacctcctctatgagcatcacggcccgcccacttgaaatcctgggtttttcaacccaggtgtcgcgacatgcttggggagtgtcacagcccgcttaggagtttctgggcagttttaatgttgaattttgtttcgttcataacttttcgatccgaacaccgtttggggtgttccttatatcattggaaagctcgttccgagatctatatgattatttgtatttgaatgccaattctatgaatatgtgtgagtgtattagaggattaacccaatttgtaaatctcgagaattgtgactaggattaccagcacttgatcaggagcacccagggatttggaatctccacgtacttgggacatcaggtaagacaatagttagcatgtagagttaagcgcagtggcactcatatttgatatgataattgcaattaaatgagaactgggattagggttatta

SEQ ID NO: 48258 - DNA, 1218 bp, Cannabis sativa
acattaatcatagaatgaaatactgaatatggtattagtttcagtatggtacaatatacttggttttatttcaaaaaatttgctctaggcaaggtaagctgatatttttaataaatccgaccataattgtgcacaataagttcaacagtatggaaactagcatgtaattgaattatattgttccttataacagtttttttttttttttatttatgcttcaccaagtcctataaaaatataactacaggcaaaactttaagtacctcaaattcaatctatttattctacagcttttctctgcatgaatccttttgtaaatgaaaagtacaagtcattaactttatttgatatgcttagaatttcatagcttgtatatttcctaaggttaaattatctaccatataataattagagttataagaagaagaaaaaattacactcattgtagggctatacatgactgtttctttaggagcattgttcagatcaccaattgaagttatagtcttcgagttttccagctcctgtaataaaaaagaaaagattcataagcataaaaatccttctaaaaataggtatgtggttgtactttcgggattggtcctaaattcaatataagaactcagtctgtaagacttgactctgccacggtagagaaaatgagaaactagctcaaaaccataaaactaaataagcattaattatttctaatttatctcatcctttgctttttttagttgaaaaaagaactcgcatctatgatacgataaaaacaaatagttttccatgaaaaaataatctaaaaataaatagcaataaaaataatcctcacctcttgcagcccctttgttgtacaatgatttttttaacattaaaaattggaaattaagccaactaaaatcaatacaataaaattctaaactcatgtgagtatttcatcaagctttttttcatacatacgagaataaaatatttagtcttttatcactattatatacataatgtgagaaaattagagtttcattcatagccatccaaatgaaaaagccagttagtttcattgtgttagtacatatgcatggtttgagtaagtatgaataaatttggaaaagaagacaaataaattgtcccaattttacagcaagaaaccacttacaaatgcccctgtagatacataactggaaatatagttcttgcaaatacaaaatagacataaca

SEQ ID NO: 48259 - DNA, 1142 bp, Cannabis sativa
ttgtttattagccactagtaccactctattgtggtagtacctataaaatttgatgggcacttccatatccttaaggcagtggtccgataagggctttgaaaagccttaggccacttttcttacttgtttttgatatatagatgttggaaatataaattcactaatgctacccttttccttatgcaaggccctaccactgccatttcgttatgagatcattccgaagatctataccctcaaggatcacttgtgaggattggccatggatggctacggggtttcccttgttttggatttgtcgaaagcttctaatttttagaatccctcgtttccggcattggttgtggcttgaagtttttaggaataaatggaaaaggctttgtgcgtttgggtaagatgagtctggaaagatgaacttttgaactcagaagggacattctagcagaaaagagatgatccatttgaaaatggatctcaccaaaaagtccaaggtttgtgaaaaatcacaagcttgagccacccttttatacacaaagttcagtgagaagaaagctaaagattgggaaatctgacagttggaagatgggcagaatatgaaaagacaattcataatgaacctcgaaaccgtacaaccgccagaatcaaaggatgcattttttctaagaaaggattttggcaaaaacgccctttgtaattatcaaaaagctctttttactaaaaaagaacttcttaagggggaattgttatacccaaaattcggctgccacctccacgttggacacgtatcaggatgaaatgaatgtgaattattgcaattgctcttatggaataactcattaattacataagagtcagagtatatttgtaacccgctggctgtaacgtcttaggcgaggaatcaatttacaaagtggcccttggtatattagcaagaaaggatatgtcgctaaatgcaaataccgaggcactgaagaaagtgacacatatcaactgtaaaagttcttttcttgcaatgaacaaactaaccgtaaaatttggatcgactcaaagaacaagtaagcgagatgaccatcttgctatgggaagacttcctatagcttcatccagctaacaggagcgatgttggattttatgccctaaat

SEQ ID NO: 48260 - DNA, 2330 bp, Cannabis sativa
gatgtttagcatcttagaggttacttttgtttgtttccagtgaaaagacatctatcaagtggcaatatctgttatcttattgttgttttaaatgatctttatcttttctggtatttttcttttcttttctgtcatgtgacaatggctgtaaactttgttatatctagtattgatctaattgagtaacccttgcacttcatttttgtgttctctggctacaggtatgtcaactaaaacagactctattgactttggacaaaaactatgcagctcaagatgagaaagatacatgtatatctcattaatactcattttatcggtcaatcttaaaccactgtcttccctagttttatttgatacattacccattcattaagtcatttctattgttggtgtagtatctgatgcagtttcaatattgggggagtatttaaaagctgatccttggttggagcttctatgtagtcatttgaggtaaaggcaaagagtttcttttcaagtcatagaccatcatgcatatatagaatcctttacccaattctgtgacgtatttactaatccaggttatgggtgtgttttcaggctaaacttattagaggtcatgcggaaagaaccagaaaaacatgtaccaaattctgtagagagcgacataggctcagccatttcacaggtttgcacatagagtaaactagttaattgttaatggtctctatttcctgtctcattttttgttgattgccaaatttcattcacgtatgtgttctactacggaaaatggctttagtcttggctaaaatattttgtactcgttctacttatccttaaatcacttgataggacatgaataggaaattattaggaatgttctagggggctgagggtgtattaatatggaaagaaaatgttagtaggggtgtctttagaattcatcgggaggcttaaggaatcctcgaatttgcccttctatctttcattttcttgtattttcggaatttgggtatcaatagagaaggcttaagaggcacttgtcagatctaaattcctatcatcactctctttcataggatacttgtatgcatatattgatttttcccggctatttttaatattttagaagataaaacacttggtcttgaataaaatctatattgcagaaacatataataaatcaaagtacttagtgactggtttatttggtgcagcaatattttccaagtgattgtgtggacttaaattcattagactgattttgtaccacattttgtcaggagaagaataagattaacggtagaactacaagagccggaaagcaaactaagaaggcaaaaatggagacagaatcacataacattaaggatatgttttctagagcttccagaaggaagaactaaaagactatttaactagataacaaaagaaaagaagcagagtctttgttttctaggactttagaggactcttattagtagtcctatgttctgtatattgatttggcatgttgtaatgagcctaattcatgattctgtcataattaacatgaattcccttactcaaatttaaaactccttgtgagactttacttttattacttgcatgtttaattcaattttggggatgagatatggctggttaggactgtgctctatcatctgttgtgccatatttaattcacaaatcctagaagaagaaaataataatagagcaaagtttcatgtgctataaaagaagggtgggggttgccatcaacagtgaggatcagataggaagaaagagaatttaaagctaatattgtgggtggtcagtggtctagtatggggtattgatttgggcaatcttccacatttgacactttcaagcaattgttatgaagtggtgaaatatatgtgctattttatttacttttgttaataggaatgcaaatgttattgctataagaagaaaatgagactagttgcttttattcaatgttataaaataaatggattagatgtataaaaaagatttagtaactaattgatttagagtaagctcatgtgtcaaaacttcaattaaaagtagtgatagcaataacttaatagtaatacacttctacctaagaaaagaggttccgattccgaattccaattcccttctatcatatataaaaaacaaagctatgtaaaatataaatatttatcagttgtaacattttagtagtcaaagtcaaagatgcattttcaaaagaaaaatactaaagttgttaattgatattattttgaggaatgctaatgtcaatttcctgttacaatttcttagtcaaccttcacgctcgaaaacacatattagaatat

SEQ ID NO: 48261 - DNA, 1533 bp, Cannabis sativa
atatatatatatattttaatctaagtgcctcatcatagagactaggacaatgtgtccatgcttcaaactaagccatttaataaaatataaagacaaaaaaaatctcattaattagcagaaattcaaagaaaaattaaataaacttttcatataatgtttattttgaatagaattattttttaaaatatgtgaaataatatctaacattatatttagactaattaaaaatatttattttcctcctctaaatttgatatatatacacaccaaattataattctgaaatttttacagacttttaaaattcaaaccatatgaaattattagaattaaagattttcgatcgctcaactcagtttaattttattaacagatgtctattatgggataatataccatatgaaataaatggtaaaatattaaattaacatataaaaacatgtattattccacttattactaattgaatttacaataaaattaattaattatattataattctgtaacaattcaaatatcatatcatttgccgtatagcaatacttatttgtttattttaataataatatcaatatctaccaagataccaagataaaattaatttgaattaattttttagtataattttgctaatcatgaaaaggcttacaaatttaacacaaaaatggtataattaattttatttcttaattggaaaagtagcatgccggctatgcttaattggaagcaatttcttttctttagcattctttatttaattattaattaattattatgccatcttataataatttgacttgaattattattatgctatctttatttacaagtatattcttttttattatattatttgtttatatgtcaacatgtgattacgtatctgatgcattttttttcaaaatatttaattctacgtataaatataaaattattatttgaccattataataaactagattaattaattggtcagcactacacataacaatataataattaattatgctaaaattaattattaatttcaaacattaataaaatatgaaaactcatgggtttgaacgtaggccggttagaggagcagtcttgttgtattatattagtgaaacacataccgggctgtttattagatcagattcaatatttttagacttatacagattttatataattatatattaggtattaaattttactatatgacttaatctaattaattttattcatctagtcgatctaacatctataaaatgttagattggatcggtatcatttgtttgatgtattttatatatatttattaatttaatttagatttattcaatactttcgacttagtattttttaaatcagattaatctattttatattttaagtccagtattttaatatatatgtatatatatatatataatttttcaggtccattcaatcatgaaaaagaaaaaaaaattaaaattatatatatacatatatatttttacgcagtggcggacccagaatttaaagtgaggggggcgtaaataaat

SEQ ID NO: 48262 - DNA, 1097 bp, Cannabis sativa
gacagttgtgtaaatacagtttttgtggaatataaaatttttggttcataaaaaaaaaattatattgattctattaaaatattatggtaataaacataataaattaataataaaattataaatattaataatattaattaaatatttaataaatatatatataaattatttataaaatataaataaatttgtaaatatatttatatattttttttaattttgcattaaaattttagtaaatatattgtatttagtaatatatcaaaatataaatattaacttttgtatttatatatttagctttatgtttatttatttatttttttaaaaaaaatgtcaattaaaaatattcaatatgttaaaatttcaaatgtatatttatttataaatttatataaaattacgtaattatacttgtttttgaattttgtaatattttatttatttgtgtatagtgaaaattattctttactattttgtttggtacatttacttttttttttgtttgttaatataaatatatatcaaatacttattttggaataataacattattgagaatattcattaattggacaccaatgtcttttttctttgtctcaaagtggtaggtgtttattattattttattataattattatttatattattttttcaaatatatcgcttaaaatttatgtttttttaaatattaaattttctatatattatcactatatcatttaaatattatattttaattaaataaaataataagaaagagaaagaacaaaaaaaaattaaatatacacgcactattattatatttagatgtggcctaggaaataaataaactctacaaaaattgtatgtcatttgaagaataaattggatctttgccccttaattatgatatttgtaaagttttgtatcttaaatttttttattttttttaaaaaaaaatttaccccgaactatctaaatggttacaaatatcactctccattcttgcttattttttataataatttagttatgtagttatgagttataaatataattgcagtacatactcttataattttttattagactgttggttatgtatttatttttt

SEQ ID NO: 48263 - DNA, 587 bp, Cannabis sativa
ttttttttttttttttggtgatgactgagatgagtacacaatattgtaccagttgatattgtgacaataagaaagaaatatatatatttgtataataattatttacctttttaagttacctatatttattatttaattcatttttttttaaataattgaggttgaaaaagtccctcaaaaaataaataaataagttgaaaattatataagagtcaaaatatctctccaaatggtatgtagtaggtgttacactattaaaatagtgtagggttttattagtaagttataaatagtgtgagagtaaataaatatgtaaattgtataattattatgaaaaattgattgaaaaaataaaaccttaatttgtcttggaagagaactatattatctatcaccctctaccataataatttattataatgagacagagaagagctttgtataaaaggaacttccaaacaattggcactgacaaatgaaattattacacttattaataaatagacaaattaattaatagaaaagtgatatctgcaacatcatgttcgtgacaccctaataaatttcacttcacttacatttttata

SEQ ID NO: 48264 - DNA, 852 bp, Cannabis sativa
aagagtaataattaatttcttgatatagaaagtaagataatcaaaagtgctcattacaaatttgaaaaccttggacgcaaatctcgaaagaaatggaaaaccacgttaaaacatatgatttataaatattatcaacgttgagatttagttggagtaaacatttcggttgataatagttcaaatgttggtttgaatcctaagaaaagtatagtaaaaaacacatgagtttacttattcatcataatgtatttcaccacttttttttcttcttattttcttttttgcaagatattggaccttcatccacggttgcactattttagtgtatttttttttactaatttaatgcagtattttttatccgatgaaaacagctaatcaaatgagcgaaacttagagggtttacttgatatattttttcagtacactttcttattccttatctctagtttcttgtaacgattcttctttctattttttggatatatctgaagcttcaatttgttattatgaatatagtaaatgaaatttgtaacccaattatgaccattatagagttttatcttaaattaatagaagtttttttttttttttgaaaaaaagcgtatctcattaataaaataggttagacctcacggtttaacgggatggtagatagtggaatatcatcaaataacttgtggagtaaacgaccatttagctacatttttttttttttgataaatcaatgagttgtattgcacaaacaaacttttttacaaactatacgcacccaagcaaagggccgaattctatgtatacaattgtatcaatttagaatcaaactatgaatcaaaatatgtgttatgattt

SEQ ID NO: 48265 - DNA, 1233 bp, Cannabis sativa
tcaatccatatatatattctaatgattactatttacctggatgagttactaaagagagatattgggatggagttaggtcaagattttaaattcagtaaatttctcgttgtatacaaatttgtgccctgacagaaggctattattgactgtggtgattttacaataaagttcatggaataattttcaatagatgtccaggtgtaatgtcagctagtgttgtaaatatggtgttaggttttttgatacgtcacaaaattggtacgagctcaagagcacgagcacgacctaacacaaaaaaaatatatatttaggcacgacacaatatgaaaaaatatgagctaaatcaaggcacaacaaacccaaaagttagaatagattaacgcaaaagcacgacacattaaaaacactaatattttgataataataacaatgataaatatttattttatcaattaaaatgatattaatattcaaattctaataataataattattatttttatatgattgtgtataactattgttgataaaatatgtcaaagtaaccaaaactataaaatacacataaattttagtaattatacctcatcaatttgcaataaaaatgcaaaaatatagagcaaaaatttgagcccgtataagaaaataggttggtctatttcaaaaaaaaaaaaaaacccaggagtacagcccaataaacgcgtgacacaaaactgagcacgacatgaaactatcgggtatgcggatcgtctcgggcctactctataaaatttttgcatagcacgacaccataattttatatgacacaacacgaaaactcttagatgaattctactattgttgagcaaagtttgagctttaaaactcaaacctagctcaaacccaactatagccacaacaatcactcactaacagctcaaacaaactcaaaactactacaaaaaaaataatttctaaacataccaagatcgaacagaaactacaacctaaaattacatatttaaacctagcttctcatcaagaaaaattcaaagagaagaagtgtctagggcttaccttgggtttctttttactatacacctgaaatcctagctgaaatcctcttattttgctctgaaaaggatgaaaaaagtagagcttgtttggctgtgtttttcagttttcaatttttaaaagtgagaatagaaaacagttttttgtcattttaaaaatttaatggtgtttggcacaaat

SEQ ID NO: 48266 - DNA, 898 bp, Cannabis sativa
atcctcttacaatctcattggaaaactgttaaaaggcttctaaggtatctcaaagttattattgaatatggattgcacagaagcctgctaatgaatcttgacatcactggttattgagatgcagattgggcaagtgatcctattgacagaagaagtactttaggatattgtgtgttccttggaagaaatcttattacatggtctttcaaaaagcaagccactgtctgtagaagcagaacagaggcaaagtacaagagtttagctcatctgactgcagagataatttgggttcaatcttttcttgcagaaattaaagtaccccaatctcgaactcttataacttggtgtgacaatctgagacaatccttatgtcagctaaacctatacttcattagactataattttttgctcgagagaaggtactgtcaaagcagctcagtgtgcattatctccctagttgtgattaagtaggtgacatttttaccaaggctttagggtgtttgagattcactcttcttagaaacaaacttagtgatcttgatctctccacactaattaagtttgaggggatgttagagttagtacttgatctctccataattagttaaagctgttactatgttagttattccagctgtattttcagctccttttataactaattttccagctttatatctaactaacttatgtataaatactctgtactcaatctaattatcaatgaaaatagaatcaatccttcacaaatttatttttctcaccaaaatgtacattaagaattcactcaaaagtcgtacgcaaatctcttaggactttgtgaaaaagctcaatttcctccctcatataaaaatattttgccaataatctttagtgaatgagttacagaattgatag

SEQ ID NO: 48267 - DNA, 2614 bp, Cannabis sativa
catgagagagaacaattttgttaaatagaattggttacaatcatgagaatcctaatgaaaattaatctaagacaaacagttcctaactaactaagaacttagttatcacccccctcccaaacaaaaaggggtagacaccactttgagtttggtcttcaagtaatggaatcggtcttttggaaaagctttagttaatacatcaacaatttggtcgactgaaggcacataacgaactaaaacttcattgtttaggatctgatctcggacaaaacactgatcaatctcaatgtgcttacatcgagcatgaaatacaggattggcaactaaggtagcagctccctgattgtcaacccaaaagatgggaacatcaacaagagtgacttgaagttcatcaagcagagagagtaaccatttgatttctgctgcagcattagctaaagcacgaactcagtggaagattgagcagcaacatattgtttcttggcagatcaagaaatgacatttgaatctaaaaatacagcataacctcaagtggaacgtctaccatccataccgttggacagtcagcatcaaagtaggcttcaatggacattcaaagagcgggtctaatgagaagatcctctgaaacaataccttttaagtatctgagcaaacacttgcaagcttcccaatgtacattagtagggacatgaataaatttagacaatttattaatgatgtaagcaacaacaggtcgtgtaaaattcaaatcttgtaaagctccaagtgtgcctctatatagagtttgatctgcaaatggagtacctttagtaagaaaaagtttatgagcgttactagtaggactagcacaactcttgaccccttccagatgcactttacctaacaagtgagtgatgtacttggtttgagaaagatatgtcccttatgcacttttgtgtatttcaacaccaaaaaagtaatgaattttccctaaatcttttaaagcaaaagatgaattgagatttgagaagggcttctgaataagctgagaattaggacatataattaatatattagccacataaactagtaaaataataaggatactagagataccatataaaaacagagacatatctattttggattaagccaagtaaggtttattagagtttgtcattctatgccccaggggcttgcttaagactataaagagccttatgaaggagacaaacatgagaaggtttcaaggaatctttaaagccttaaggctgagtcatgtagactgtttcttgcaagtgtgcatttagaaaagcattagacacatctagctacctaactttccaatttgatgacacaactaaggtgagaaccaatcttatagtaactggtttcacaacaggattgaaagtgtcctcaatgtcaatatcaacctatttctaatatcttttagcaattaaacgagatttgaatatgtcaagggagtcatctacattcaatttaaccatatgtgcccacttatttccaataagatgcatatggggttcataaggtacaagggtccaagtacatgtagtaatcaatgctataatatcttaattttgaaaaatgagatatttctaatactatctttctaatcttataatttaataaactaaaataataaaataaactaaatttaaaaactggatatttatggttagatattatcatttttaaagttaaaacaattaaaaaaaatgatattattagtaggaccacaaaattttggatttaaaaatcttaaaatttctcaattttaagcctctttaaatttctacaatctatctaggtatttttagatatatttttaaaatttaaaatgtctaataagtcaaaaatgataaaatatctaaactaaaatatttcgattatctttttttcttaacttattatttaaactataaaaataataattaaaaatatgaattttaaacttgaataattatggttagaatatttataaaatatatagactaattttaaattttattaataattaatcagcatataagataattatcatataatattttaattaaaaaataaaattaattaaaatatatcaaatataataatacctaatcttgtaaatcaaataataaataaaatcaataaactaatcaactttaaattcaaatcatgatttaaaaacaattagaaatagtaaaatttatttatttatttatttttgtaagagaaaccaatataggtttaaataataaaggtaataaagttacgcaactaataaagaattttctcccatctataaaagttcattatctatcttaagagcatacagagatacctcaaaaagaattagataatagaactttaatatcagaaaaaaaaatctcaaaacttagtgttgtgacttccgacccaccaatagaacacctaaaaattaaagaaaaaaaaatataatatatagcaaataattaataaaatatgaaattttatataaatattgtcacatagaattcgcttatgtaaagactagaacttatctattctcatctccattgttgaaggtgattgagtacaatacatctgatgtgttattattattagattaaactaaccttacaaaatcaaa

SEQ ID NO: 48268 - DNA, 3109 bp, Cannabis sativa
  modified_base (697)..(699): a, c, t, g, unknown or other
aaatatatatatatattagagtaaataacagtataagtactcaaaattttaagtttataagtagtgtaaatttaatatttatttaaagtggcataagtatacaatatttataaaactgtaattttctctaatctcgcgagtacatactctattattgtctttaatataacacatataaagattacattctagatgattagatctaaacagaaacatgtagtattagttactttcaaatttttctttaataaattcaaaacaaagtttttaccggcaaaactggagttttacaaatattaggtacttatgccgttaaaaataaatattggatttatgtttcttacaaacttaaaactttgagtacttatatatactgctatttaccctatatattatacatctctttatattaagtgtgactatttaatgaaaattattggtttgacagttttttttccattaaagtttactgttaaaactaacactttaaatcaatcaattaattattattattttaagaaaataatttgaaatatttaaatttattctaaaagtgtcaacaaaattaaataattatctttatgtataaattttaatttaaattagacattaattcaattaattaattatattttataataattttattaattatattatttaaagtagctaaatttatttatttattttattgttnnntaaaattagttagatataattttttttataaataaatttaaaatttgattaaattttatatattttataaattaataataattaggtattagttatattatttaattatattttttgaaaaacaagtaccatcttagttatattattcaatcattgtaaagagaatgcttgttttagatgattctcgtgtttagtagttggaagcttctttatggatttagttatttaattttctgagatcctccttagtccttatatcttaagactttttagacttcatgcaatatatccattttttttaaaaaaaaaattatgtgactgatttttttttgaacgtatatatttattgtgaaaattgaaatttgaatttctcaatttcaaaacgcatcaaaatcatgagtaataaaaaaaaatgctatatttctaggattagattttatattctcactcaagtgaatttgtttcaagagcattccaccaatttttggtaactttcacttttaacccgatttacctacatgccctttacgcctaatcattctaaagaacacttgctcattttcttaccgagcgcagctgctggcacacagagttaggatcccaacccacacatgcaccccacggtattttttatggttagttgaactagtctcgagtggttatcaattgttagttatgtgacttgttaatattgattaatactttataaatgagaattaaaaatccatatgcatgaatgatgaatcaacagaagaaaaatctttagaaccttcttaattaattgaaccaatcaactatatatataaatataaatatatatcataattaatcgcatataaaaggtctgatcagccaaagtagtactgtttagctatagtgtttatatatatattatcatcaacattgctttatctagtactagaataaaagagaaataaattaaaactactcattattacaatatatatgttattatagtacgtaatacaaatgatttgacctcaatatagattatataattattatatttatgtctccactagtatttataatttagaaatattgaatatatatatgtgtgagattacttagtttcagaattactttacagtagcttgttcaaaatatagagattttttaaaattttgaacaaagtagcaaattcaactctattttctttctttcaaatatattttaataatatttaaattatactttattctatttttgttaatattgctattatatagatataaagaaaatttagagaacaatatgatagatggtgtgttatgtaaaataaaaaaaattggttttttaatgatttatttaaaagatagaatagagaaagtactattagaaatgctttgaggtaggtaaattaatgataaaaatcatgcactaatacaaactctttagtgatgattacttctaaaagattttttacatatcatttttagttgtattaaaaatgatttattattaaaaagtaatatttagatataaattattactaatttaattttaattatcatttaatatttttactaaaaatatatttcgatcacaataaattacggtaaataatactgttttagtaacaatttatttattttctagtaataatttttaggaaaattttatggtgcaccctctgaaataagtatactgatatactctttcgtattttcaataaccagatagttttagtcctaattacttcatatgatagtatatagcatagttattaaagacattttataaaattttgtaaaattcataatatcatttaacatgttaattaaaaataagattcaaataatctgttgcacacatgtctctttttttcttatgcgtgtataaaatagactatttgaactatatactgtctatattgtaaattattttaaaattttcaaattctataatatcttaactaattataatatccacatcatataaaaaaatgatatagttataactatttagatataaaaaatatgaagaaaaaaaatatgagttttttgcggttaaactcttaactatcattatttcacttgtacttaatcctctaaactcaaactttgatggtaaatctctctaaattactgaacgattaacaaatttaaagtgtcatctatatttcacaattaaccgataacatagattgcttatgtgcactcttgtacacgtgacatatttataatattggtacacctaataatattataatttaaaaattataaaaaattatttcaaaatttataatatttatatttttatttaattttaaatgaattataaaacaataatattaggtgtaccaatataaatgttaaacgtatataaaagttgacacataagcattccatggtggtaaataaccagatgaaactataaatttgctaac

SEQ ID NO: 48269 - DNA, 2164 bp, Cannabis sativa
ataataattatattttaatagttgccgaaaacctcggtcaacacattacatttatattacaccaaatcaaacacttaagattataacaatttatcctcattaaaacaacacaatattatctttaaggcatcaaatttataatataaaaaaacactcataccttgtaataatggccatgaattctcatgtttctattgggttcttcctattccttcaatctacacatcaaacaaaataaaatgtgtaagggtttgatgaattgagcactactctatttcactctctttgcacacacatcctacacacctttagtcaccaataaggggcatgacctttttataaagattagtgggcccactagtcttatagctcaaatggagataatttattatcttagatcaataaattgactaaatacattttagagcgtgtctatagactctgagtgtgttagtatattatattcatcttattatgacctaatagtaatactatatattaatgattatatgattatcattatatattaataacaaatattattaaaaaaataacaatactgagtaaacaacatttattacttatttattaatatcgaatattattcaaaaaataattatttattctagttctaaagtttctggtagaattttggtaatttgacgagcaaagtttatgaaaattgatattgtgcttgaggatcctcaactagttcattatagaatcaaagtttatgggcagcaggaaggtttctttgctacagtagtttatggaagcaattctatggcagaaagcaagaatttatgggataagttggcaagtattggttaacttactaagctttgattatttttagggattttaatgcgatgtttagctttcaggatagggatggtggaagacaaatcttagctaaagaaattgctgatgctcaagactggcttgctttaggccaggtggatgagtttaagtgttttggagctcattttacttggtctaataagcatgaggttagagatcgtatcttttccaagcttgatcgagtctttacaaatgataaatggttgatttcttttcctaaaaccgaagcttgtttcaaatgtgattatgtttcagaccatagttactgtattattaaaacccttgagctgaataaggtgggtttcaaacctttttgttatggaaatcactagttacagtacacgggttataaggaaactgtattggcttgttggaactccaattctggtttgagtggaggtcttaataatattgtgcagaaactttttagagtgaaacatgttcttaaaagatttaacagggaagaggttggggggtgttgtgttgaattacaaaatggctaaggaagactttaataaagctcaagaagagttggctgctaatccttctaactccaatctgcaaaattcaattattctttcacaaaagaagtttattgatatgcagaattggtactcttgttttatcaagtagaaaagtaaggtcaattggattaagttcaacaatgaaaatttgagttactttcatgccgttatgaggaaaaggaaaatagaaaacataattacttctttctctattggtgataaggttgaagatgactatttcaaagttgttgagcattttctctcccattttgaaaactttatggggaggaaaagctcggctaccaaggagattgatttggattgtttgaaccagggcaatagattaacattggagcagcaggtagtttattaaggccgttcaataaggatgatgtgagaaaagccttttcagcattcattcttccaaaagtcttgggcttaatggtttaagttcaggattcttcaagggtttatgggacaacattggagatgaaatctctcaagcagtgttagagcttcttcagaatggtgttttgcctaaatctctgaatgaaactgttatttctcttgttccgaaggtttctgatctgaaagcagcaaacgattacagacctattgcctgttgcaatacatttgacaagtgtatatcgaagataatctgtttaaggttttcagaagtacctccctatcttattcatagcaatcaaggggcatttaaaaatagacttctttctcataaaattcttattttctaggatcttctccaaggatatactaga

SEQ ID NO: 48270 - DNA, 1181 bp, Cannabis sativa
ttttttttttttttttttttttttgtttaagaacataacaatggtcctcgttggatgacaaggaaatgaaaacgagaaacaactccagactcccagttcaatgtaacaatgggtacgtaatttaacatgcatacaaaaatgataaaaaaaactcattattattattttataaggaatggattttccatttatgtttaaatggaattgtaatattaaaatgcaactagatgagggaaatgaaaattgttcttttatttttcttttcattctatttcattgccctcaaaccaaacacacccttagagataaaggttaatgcaccaccaaatactaattggcaaaattggatgtgtaacctagattttgagagttatgttatgtatctcactaacttaaccttagtgaccaaatcgctccctttgagtctttgatcatgatcatggcgagctgagaaattgttttaattaacataaatacagctttcttagtccctgcctcatcaaaaaaactattattattttttttttttttgaataattaacattttttgtccctgaactttagatacttcttgatcatgctcctaaatatacgatttgttaaaaattctcctttaaatataagagtaatttgtggcaaaaatacttaaattttatcctaagtagcaaataaatacctaagtcgtatttttagtggtaaaaatatcttttgtcactagtgtggaacttccgtaggtacctctccgttttcatcttgtaatgtgccagatgacatgccatgtcattaaaataaatgtcacaacactcccaccacttaaaactaactcctgccacattatacatcttaaaacttataataataccctaaaattaattaaaccctcttaaaatcaaaataaaaacacttgcaaaacaaaacaaaaataaataaataaataaataaatatgttatataacttaaacctaaaaagcttgaggcaaaacttttccaccattgttgaaagctcggaggtgacataggacagtggttatgcgattgtaaatcaccattgaaagttgcgattcgcacctctaggtcgatgaagaatttcaatagaaggttcaaatgctgtcaaatccataaggtttgtttttttttttcccgataattgtggcagctcgatgggttttttcttatggtta

SEQ ID NO: 48271 - DNA, 1466 bp, Cannabis sativa
aaattccaaaccaagatagaagaataaggaagataaagagtgaggaagagatggtatcttttgtgtatgtttataactatgtcttgtatgtatgtgtatttaacatggtttcaaatgtacaagtacattattctattcaatatctattaaggttttacatgaatgactaaataagagagtagtataggtcacaacatactgttcaacttgtgcagaaaactgtgcaactttcaacttgcattggtttgcagtagttgctcctcctcccatttcgaaaaattcggcagctcgttcaaaatataacattgccttttcattgtcttgctcaagctcatacatctcaccaatctcctaaaattccaagaaaaagaactatgtcagttgagagaatacaaagatatcatatactagaagcttgagtaattcatgaaagataaaacatatcaaaattgatatgtaactaaaaggaagagaaatgaaacaaaggaattaccttgcaatatctagcagccatactatctttgccattgtccatgaaaatgtttactgctttatccaagcatgagatagcagctgcaacatcccattaccaatgtgaagtgtgagcaacaaaccttaaatatctaaaaacttttgagtcaaagtgaaaatggtgaactgacacccctttgttttaaagacaacctactcttatacccaacaaaagtcattattttattttcaccaaaagggctaacttttaaatacaaatagaaatcctaatacattactcagattgagaaacacccaagtagccaaaatatttgtcaaacaaaagcctcattagctcctggggtaccattatagtagtgattatttttaagtacttgtacatggataatttgctaacctttttttttaatgtgacggtgtataataattacaagaacctcttacaaattttcagaaaattttgaataatttaaaataccaaaattagaattcaaatgttaaaagtatgtataaatattgaaacgagcatgcatgtagcaaaatgtttgaattttgatttcgacttcctaaattattcagaattttaagaaaatttgtaggaagtccttgtaactatattacacactgttatgcaagaaaaaaaaatggagttacaacttatccaagttgatgcagcactgtggaggtagaaggaagcatggggtgtgttgtgtagctagagaccatcatggctcgattgtggaggcttttactaagtgtgtggagggctaagtctcaccaggtgacggggattaaagaggcgttaagttggatacagaatcacaactggaacaaggtagaggtagagtaagatcgcctggttgctgtttaggccattaggagctctatttctatgacttctatttttgatctactgtttaataattgatagtaaaatgtcattagctgagatgagcgatgataagataagataa

SEQ ID NO: 48272 - DNA, 1105 bp, Cannabis sativa
acaataataatacctaagttataattctggaacttatgtaggtacctaaccgttaagtatcaagtaaattctacgtagcaattctcgattggtctaggccattaaattttttatttgagaatgaatttaaatataccaataaaaaaataacacgtggataatcacttcacttaacgactaggtacctacataaattttaaaaatataatttattaaacttaagtatttatctgcaacttaaagtaacatagatatttacactgtaatttactctaaattatttatattagatctcaattaaaaaattaattaattttaattaaattactaaaattaaccattcacaattcaatttaaagagaaaaaaaatataaataaagaaatactaaagaatatccatggtgtttatctaacacttttgttgagtgtaatacattattaatggaatttaatttcaataatttcaaatttcaactattttactttaataaatattataaaaaaatgtattaattaattaattataggacatcacctcttaatagtaaattaaaaagcaatactctaataaataagattgcattaatgacaccattaataataatatatgtaacaaatatcataattggctaattaattaattcacaacaacacccaataatactttcttattaattaagataaaaaagacccatcaaaccaattaataaaaaaataacaataataataaatacatttagttaattgattattattaagaagatataattaaagtggaagctagggcaagcttggctacaagatcttttcttaaaatctttcctgaaggagattttggaatggaatgaacaaagtaaaccttgtgtaatttcttgtagaacaccacctgttaaattaatataacaatttgtattattaattatttattaacaataacaaataattaataaaataattattataaattgtatttagatatataaaataggataattttacaatatatccctaaaaaagtttatcgatacactcctatctatttcagcgtttaagagaattttttagtttaatttttcttttcatcaataactttagaaaaaaatac

SEQ ID NO: 48273 - DNA, 1561 bp, Cannabis sativa
tgttgggaaggtaattgtttttttgtaatatggtttattataaatttcttataatagattcaaactcaaaatcactatgtttgataggatagaagaagattgagtaaatagtcaaaatattgatattttaaatgagaggagaggagaagaagatggagattgaagagtagaatgatagagtattatctattaataaaactattaaatttaattttgtaattattttttaataattttttgagaaggtatattatatttgtacttaaataaaggatttgtatattctatttctttcaatttttttttttctctcccttctctaatctttcttgccaaacaagaaaattgatttaaccttaccttgctataccacttctgtctcgtactagcaataaattttacatgtacatgtaaaaaagattttttatcttttaaaatacatcaattaaaaaaaaacagttacataaacttttataataaaaagacttttcaaatattttaaatttttattagcaaaatgatattatatgatcgtaaaaacgattgtaatacaatattatgtgatgataattgattatagatgtgtaattattataaagtaaattaagtaaaattattttacaaattttaatattttaaattgttagtttaataaatttcatacttttatatacatcattcaagttatttattttataattttctctaaattattttaatgttatatttttattaatgtaaattaagatttttacatcttgaacttaaatcatataattattgagattgttgaatttaagaattttttttcaattttagtaagaaaattctaatctataacttgatacatattaaagtttgggaagcatgatttaacacacaaacaatcaccgaaaaaattacataaaagattttaaatccaacaatctcaattgtttaataaaaaattttaacattcagaaaaatttttagaggcaaatattttaattagtcttttattaatattcaaagtaatatttagaatattttcttattatttttttttttgaaattacattttcaatgcagatctttgaaataaaattatactagctcatgtatttaatggttttctctcaatctttattattttctactataaattgacaaaaagcaatcatcactactattaattcgaaatttaaacatttattatgattaattagttaacaaatacataactcctaaatttaaggggtaactaattctaaaaaaaaagggtaattagaagagcatatctcttataaatagggaggaagcctagatatttttttattttttttttattctttttgaattagaaaaaggatataaaatagaagaaatattatactttctatagaattttaaaagttattaaatatgacaattttaagttaccaatttatatagtattttttttgtttgtaggtcgttttatggtatttaatatgacatatatatatatatgtaaattaggttttcaaatcttatatttaatgtttttatttgtttaggtagttttctttgtcattgatgccgg

SEQ ID NO: 48274 - DNA, 1128 bp, Cannabis sativa
ataatgttacaatatcaaaaactacaaatcatatcctatcaagttatctttatataatattaccgaaaactgtctgattattatcaaccttagaattacaaatattattttttaaaaaagcttggttatagttttattcaataaacaaattaaataagttatttttaattttgaaaccacgtaaggtctaatcataataaacggcaaatcttaaaaaacaattggtaatatcataatcaagttactgataataagtacatattagttttttttttctctttttttggtagaacacataatattatataatcacagatccatatatatctataacaaattaaatccccacatatattaattataataatataagctagttagctcatatgatcatatattaatatataataacatttatatatatatgagtttcgggtagatagctaataattaataaaatcatgattattaaacgacatcgtatcttggttttggaagcaagaataataatcttgatgaggaagaggaggaggaggatacggcatgatgacgtcagcaggaggaggaggaggaagaggaaccacagttgtagtggtggtagtagtggtcgacgacccatgataatcattctgtggagtagcatacacacgattataatgattaataagatgattatgatgatcaggtggagtactaaggtacatggaattattattattatgaatagtagtagcagctggggcaagggccacgtcatcatcataatcaagaagaagatcatgatgattattgtgattaatgatggtttgatgaagccatatctgagccttgagaaacttgacgtagtgaattgcctcttcgagcattgaaacagtgtccatctttgctccgcctgggaccaaactctgtaagatcttaaaacgctcgcttattctgtgtcttctttctcgagccgcaacgctttgaggatccgtagacagtttcacaccaccacaaactttattattcttcttcttacccttcttcttcctcatctctttactattattattattcttatttgaatcaaaagatgagctacaacaatactgatcagttgttgttgttgtacttggaaacttattatag

SEQ ID NO: 48275 - DNA, 1796 bp, Cannabis sativa
aatttaaagatgttaaattattgtcacacaaaggtgcatgattaacatggtaggcatggcaaattggcatgcaattacgtacgttttaaaagtgaaaatgaaccacaatacataaataacaaagtatatagtttctaggataatcgatttataattaagataaaacgtaaaaacaaccaaagcaagcagaggctgcagggcaataacaaaagtccaagtccttaataactaataatccacacaattttccatatatatagcataccacttccctactatagaagatatttcatatatcgatatccttaacactcagcaactagttgtgcttcaggggagaatattcgattgaggctagcagccaatcgaaccccaccttgggctagcttcttctccacaacaggaagccgagaaagaaagtattcatctaccaaaacagattacaaggtttaataaatcaatgaagttacatataatagaatgaatgaaacgacgtccaacttaatttgatggtctagttaattaattataaggagatagtgaaaaatacctccaagtgtgatgcctggcgtgacatttgtgtaagcatacttgcaagcgcagactgtgctttcagaggcatacctgaaatgaaatacttatctcatcatcatgtatagtctaatacttaaaatgtacttaaggaaagaaataactagatttaattttctcggtgcatgagacttattaattaaattaggatataatatacataataaaacttactgaattggacaaacagtttcattatttgggcatactccccacgatgaggcatcattaaaccaaccagtctatatatagcgccataaaaaagaaaccaaacatgttaaacaagttttgagaagattaattatattaatgattataattataagcaagcaaaacttaattatatgaagaataaagatagcaacgttaatttacttcaattttttgatgaagggattgtatcatcgatgaaaggttcgaattataaaatgacttcaaagcagattcaatgatcttgtcgtcccatacctggaatatataattgaacaaattaaaaaccaaattaatcaatttcatgaacactacttaattaaataatcaaacaatattgctacagtgtgaatctagacacattaatttgcttaccctgtggagatttgtcttgttttcgtaccattgtactgctattaagttaccaccataatctccaaggtaacccatgtgaagaggctgacaatatacagcacttacttcagatcactatgtcgaaatttatatttatcatttttataattatacattcatttcttcaaaatgcaatttctcagttaaagtctctagttaatttggagagagaaagtgtgtattatttaattgggtggaaaagtcaacattttgatatcccaatttctcagttaaatactggctttttaagcaatgtctcataaattacattatttttattaatattttactctaacattaatattaattagtttcaattcccaagaattttctttgttataaaatttctatacaagaaacttttatactatgtatttttattacagcaagaatttttgtatataaatatatcctttctctggcagataatatttttattaatttctagtttgaaaattatatactcagtaattttgcaccaaaaataggaaaagcaaacctgatggacatccccaaagaaatgagataagaacataagtgcctcagttaaattgtctgccaaaacaaacaataaaagccac

SEQ ID NO: 48276 - DNA, 1971 bp, Cannabis sativa
acataaattaatttatgaagactataacctttttttttttggcatctattcatgtctataattgttggatgagctacatttatctcatgtataagtgttatcgttagtgtttaattaagagaattatatgatattatgttatattataatgttaaaataaatatcttaaagcataatacataatcacaatgtacctaaaataactaatagtattttaatatatattttttttttaaataatactattttaatattttaataaataatagctctgatactaatattatgttaaatacaggtttgatagtactaatcatcgaaagagagtttatttcacaagtttatggagattccacctcaaaatcatatggctacaaggagagtaggtccttagccttataaagtgatcaactctctcttattttatcaatgtaagacgttcacgcgtattgtttgaaaatacatgtgagatcaactttaattggcctagagtaaatataatatatggtctcaactgtgagtctgactcttataccatattaataaatagagaattgctaaaaggtaacactggtgcctagcactctcctcggtgtcatatcgctattagtataattaagtatcgagtcctatataacttaagaaaataacttttaggaaatatcactaaccaatcgtgcaaaacaacttataaaagatgttgagcaccactggtacccaatagcaatgctcactaaaaataagagtttctcttattgaatgtgtatttgagatatacttgaatgaattagtacaaacgaattaatagacctcttatatataagaaagtcttaactaaataccaaactaaacatcatgttgtaacaagtaaagtggtaataactaaaaagaattaaaggttaatttaaatttttgtcccatgaactttgacatgtatcaaattatgtcctctgaacttttcagaccgttaaaaattctctctaaattattaagattattaaatttgagaactcctatcaaattaattttactaatgcgataattgtacatgtagttagcccaaatggctattaaataggaaaatcgtgatttaaaatatgaaaaacagtaacatgtgcgtggtttgtgatgctcaacttgacgtcatggacctcaaataaatgacattagcttgcaacacataaactaatagtaaattaattaaattaaaaacaatacaaataaaataataatattgacaattttaaaagccacattatttatgtaaattagatgcaatataaaactatccatgtaaacttctttgattttaattgctttggtacatgagatttcattttaaaattaagtggcaaagataggagtagctcatgcatcttatatatgatgttatcttttcacacattagtaatgtgagagtctttaacatcttcctcaagataatgattatttttttctcaccaatgttggattgcaagtggtataaataaaccacttgtggtataaataaacctaataataatataggtactacaaagataataatttagcttttttttttgctaaataataatttggatattttgatgttggaaaaaaaaaaccttacttgaccactacaaacatataatattgggtgtgtttggtagtacttttttaattaattttttttgttcttttaattagaaaagtgtaaatatattccaaaaatgtgttctataaaattatttttacttttttcaattttttaattgagaatcaaaattttaaaaaattcactttcaattttttttaaataatttttttttcttaatcaatattttggactctgatcccaacttggaccttgcgactcgaaccctgaacctaaaccccgacccaggcccagacctagaggcgaaccccatccccggacctggaccctggacctttgacccaaacccaacccagacccaaagactcgaaccccag

SEQ ID NO: 48277 - DNA, 729 bp, Cannabis sativa
aaaaaaaaaaaactaaataataataataataattgagcagcctcagcctctctcaattataatacagttcatttaaaatattaataagtgtgatctagtattttttatattcttttgatgtttcacagttagtaacttataagtgattaagttgaagatgttgttaaggttatttttcctatgtatttggaacacattaatttatctattattattgattgcttgatgaataatacctacatataataaattatattatatttacttattaataaaaaaatttattaataactattttggagttgctcttgttagaaaggatgctcatgaaatattaatagaacttttagtattgatagaacttgtattttcacagcccacaatgtaactaagcggatatttacccaccaacagtatgattgtttacgtatatctaccacaacagtcaacttattttgtaataaccataaaatccaattgttttctatatatgcacacttatttttttttttaaaaaaaattctatttatcttttcaaaacatatcaaacaaaaatatccaatcctaaatttctccctataccctaataataattttgaacattgttataagacatttatggtacctaacaccacaatgaaatgtcattttataattagttagtaattttttaaaatattgattaaaataaaataagtgggacacgatatttagttgtactaataataa

SEQ ID NO: 48278 - DNA, 1476 bp, Cannabis sativa
  modified_base (26)..(44): a, c, t, g, unknown or other
aacacagggtccaattggtaactttnnnnnnnnnnnnnnnnnnnaatggtatttaccctataaaaaaagatattttttttatattgcgttagtttaaaattgaccatatatattccttcaaaaaaaaattgaccatatatattatttaatatcgctagttatgaaatgacgcaaaagagtagtagcgcgttaggggatatgcctatggttctgattctatgacaagaaatatggggttttaatctcaaaatcaattggtcatgaatagtagttcatatttttatatatgacctaatatttttatatttaatccatatgagacaatgttttctaatataatgaatacatattagcttataaaataatacattaacttaaaaatattgagaattaattttttgagtttgctctcaacgtttacttgactatatgacatgtacttgtagctactcttatttgtcattaaatatatggtatgtactcgtagctactagctacattttttactatctaaacgtatatgatgataataaaataaaaatagaccgaaagaaaatctcaacaatattattaattgtcaccttaatttatgctttgggtttatagattttggtgcgaataataaaagaaaaatttaaattattatatttaatttagctacttaattaaagaaattatcaacaaatacctcttttttatactatatcaaaaatatattaatttatatcaaaaatatttaagtcaaacacaacttttctttatcatttttttgtagaaaactttttttttttaattacttttgttctgctgatggaacaaccccagcctacataatgtaaaaattagaaattttttttaattaaatttttaaaaaaaattataaaaactcaaaattttctaatattactctaatataatacccattaaaagtgtacccgtatatatattgaccgtgtggtaagtcaactgtcaatgtacagtgagtactgttgtgtacatctatatctcattacaaaaaacaattatttttagtaataattttttaggcataatataattttttttataattactaaatgtgatttttaatcataataaaaaattatttgtgattcaaccatagtatttaaatacaagttattattaatttagttttagtcacaataagtattgtgactaaaaacacatttaatcataagaaattgtaatttgtgtgactaacagttttagccacagaccatttaattaatcacaacatgagaataataatttataattaatcacaaatcttttacttcttttgtgtgttaattttgtgcatatatattatgtatagatgagttgttaattaagtttactaaagcaattatgttcctgtagatgtatatttaattaacttataagttagtttagtttgccttctttcgttattgttatctttgttaagtaaaaaaaaattagattttagatcttctg

SEQ ID NO: 48279 - DNA, 2543 bp, Cannabis sativa
tttagctaacccacacactgcacaacttgtgttttccaccatgacctgaaacctgctcaatttatctctagttaggagattcgaatgagccacttgccacaaaataaagccatgtttaggagcaaccaacgaacaccaaattgcctaggtagtcgggtctataggctactgcagggaagaattataaagctttgtcgctttaaatttatttcctgcaccagcagccacgatttcttcttgagtaaaatcatcccttaatcgacactattttttccaataccaacttgtgtccaaacttgggttatacctttagaaattgatcccttttagatagacaacattaatccatttcacccataagaggtcttttttgttcataagatcccaaacaaaatgagctagcgagaccttgttccatttggttccatctttaaatccaagaccaccaaaacttttgaaagataaactttttcccaactttttgtgtaaattttaggacgattccccttcaatccacaaaagaatcctcgacaaagtttctcaatttcttttataacactttgaggaagaaggaacaccctcatccaatagtttcttaggctcagtcgagttgactgaatgagttagactctaccaacaaaagaaaggtgtttgttggcccagcaaagaagcttttggttcatcttttttaaaattataccacaatcctcaagcttccatttagtcggtctaagcgagatccctagatacttcaggggaaagctccctatagacaagttgattcttcgagccaaagaatcagggtgagtcactcctcccataaaaatttgagatttttcatagttgataaaaaatctagaagttttactaaactcttccaaagcctctttgataacaagaaccaagtctttatcccctttgcaaaaaacaacaagatcgtctgcaaaacatagaattgtaagtttgaggtttttacataaaggacagtacctgaacttttcctcttttgtggcaagttggaatttttgagacagatactccatgattagcacaaaaagaagaggcgagatgggatccccttgcctcaatccctgctcacctttgaagttgcactggaatctcccattcataagtaagatatatgaagtatttctaacacaaatcataacccaacttatgaatttctttgaaaaacagtaagcattcaatagttgctcaagaaagtcccagttgacagtgtcataagctttactgatattaatctttattgtgcacctcggagaatgatttttcctcttataattcttcaaaagatcttggagaattaggatgttgtagactatagattttcctttaacaaaggctccttggttttggttgattaaactcgaaagaattctggccaaccgataacataaaagcttggatatacatttgtacattgttgaacagcaagctattggtcgaaaatcaacagctctggaaggattatccttttttgggatcaaagacaaagttgtgttgtgtaactcagcaagaaactgcatagtttcaaagaagtgcataatagcactataaatgtccttccccacctcaggctaaacagttttaaagaaccccgaaccaaatccatcaaggcctgaggatttagtactaggaatactaaacatggcatccttgacttttttgagagtaaagggttttaagaggtaaacctgttgatcaagattgagtttaggagccattgatatgcactcatgttgaattgccaaggttgtaggtttagccctgctcattatgccccgaaatggttgaggaagtgttggacaacttcgaaaaaattatcaatcaacttgccttgttcagtgacaaaggaaacaatattgttgtcttcctttatctttttaagcatggcatggaagtacgctgtattcgagtctcccttctgaacccagttaattttactcctttggctaaggaaattcagatacattttctcctgacattgaaagtgtaaagcagctgcattttcattgtctataagagatctgttcaatgggtcagcttgaagcaaaagttgagctcccttgaattcttccttagctttgtcataagcctctccaatgtccccaataacatgcttaagtctcattgttttgagatatattccctgcagcccgaagctcctcataggcttatgccaattctccataactgtttcgttgaaatccttatggtcagcccaaaagttatagaatctaaacggcttagttcctatattttctgttgtgaccatatgaatataatttttgtctttattttttcttttagttgtgtttatcgacttaaaaaccattccttgttgttgtaaataagattgttccattttattttttttattttctaagactcaatttttaatttttgtgttgcttgtgcccttagtggacgacatcagcatgcccacgagtatgtggacgtctatgcacaaggatcgtgatttattttttgattttgtattttttttcttttagttgggttcc

SEQ ID NO: 48280 - DNA, 829 bp, Cannabis sativa
aagaaaaacacacacacatatatatatatatatataaataaagtaaaagaaatattttccaaaaataaaaaagaaagaaactaaagaaatgatgaagaagaaaagagtagaggttgttgtggggatgctagttatgttgttgttgttgctagtagtagcagcggtagctcaacgtggaggaagcgtgtgccaaggaacttgctcatctaactgccgtggattcaaaagtaagttctatctataattacatttaatttacaaattaattaatattagaaaattgcaaattattgcaataagatatcaatggtgtctaataccatcttttttgtaattggttaataatattttctaataattattcaattaaattatacagaatctatacttaattactattctagctaatgcatacaacactaatagtacattttagtatttttttttttaataaatatagcaaactttgtatatcaaatctagattagcttaaaactgaatatacataatcgttatgtttgagaaagagattaaaaaacacttgatgaagctaattaatccccttaataataaatatgcttggtagggtggaaagataataaaaggaatggagagttaagagaacattgataaaacataaaggagaggataacagttatccttttaaattaattatttggtggaagtggaataataaatcactattcatttatgaacattgataaaatataaaagaaaggagaacactaatatctctaaattaattgtatatggtagaacgtagaagtggaataatatagggaaaaaaacaaaaaaatacaaaaaagga

SEQ ID NO: 48281 - DNA, 1538 bp, Cannabis sativa
tgtagtcaataaaatcacatggtttggagagcaatttaggttaagtagtttgtgttcacatgtattataatgcttaaaatggtatcttactaagttttgcttattactattagtataatttaatatgatggagtttcaaaaaattgttagtgtcatttctaatagtgttaagttgattaaaatttattaaggaagattgatttttcattttctatacatatttgacctttacctattccatggatgaccacatcaccattttgataaataagtagttgttataaattcatgttttgtagttttctaaaagatgatgtttgagtaaattattaagtgtattaaagaaaaaagttagaaatgagttcacaaaacaaaataagatttgtgtattttatttttcttcatatgtaaagtgaaaggtgagaaattcttcttctttcttcatatctaaaatttagcaattatttcttactttctcatattttgtaattagcatggaaataacaacaaccaatttactcttgttaatttaattagtgctttgttgttgtaaattccactaaatgaaacactagctttagttagaagcatatagcataattcttttaacaaaaaactatttatttcttcatcatcatcatatatcattacatttctttcatctcatttgacacaatttctaattttttttagtctccacttcaccaaaccattcaatcccaatatgcaatataaaacaataaaaactacctcaataacaatccatagttttgggttattgttgttgggttaaatggggttcatcaaaattaatactttttgtagtgtttggtattagcaaagcatattcatatgtgtataaaatgctcaagtaacaataaatatgaacattggtggacaagaatggtcattcattgtgggctagctaggaccctttgtgcacatagtcacattgtctctaattaacatgttcctcccacaaacaatgtttccctttcacactcactaatggccctatatatagtccttgcctttttcttttctattaatttttttcctttttaaatatgaaattatggcttatgaatcttccttgagctacctacaatcacaatttactctttctttttgccatgaaaattcttggaaagtatgttgcttttgtaccatacatatgtcatgatatagttttaccttcttctttacactacttctccttatctaaatatttttaaataaggacattattgttgttccttgatatgtgtattttttgttgacaactagaaaattttatccttattttttcttatatataataatttacattatagttattaatagatattttttctgtttttgaaaatttctgaaatacttactgtatcaataataatgttcaaaataattagttaaacgcttataaaataaaccaattcgcgcaactatgtatttaaattttattttcaacactataaattatttaaaatttatcaaaaatggagaagaagctcactacaaatataatgtgcaatgat

SEQ ID NO: 48282 - DNA, 854 bp, Cannabis sativa
tactatttttctaataattagttaatgtggagctggtaaaatagtgctagaaagcgaaacttaatgtgacttgaaaattgactagtaatataattaatgcatattttgtttcaatattcataactaattcaaatttgaatatttctatattctatatattcttttttgtgcaagaaagtatacaatattgtttaacacgtgtgcatattgacatatgtgtattagctgacatcgaatgaaaacttggcttataaatagaagagtttacgtgcctcatcaaatatatctgcaaatattgtatttgtcttcaaaatttgtttacgattcttgaaaagggttggtttatgatacaaataagtctttctttttcatttttcaaaatagttttttttatcgttgatttcttgattttgatgaaacgtactttttttttttgttaattttctatcagcttcaaatataggtgattttattattaatcttgctttaattagtatacatatatacatatatagttatatttttttgaatgatatattcaagaaaaacatattctcaaaaaatttatatagttattaatagattaaaagaactgtctttgttggataaaacgatgaaggaataccaacaaagcagttataaaaatctcaccctggagtctacaaattaagaaataatcaaattaattaagacgaacaataaaaatcccataccattatacatttattataaaatctgatttctttacttatatatctatatatatatttttgcatgtctttgcatttttttgttggtatatatattaattctatattagtttaagtgaatttttggcttgaattgcatgcatc

SEQ ID NO: 48283 - DNA, 2354 bp, Cannabis sativa
caaattaaccatagattcaacacatttcatttttttttatgcttagttatattgcttaatagattttttttttctattttttttttaagaaaaactatttaattaattttttaaaaactatttatatgatttttttttaataaatatcacccctagaaaacacaaacatattatagatgactatttgttggtgtagttttttttctctaattttgtgcaataaggagaatttattacttcatgattcatactaaatatgatacaaaataaaaatatagtaccaaataaaataattttgtttaaaaaagatcactttttatattatttacattaataacaaataataactaatttatatataattatacatattatcaacaactaatttattattttaaaacaaattaagaagaatagaatgaaaagtaaaaattatacaccaaaatggcataaattcaaaaaccctttagttttttttagaagaacattaagtttattaaactaaaaaaacataggtgagaattagagagagaattccctctccttaaaacaccagacacctggtttctctctcgctcagctagtgctggcgccatggcaaaaaccagatctaggaatttggggaagaaggtatctgtgtcgaagccaaccaatcctgctaagaagcgtggtccatcgtcctcggaagatggaaagaaaaccaaatcaatggaagccgtattaggtatagagccaattgtattcactgatgatgaagaagaggagcaacatacagagcttaatgacgagaatttcaacaatctgtctcccagatcttcgcttcgtgaattgcaacgtcaggaagaagttcgaacagattttgcacatttcatggaggcaaacaggcaatgtaacagtaacctctgcgaaggtatgaattctgttccccctgtcttacgttctggatctgttgttagaagcttgaattcctctttccagaatgctaaaaaaccaaatgtaaagataacattagatgacattgaggaggaggtctcttattggaaatcaacaattgtatgctatgtattaggagctaatcctccattagaagtgcttgaaggttttgctaggagaatttggaaggaaaaagtggatagggtagggctaatttcgtatggaattttcatcataagattctcatctgttgaagaaagggatgctgtcttgaatggaggctatacgttctttaataaacgaccggttattatgaaagcatggaaccccgatactaattttcgaaaggaagatatcaggagggtgcctatatgggttcaattagagcaattggagctaaaatactggggtcagaacactctctttaagttggttgggcagataggagaaccaatcctagtagatgaaataaccaagcagaggcagaaattaatctttccacgagtacttgttgaagtgcttatgaatcaagagttgcctggatttatagagtttgaagacaaatatggaggaatggcaaaagtgggaatcaaatacgaatggaaacctacagtttgtaacaattgtaggggcctgggacataagactatagactgtagaaagacacaaggcacacagaaatagcagcagtgggttgccaaggaacgaaaggagcctgtacaggtggaaaaaccagcaacaactgatggatttcagctggttagtaaaggtgggaaactaaaagggaaggacaagaatgttgctactagtattgagaattctttcactgtgctgcaagaagaaaatttcatggaggaattcccaaatttacatgatgcaaaccgagaaaagaaagggggagggggagaacctcctcttttgaatggatagaattttatcttggaatgtccgaggggccaataaccaacaaaaacagagtttaatcaagcaattgattcatactcaaaatgttggtcttgtggggctccttgagacaagagtcaaggcctccaagcttggagccttgtactcctatgtgttttcgggatggtgttttactagtaatatagcatggcacaaaggtggaagaatggtcgtggcttggaatccaaattccttctccatcaacataatcaaatgtacaagtcaattaatccatctacaagtgtctacttttgatggtaagaatttccttgttacttttgtttatggctttaatgatgaagagggtagaaggatattgtggcaggatttaaaagcaattgcttctcatatgccttgggtagtaatgggggattttaatgaaattttagacaaagatgaaagagttggctctaaagttaaggagcataatctctctttatttagagattgtgtttctt

SEQ ID NO: 48284 - DNA, 1114 bp, Cannabis sativa
aaacagaaagaatcgatcaaaaaatcttgaagaaatccaaacagccacaacaccaaaaacgcagcaaccgaaacagccacaacaccaaaagaatcgaacaaaaaaaccttgaagatatccaaacagaaaaaaacgcagcaaaacagaaaaggaaacaaacccagtcgcaccaaaccagagacaaaacgcagcgagcaatccgatcgtgagaaaaccagaaaaacaacccagaaccccgatagccttcaatcccaacacgcagacccgaactctggaaaaagtaatgaaacccgaacaatgatgaacacctaccagtcgacgccaagctccaccagtagaagcgcaccaatcggaaacggaagccttagtcgcaccagtcggagacggaagccgtagtcgcacgaaaccagttcaatcgcaaacaaactttcaaaacctggagagaaaaaaatctcactcatgccagctggcaagacatatattatactggagcattttttgtttttaatacttgttttagtgttattattaagtatcagtgttacttaatatttttttttatgtagatttaaagtgtataataattaaaaaatttgaaaactaaaaacatgaaaattaaatttcaaaaaaaaaaaaaagccaaaataaaaaacatagactttaaataatgttaataaaaaattaaatacttaatgatgctaataaaatactcatttgtaaatatagattttggaattcttatttataaagttaataaaaaattaagaaaatagaaaattaaagagagaataaataatgataattagagaaatttttaagtgtcatatcacctgctttatatctctcctttatatacatagattgataaatatataggttgatgattgctaaattataagatatgggatacatatattgtattgtatgacacctttagcaaaaatgattagtttaagaatgagattttgttctcaagtggattagggtcggatcgttcttataaagaatggtcgcctgttcgccttgattgcatgcagagccgataatttcttcgtcgtcacggcacatcgatgtccattgcatgcagagccgataatttcttcgtcgtcacggc

SEQ ID NO: 48285 - DNA, 1686 bp, Cannabis sativa
tagagatatctactatacctgttaatattctttataatgaccatgaggtctaacttcagttttatttataaacgcatttttttaaaaaaaaaatgtgcttaatgtatattcataaaaatatccctatataaaattgtacttcactctcgccccattcgttgtgagtacatgtccctgcagatcaaattttcatcactaattgtgagacaactttttcaccatgatatattgtaatttaaatttagatcactttattattacgtgaaaacgttcttataagagtatattgtaatagtattgatctttatttaaatcaaattataaaaaaaaaggtaagtgtacccagcgtgacacctcatcgtatataatgtgcaccaactttttaaataacccatggaaaaattggtaaaatttaagatgagatctgatattccaaaagaaacgttctgtagtcataatttcaaaagaacaaaagaaagataaaagttgtgccttctaagtctcctacacaatgagaatccttgtaccaaataactactacttattaggacaatcagctttagcagcactaccctcctcctccttcaatttgtactgcccatatacatacatatataattacagagaaagagagaaagagaaagggaaagaatttaatgaaatgaaagtgaagtgacttcaccttggccttggataatgctttgcaggcctaaacataaacaagtcacgagcaccctcaagagttatgaagattttagcttcataaaaacgttcatcggtgcattgcaatgtcaaaaaatagaatattcctccagttattctagatgtcacactcaaaagtttcaaaaacttcaaatcagcaccctacaacatgcattgatacaaatacaacaacataattaagtaagaaagttcatcatcatatataaatataaattaaaagaaacattcatgtatgtatgtatgtatctttaataaataaaatgaacaaccaaccttaaggttgttaaattcttccactgctgcataagctgcatcaatgcagtcctgtgaggtaactttatctactacaaacgaagtccagtaaaatcgttttttcggcttatcagcatgaaaaccctatggaacatatataaataaataaaagaaaaatataatatcattcatcagcaataatcatcaactaattgagagtgtgagagagagaaaaaataatgatacatcagagagttcgagttggttgatataatgaaggatagcttcttcgtcttcatctgaatcgtaacgaagtattttgggatcgaaattgtcgttagatatggggggtcccttccgggatggtgtacaatcccaatcatagccaaccggatcaataaaatcgtaacaaggtgcctcttcctctgccatgttcttgttggttaattttgattctctattacctgtagaaagtcaatattaattcaatattaagtaaacaaaacagagtgagaagaaataataacatgcccgagaatgactttttctcttataattttaataaccaaattgaaataatcaatttacacaaacaaacaaacaaacttgatctttctatgtgtctcaattggaaatccatacagtctgaaaatagaaaagagaaaagagaaacaattaaaaactgatcctcactcatattctcttatttta

SEQ ID NO: 48286 - DNA, 2233 bp, Cannabis sativa
gaggaaggcccatacctggtactttccaattccatcttcttcacactgttctattgccaccatgaatgataacgagacccctgcaaaacatgacgcgggaaaaagcttctctagtgaccctgaggcatgcttcgcaatgggaagtacggaacaaggggaatcatcgaagaggaaaacacgaggcaaaaatgtatcgtccattaattcaaggaagaaacagagctcaggagttaagacatggagcaagaggaaggcagctttggaaacccaggaaattatgcaaggaaacttgggagatattcttgcaaactgtgtggaaatcccaatcacttatgttcagaattttgggcaaggcgaggaggcggccgaaagcatgcccccacctccccaatgaggtgcttatcttggaactgcagagggcttcggcggccttctgcagaaaggactcttcggagtctaattcgagacacagatgcggatatcatctttctcttggaaactaaggtgagcgtggactttatggttaatgtagctaacagactgggatttctaaatgtttgttgcatacctgcttcgggattggctggggggttatgtattgcgtggagaagaatacaagttactgtaatggagactttgaatgcggggtttaaagttaatgttttgcctatgattggatgtgagtcgtggatcttattctgcatatatggtcctccttatggagccttaaagcaacctttctgggatcagatgctagaaaaggttcaggaatgcactttgccttgggccttgatgggagatttaaatatcattctggaggctaaagagaagataggaggaagaccctttcagtccaacgagggaaacattttgacggaatttttactaaactctggtgggattgatctgggatttgttgggcctcctgctacttggcagaatgctagaaatacgacccaacatatccggaaacgtcttgatagagcgattgccgattctcattggtgtgttcagtttcctaatgcatcggtctgtcattttcctatatatggatctgatcatgctccgctctgtttgaaagtgtggggagatagagagaagctttgctacccttttagattcatggaagtttggacctcgagtacagaatgtggagaggtaattgatcgggcatggaccaacactgtatctcatcataatagacttcagagaaaacttcagaacactaagaaggatctcaaagtttggaatgtggaaaaatttggctatgtcgattgcaagctgaaacaacttaagcatactctgggtttgattcaaggagccccgatttctcaacacatgctggaaaatgaagctggaatacaattggagatcctagagatggaagcaaagatggaaagaatctggaaacaaaaatcaagagaaaactggttgaaatacggagataataacacacggttttttcatgcttcaacggtggtgcaaagaaggcagaatcgtgttagttgcattgaaaggaatcctaactgttggattcggagcagacaagaaattgggctttatttttaggaaaaattccaagaactgtataagtcttccaatcctgagatttcagaagactttgatggacttttcaacaataaaattgcagaagaagacaactccatgttgtgccatatcccgggagacgaagcaatccgtgaagtagtttttaaaatgcatcctttaaaatcgcctggacccgacggtttctccggaatattctatcgaaaatactggagtattgttggcaaggatgtgtgtaaaatggttaaagagtttttcattcatgggaagatgcaggggcaaacgaatcacactctcatatgccttatccccaaggaggccaatgcgagttcgttcgacaagtttcgccccataagtctttgtaatttttgctataagattgtttcccgaattctaacggaccgcctgaagagtattatggataggctggtgtctcctcatcaatccgccttcattccaggaagatggattgcagattgttcggtccttgctcaggaagtcaaccacgcaatcaaaatcaagaaaggcagagagggaatcatggttgtgaagactgatatgagcaaagcctatgataggctagaatggagttttattcgacgagtactgctttcaaatggtttctcggcaaagtcgattcaactgcttatggcgtgtgtcacaactg

SEQ ID NO: 48287 - DNA, 806 bp, Cannabis sativa
atttattaattgatttagggtcattttgcatcttcgccctaactaatataacactaaacataatcaaacccataattactataggtctcacacactatacaaattaaaataaaattaaaacaatatatatttatatacatagcttttttcagagtaacatatcacatgcatatataagagtttattgattcaactttcaattttaagttgaacaagaataatagaagaaaaggacataggagtcttgacagtcaatagagaggactatatttttttttttttttttagagagaaagagaggactatattgaattcaaatataatgccctaatttaaacaacctttttacccttcagttgacttgaatatcaaataaattgaagttttcatttgatttttttaagtacaactatatacttttctagctaattctcttattcttcttcttctttcttcttcttcttttgctttttggcaagtataaatatttatatatataataataatatttagaaacatgcacgtttttcatataatttcaagctatatatataaactttttacaccacaaatttctaattattttactgtaaggtagaattttttttataaatactatattttttttacaaaaatactatacataagttttatactgtgtattgtgttaagtttttacaattatttttagttgttccactgttgttttaattattctattttgttgttttataaaaagatagtattttataaaaaaaaatctatgtggtagtaaaatagtaaatttttacataaaatccagtatt

SEQ ID NO: 48288 - DNA, 2400 bp, Cannabis sativa
aataattttttatttacagaaatccacataacaacccatataactattaacaaaataatttaaatcgcagcttaaatttacatagcaatgagcatagcaattactgaagtaataactgaagcaacctaaatcataaaaataaaaaaaataatatgtgtagtaattctcctaaaacaagtcctaaatagaaaacctaaaatccctacaaatattttaaaatctgtacaaaagaaactccaaaataaaaaagagtttttacaccccatactaaaatttctaacttttttacttttttattacgtgacgattttttttttcaaaaatactgtgtatttttttcaaacatattatgtaaattttatactgtgtactgtgttaagttttacggttgtttcacagtggttatttagttgttctattgttgctttaattattctattatgttattttacagttgttttgtataaaaaaaaaagtatttttgtaaaaatttcatatgacagcaaaattataaatgtttttgtccaaaatttattatttttttttttgagaaaattacattgtatacccactttactttacttattttaatttttacctcaattttcatattttttagatatacccacttttatggatgatgtccccatgctagacttaagtaaagagtgaggatatattaggcaatttactcaaaaaaagtgggtatattttaataaaaaaacaatataagggtatttttgattaatgaatacaaaaaaagaggtatttttcaacttaccctttttgttttggtaaaaatcccaaataaaaacccaataaggataacaaataaagttcggaaagcccatgtaattgggcccagtctaaatccaaaactagggttcgcttatatatgctgctatacatccacgaaccccaggtagaccgccattctcatctgcttcgccaagacgcagtttcccaagggagagaggattagggtttagcttgtcgtagcctcaccatgagagccaaggtaaaaattacctgaaacctatcaactagtgtactctattctccttttatttttaattttatcaatttctttatactatgatatatatattccaatatgaatgtatttctgacgaaatgctatggattttgacagtggaagaagaagcgtatgaggagattgaagaggaagcgccgaaagatgagacagcgatctaagtgatagcagcaccagcagcattcgtggcggcgacgacttcgtttccttcgcctgaactcactgccgttggcgtttcggtctcatcggttttgattgtcgttttttctatttattttatttcagtctgtgttaggagtaattttgaagctttttggttatgttaatagccagatttttgctacatttgctagtcgaattttattttgtttaaactcaaatttcttatgaatctattattagatttttgctttgttcatttttttttttttgcattttttttactcagtattacgatttccactttttttttttttaataattaaatacatcatgttgattttgcataaattttcacacaaatctcaaaatggtatttttgtttatggattatggcacttggattgtagaaattttcggtgtgactatgaatgatggtgatgtgatattggaaatatcattcttacgtataaagttggattttgtgaaacttctcttaattctcatttgagcaagagtgacaaaactttactgtgttggtattagttgggttttctttattttaagcgtaatgcatagaagccttattattacccttagagattttttggtggatgttatcagtttttagcgtgatttatacatggtagtgagatatggtgtgtgaaaatgtcacgttctttttatggagacgagtcctttggcaaaacaaccttaaacgaaaacttctgttggtaaatatgtttcttaacaaaattacacagtactagcatagatttatattgttcgaccattatggttaagtgaggttattttacaaattttaatatttcatatggtttgttctgcaaatttcaccaattttactaaaattagaggttgggttttgtcaagtttcctgaatttttgttttgtcaaagacaaatatctctattgggttgggttttctttattttaagcgttcttagaaattttaccttccgagaaattattgacaaaacaaggtcgatggatgatcttgccaaatgactatcatcgtgaaagttacgtgttatttttagcccattttgcacattacgtgtattcatcaagaaaataggttgtgtggaggtcattttaagaagaagctcatatagttctattatttgatcaaatgcgatctacaatgttggcaagataatgtgttt

SEQ ID NO: 48289 - DNA, 619 bp, Cannabis sativa
tcatcgtattagagaattcatattcaggatgttaatcaaacacacatgtttgtaaatctagatcctggtaagataacttccaacaacattatcctcattggtattggggtaagactccccactgctatacctactccagtcttgccttggtaggacatcttcccttctttctttgtctcagggcaagccctaaaattggccagtcatgtcatatgcccattagggaaaaatttgatcattattaggctgatagggtggcagccttgtttgggatacagttggtccccatagccgtgaggtttgcctgtgatccctagggcgccaagttccctttggaacatagggaccttttccccaaaggaaatccctaatgagtggtggctgttcaatcttagattcaactctcttgttgaactgtctgatcagtttgttagcctccctattttggtggttcaactccacctgatgggcttgtaggatcgtggcctatcgatccatccattcttagaatctacatttttgtagggcaaaaacatcactcacagtagcgtgtgtttcttttgttcacagtgaaggaagttcgtgtgaatatgcactttctctatgatctctctcaacc

SEQ ID NO: 48290 - DNA, 783 bp, Cannabis sativa
tgttttaatataattaaaatatcatggtttccttcatgcgtgacaagatccttgctgattatgattgcccttctctttgaaatacatgccctttgctttaccttatctatcataaacacttgcgtacattctactttttaaactaaagcaaaacctgagaaggcaaaattcttttgtgcaactatattgtaagttttttttattctttctcgttgctttgtagattttatttgatgtaatttgcaactaagaggatcatacattctctagcctatgcttttcaaatgattttacttgttcaattttatgattagccacttcacatgtgaccattacagccatcctgcttgcttgtaagacacagaggggtttcagaagtactgctacttgagtctagctcaagtggttgggcaagtgtgtgttgctaaggaatttgaggttcagacccaacctgtgatttgtttctttgttgataatataaaatgtgctgttttcatatatgttatagttcttatcggtattactgagtaacttcttttatatataaaatatgtatatttgtaatgtaatagatatgcgaaccagtagattttcaagtgaaccaagtagttgattttgtctataaatgcattcatcttgttagttcggtgcactctagctgtttcttcctctaattagacagtaatgtgtgtaggctttccttctcttgttgcttttcccgaagggtgtagaactgctgattgtcttagtaggtgagccttttatttacttttatgttgtgga

SEQ ID NO: 48291 - DNA, 955 bp, Cannabis sativa
  modified_base (878)..(880): a, c, t, g, unknown or other
taaaagtgagaggattaacaataaactaatatataaatgaatttacataattacccttcaattaatatatattttataactaataatatagtaattttatatttatattttatatttatctctagacttctttcctctcaataccaaacaacatagaagaaagttattatcctcatcatttcattacacttttcatcctcttaacgacgactctaagctaagacagtttaggccctgacttaaaactcattcattttgagagtccaaataaaaaaaaaaatatcatttattcttataataaaagtctaatttttttttctaagactcatttcaattcagaactaaccttattttcaatcatttttctctcaaccaaacataccctaagtctaatatgtcttaacccaaagccacaattaaattgtacctttgaccccacataattcatgttcacgtggtagttgaagctttcaaaaatgctaatttgcttaaatagttttgcccaaagcattattattactcttttttatttattttttttaaaatttttttaattaattaatttgttttaatacaattattactatgatgagttaagtcaattacacatgagacacgtttccaagtatttaatatttgtaccatattttaaattaattaataataatacatttaattgcttaaaaattaataagttattgaatgtttttgtgtacattcttggccaaaaatgaaaaatctttattgagatgggaaagatcttcatatgtactcttgttttgtataaaataaggtatggctccctatgtaatgacgtggcttcatatgattgccctttaatattaaaagatttctagtaattttatatatatatatannnatatataaatatttttttatattctatctaacaagattacgatgatatgttccctgtttctatttttcctctgcc

SEQ ID NO: 48292 - DNA, 2754 bp, Cannabis sativa
ggctcacgggtgctctactgtgcaggaaagggtaaatctgtttgtcagccatgagttcgagggcttggaggtgtattatacatgtttgggccatattagaccatgagagttgggtctaccagaaaaaatattttgtattctcagcttttgctgcttatgtcgacgtgtaaataacttgtaacattctacaaaagtttttacgggatcctgaaacaaatgtaatcttttgaaatgttagtaaagttaaattattacaagttatgtctttattctgtaattgatttaaattttaaatttttgctcttatttttagtaatttttggtttagcgggatcaacttatgtttagtcaatgtgtggcgttcctattgttaaggggttacacttatagccttgtgggatcaattggaaagggggaagatctataaaggccaaaaatttggcaaagtaacccctcacgggaaagtgcggtccaacagttatatgccctatgctctaagcaccaaatctgtccacacttgtcctcactttctcccccctctacaagagtcgattccaaaacaaacacgaagtgcttcggaacccgcacaaatcctccaattataataacatcttgtaattacaaattttattaaggatgatgtccatctcccaagaagttcccactatgtgttcttctccggtaagaacaagtttgacgttcatattctaggccggatcattattatctcggacctcatcacatgcggtctcacgttcttgattgtctcctaacacggtgaagtgtgaaaaagtaaagaccaattagtcagtaccaaaaccgagtcaaatagtaatggtacaggagggtcctccccaataactgcttggagaggtgctgactggacacaatatctaagaacagaccttttctagataaatagatagggaacacgaaaaaaggaacagagagtgatgatattgttgttcggcaccagaacgatcctagacaaaatatatgaattacgacatattctccagggaacatcatcgaaacccttagaaatgacagtcattcaaaagcaaaaaacttataaacgttcattgtttatgggttttctatgcatggaaaggtttccaaatcagcaacatcctacggtttctaatttctcaatcaactaaaaattataaatcaccctacatggtggtgcatgcttttttgatcaatgaaaaatccagaataaacctaaaatcatgccatgatggctaaaaccgactaccttgaagcatattccaacaagtaaaaatagaaaaagctcgagaaaggttacttacttatagtattaagagcttgtggtgtcaatttctgaattgccagcgaggttcttgcctaaaacttgcttagcctcctcgtaagcttgtcaagattgcttcaaaagcctaatgatgggatccccgagatgatgaatagtggactagcatatgggtataggcgttcaagaatcttcaacagtccttggataagctcagaaccgagatcgagcatccatcaggcgatttttgggtttaagaagtttcttctttttcaaggttttctccctgaatgctagaaaatttaaggaaatggctaaaatgccaagaagtctatcttcggagcatttataaggagaatggtgattcgtgtgtctcttatccaaggacttggattatatctaagaaaacacaaatcttacaatccattggtctgtgaataccaaaggtcttaagtaatgcaatccatagaaccgaggggacgtgtatttatggtgatattcgcctcaagtaacacacttacatgatcagccatcagaacaatccaagatgctacatgctccaatagaccatgtgaggaacacacaccaacgatcatttgacatgtggactacaccaacataataccaagagtttagaatatttccacaatgttccacgatagaatattaagaagccgactcaattaatggccccagacacgatctcacatttggatgaaggaagcaagcctctgtgactctcaagccataaaggcttggggtaaatgttatctgtgtttctagatagctaatatatgatccattgtagatgccatcaaggaaactaagcccattcactaaatccataagagtcaacatgaagctagacatcaagcccggatcaagaaccaccagttaactagtgaaatggcatgaactaaaggggatacccacagggatcatctaggaatagaatacaaaagagtgtttaagattacttagggcctgtttggcaaactttgaaaaagctaaaagttgctttttaaaaaagctgtgataaaaatgtgttttgtaagtagtcaaaaaataactttttgaagaatttatgtagaagctacaactaaaacctaaagctgttacaacctatttttaagaaaaaaatattttaactaaaagactataataaatttttttgtactaaaactttatttacttatttattatatattaaaaaataaaaaaaaaattaaaataaatttattataatgaaataaataattattaaatctcttattttcttaaaaaatattttatattttattttaatattaacaaaccacatcaacttaaaaattttcttatatacttcaattttgattttatttacatttgacaaaatataatataaaaatactataatttacttttattaaatacatataaatttatactttgaaaaaaattaaaatatatagaaaataaaa

SEQ ID NO: 48293 - DNA, 1278 bp, Cannabis sativa
  modified_base (29)..(34): a, c, t, g, unknown or other
taataaacatacttgttagtagatctaannnnnnggtaaaataatttccaatagcttcaatgtccatcagactacaattcttggagcagtatctgtttcttctcgaaccatgtacacatcccgtgttgagacgttgtagcaatttctcgcattcttctgatcgcctttgattgtgccaccacatccgttatcacgcgagaacttcatgcatacatgcttgatggaagtcacttccactaaggttggtagccctagtatcgcattgtatgcggtctggtagtctactaccacaaaggttgagtgcttgaaggcacttgtattattttctcttttacgggtgataggtaaatggaccttccctatcgacattaggaatttccattaaatccttgcaattgaatggggcaaggttttaaaccttccttggtgagccctatcgcctagaacgcaaatttgaataggatgttaatagagctcccattctccacaagaaccctagaaacctgtttgctggcgatctatgcattaatcacttaaggatcaatatgggggaagcatacgttcttggcatcatcctcggtaaaggtgatgggaaaattcatcatttttgagtgatgtgcgggagattgcagcagtttgcacacttccccttcttctacctcttccaggtaccttttttgtgagttttgaatactcccaatgagatgggtccacctgagattgtggccacatgttcgtccaccggaggtggagagagtttggaaggatatggggttctcagtcctagtttaagtaatgccaccccaactgaggctagtggagcagggagtgcaggcaatgatgctcctagagcttgagaacatcgtaccccctgcggaggatttacaacgttttgctctctgggaaagatcatgtgtccatgcacgaccccatgtttaggagagatgatcaggattcagacccattatcctagatgtcctgctcgaaagtatcatctttcaaataatcactcactcatttctggtgtgatccttttccccgtgatacttgcattctttgttttgatcacgtctattcctccctccgtgtgatatctgtggaggtttcctataatggaccatgttgtaggtcgctttgtagatgttttctcgagtgtctattagacttgtatacttggtgtattttggatcatactccctgcttggcttttttgatgaatcgttgcgattgtggcttttaccccctctctggttctgggaatggtttgcactagaatcc

SEQ ID NO: 48294 - DNA, 3214 bp, Cannabis sativa
tatatatatatatattgttgattgacggatattgtatcgattggagtggacaaaaaaactttttcaataaaatcatttttctaatatgaggttaaaggtttaaaaggtgagttttgaactatcttgtttatttttctccatacctgctgatcaagaaaaattattatgttgcaaaataaataaactgtctaggactttttttaattaatttttttctaatgaaaaaactattaattaattaatgaacttacaatcacaaagatctgtcaagtacgtattgaataatgttgtcatattgctctttgtaattttgtttaaacatcaaaaaaataattcgtggaatggactatacttgaccatattttgaaggatcacattttgtaagaggatagcattaattatatatggcttatttatatggttcggtggcgtttgattggaagtaattatggaatggaaaaaaaataatttttactttatttttttatttagttatattttaaagtattggaataacattctaatagaatattttttcctattttctggtggaatgactattctattttgaaaatgaaggaaagacaattccaatgtaacaagagaaaaaatttaataatttttttatcaatttttttatacattttaaatattttattctattccattcttattcatattctcattctcattcttgttcctatatttttattcctcctaatcaatcgtcaccttaaattatataagttttggtaaattagtttttaattttattaaagtaaattttagtaagttggtccccaaatattaatttttagtaaattagtctccaaattttaattttttagcattattaagtctccaatcttacatatagatttttttattgacttttatttattttacatactttattatattttttgtgctaaatttaaataattttattttttaaattttaatactttgataaaaagaattacattaatattttttatttttattttttaagtatttatatagtacatataattataatattaacttttataaaaaaatatttaaaatatactttattcatatatattattaataaaaaaaaaaagagtatagcagattcatataatagcctaagagaattctagtcctctcacatttttatatttttatattttattatttatttatgaagatgtagtattataattttaataattttttaattacatataaatttattttttatttaaatttttcatcaatattagtaaaatttcataagttcgctgcggagcataaactaaaaataaaatttaaaatataatttacttcggttgtttaaaaaaaaaaataatattattatttaagattttttaattgttttttttcttgttattttggtatattttaaaaaatatatatatttatttaatttgataatatattaatctaaaattatttcaaataaatataaacataaataaataaataaaataccttcatttaacattcaggactttatatttctaaaaaactagaatttggagactaatttattaacaaaagaaaatttaaagacaaaattaccaacatatagataatttgaaaattaatttgtcaaaatataaaatttaagatcaattgtgaaaatatatataatttaaacatatgagacacttttcaaaaaaaaaaaagaaaaaaacaagacatatgagacaaatatgggggtcactactgcaccatataaacgtacgtgcaccagctagctagtagctaccaataccattcggtacacgattttattgaatttggtaactttggaacatatttgtgaatagttaagtgtaaacatttgcttatataatataaatgcacatttatatttactatagatataccagccggcccaccatgtgacatctatttagaaacttcgagagggggcacatggaaggaaagtttggtattcatgatgaatcagattcaagaaaatgattatgtgaagatcaaatatttatagtcatcatcactcatctcatgtttactatatatttatatatatcagctggttctatatatatagtatgtatagatggcttttttggactttgggaaatgtgaatcaatccactttagtcatttataattagtaattataactcgagaggttttgatctctgccatataaaataaataaaatcaaaataaaacaatcaaattcatataagcagtgctgaaaatgaaatattaaataattaaagtttttttttttttatataaaaaagtatcctccacgggccacccttataccccacccaaaatataattaaaaaaagaagttggtagaaactacttctattttctcccaaaatgattctacacatatcctatacaattaaatttggagtttctcaaagtccttaattatttttataagtcttaattatgtttagtgattcttttaaccaacttgtacacttgaactgatacacttttatgtcaatgcaataatgcattgtacaataaaatttatatttggttttttatattagagaccatttttagtaaaatgtctttgaatcttattgctatatattaaaagttaattgatttaattatataatataaaataaatgaataacaatatgtccgcacaaaatatatattcaaatacaataagtttttgtaattataggcataatttagttgttccctcccttaatataattttttttttttaattttattattgttattattatacacacaccaattaattacttacaaaactccccacccaatctctatctttcttgtgtacaaaccaaactgactttataaaagcaagattgaccatactacaaaatttatgattaaaaataaaaaagttgtggctaattataaattatcattattgtgttataattaaaaggtccgtgactaaaagtattagttacaaaaattacaatttgttttgactaaatgtgtttttagtcacaatatttattgtcactaaaactaagttagtgacaacttatcactaaatactgtgttttaatcacaagtaatttttttttgtaattaaaactcacatttagtcacaaaaattttatgttatgactaaaaaattatcactaaaagtaacaattttttacggtgcatacagactttacatcacgaaaactgaccacatattcgtgagttttaaataaag

SEQ ID NO: 48295 - DNA, 1840 bp, Cannabis sativa
tcccgaagttaacttgggcgcagggctagggtcccctcccaagtcaactgctatgattcggatctactcaactctgtgatgtcatcctccacattatgtgtcaaacattaatatccacgtcaccagggaaagtttacgggttaacaaaagtttacaagaatatgaaagcaacgtgtcttaaaaaatgttgctcttcaactcatacaaccaaaaccaaacatacttctcaatcattaatccatggacagtagtttcaaccttcttagaagactttggaacgttttcttgtacacttaatgtatgcaactcacttcaataaaaatgggtgacaagcctattctggttagctttaaagttcatcgtcactagaaatcaagtttcttgcattcaactatggtagcaaaataagaacataaaaaatgaaaatagatactaaattaacatataaacaactaataaacgctatatcaacataataattaaaaaaattatagataaattgactaattcataaaactaaaataaacaaaaataataccaaaataacaacacaaaaatatcaacttaaagaagaagaagaagtacaattgaatatgtcttttttctttgggctagttaaaactcaatttttctagatatttcatcaaacacgtagcatgtgtgtctttatatgcatgcacatatccaaacacatattataatatatttacagaacaaaatttataactaaaaagacatccaaattaataatctacttttgaaaaaaaatgtgaacctacaaatggaatagaaatggacagcgagctttttctaatcaattttgaagtacaaaataactaaaaattaatttttttttgcattcaactgcagtaacaaagtaacaacacaaaaataaaagcatttagaaaataacatataaacaacactaacacaacgagaaagaaatatgagaactacaatttttagagaaatatcaaatatagcaacaaaatctatgcacaacccagtaaaaaaataactttaccaacttgtgagttaaatggacattaataagcattacttttgaaagctaagattatttgaaaaaagataaaagaactaaatttaaaggagattgttgaataataaaactctaaatttgagttttatacatgagatttagatttgagcttttccaacaaaaataaatcaaatgaaatgtaacaataacaacaattacaatagaataaattaaatgatgaaagcaactacaaaacaacttataaacaacaataaatcaacatatttatttaagatcttaagataaaattactaatttataaaactcagatcataaaataaaaacaataataatatcttgaagaagataacttaaagatgaaaaaaaaaaagcacaagtgaagatgcactctttcttttggacattatatcaaacacatgacatgtattttttatatacatatacacaaaaatcaacttttttttttgaataaaagcgtttatatataataaaatgagttatacctcatgatcattataaaagataacattcgggatagtagatacctctaccatgccatttatattattggtaaacgcccatttagtcatattataggccgcaaaattacagtaattgtgcaaaaatatcaacttaaagaataagaaaaataaacacaataattgtgcaaaaatatttagatcaagcttgtgctaatgtagtataaaccaagaaaaacaaaaagagaagaataatttagaatgttagcttaaacaaaaatagtagaaaaaaaaaagattgaaaagagagatagttgaacaagagggtaaataactgtta

SEQ ID NO: 48296 - DNA, 3918 bp, Cannabis sativa
  modified_base (1142)..(1150): a, c, t, g, unknown or other
  modified_base (1231)..(1233): a, c, t, g, unknown or other
  modified_base (2828)..(2828): a, c, t, g, unknown or other
ctctactattccgagtaatattttctgtaatgaccgtgaggtgtgactatttatttccttctaatatatacgctttattttcaaaaaaaaattataaatttgtatactttttaattattttaaagttttttccttgtaattcctcctaaatattgaataggctaatttagatttttgacccctgaattacgtaccaaatcacgctcagaactatcgagattgttagatttaaagattttggtctaattttactaaacaaattctaacgtggatgaaatacccctaattaggataggcgtgtaagatttactccacattatgccgataggtcttgataaataaagatcgagtaagtttgaaagcatatcatcatagagaattacagttatttgagcaatccacagagtagccagtttttgctacctgatcagaccgtacgatcgttttgaaatacccctaattaggataagcgtgtaagatttactccacactgtaccggtaggtcttgatctataacaactgagtaagttttaaagcatatcgtcatagagaattacagttatttaagcgatctaccgagtagctagtttttgctacctgatttgactgtacgatcgttcaaaaatacccactaattaggataggcgtgtaagatttactccacattatgccggtagatcttgatctataacgatcacgagtaagtttgagagcatatcgtcaaagagaattacagttatttcagcaattcactgagtagctagtttttgccacctgatcggcccgtacgattgttctgaaatatcccctaattaggataggcatgtaaaatttactccatattgtgccaataggtcttgatctataacaatcgagtatgtttaaaagcatatcgtcatagagaattacagttatttgagtgttccaccgagtagctagtttttgctacctgatcggaccgtacaatcgttctaaaataccctttaattatgataggtgcttaagattttctccatattgtgtttttaggtcttgatctataaccatcgagtaagtttgaaagcatagcgtcatagagaactacagttatttgagcgatccagcgagtagctagtttcagcgctagttgcaataggggtttnnnnnnnnntttttgttacaatttaggttgcatcgctagttgcaataagagtttctatataaaattcagtaaaaatgcaaaaaaaaaaannnaaactattttaaagtgtaaaaaaaaaaaaccctaaaaataattcaatattaaaagcattataatttattaagcatataaatcactttaccataaatttatttgaaatataatcctttaaattaaacttatatttaaattttataaacgtacataataaatatattaattaatttgttattaaatctatatagatgtgcatagataaagagtaaaacttttaactaagaatactaatctagttaagaattaaaaaaaaaaattataataattctaattaattatatattttctaactaacactctttcaccatttattcacaccctttctccatacatctccatctcaccattataaccatacatatatttttcttttgtttatttgcgtcatcttattcttttttttttctttttcatgtcaaatgttttttttaggatcatcaaattatgtccattcactcatcctctctcttcatctctatttcattattataactatgctctatgtacatagagcaaatttaatgagaatgatagtaataattaactataagtgatatagtaataacacaatgactttggatataatcacaattacaagtgagataggatgatgacaataattttaaaatgataagttttctataaatttatcagttattttatatatatatatatatatatatgtgcggatatattcttttttaatatttttttttattgtaacgtttgaagatatctcttaaagtaaatgattataaaaaattaaaaaagttcaaaacatatcatttgaatttaaatctaattagatataactttatctattttctcattattaatttgatgaacttttttttttggtatattttacaaattcgctcatttataaaagtgagtagttaatttattgtttgattagctttaagtatagagtaaacttatttagaagaataacgatgatgataagtgagagacggtgatgtgactacaagtgagatttagtgattacaaaaattttgaaatcatatatatgatattttttctatatataagtttatcatttgtaacattttttttaaattccaattcaatttattcaaacgatatagtattttaaaaccttttaacattttaataatgggttaattgaggcaaaacctccaatacttttattttacttgcacttaacccccaaaacttaatttttggcggtaaaacccccaatactagtgttatgttagcaatttaacattttcatctattttaggtattaagtgccatgttgaactgtccacgtgtatatatacgtggacacaatgtccacatgacacaattttattggttcatgaaaaaaaaatattttaaaaattaaaaaaaaattaaacaaaaatataaataaaaaaaaagggtaaatagtagcataagtacccaaagttttgagtttgtaagcggcataaacccaataattttttttagcggcataagtacccaatgtttatgaaactgtaattttcttccagtttcaccattacagactctgttattgtcttaaacaggacacatataagactcaaattctagattatttggtctngacgaaaatatgtagtatcaattacttccaaatctttttttaatattaaatttaaaacggaatatgtactgacgaaaatagaaaaaaaaattagagttttacaaacattgagtacttatgccactaaaaaaaatcattaggtttatgccgcttacaaactcaaaactttaggtacttataccgctatttacccataaaaaaatattttttttcattttttttttcttttcagttattaaaaaagaaaaaagaaaactattaattaaaaaaaatcataaattatttctctctatctctcttacctttatttttctggatgcatttttttttcttcatcttcattcctcttaagaatatcatcaccaccaccaccacagatgtggcaccaccaccatccaccacaaatgcccaccacaaccaccacgttaacctcttttttaaatctaaaacaaccacaactactaccaactccacactaactcaaacacaacagcacaatcaaacaaacccgaacctgccaagatctaaatcaaacctgccaagctccataacaaaaaaaaaaataaatcaaatccatccccaatatttgtgagaagccagatgggggaactagaatagaagaaagaaggccaaaaatctaatagtggggatctcctatttctcattagatatatatatataaatttatatatattttcattattttatttatttattttgaaatactagtaaaagatctccggctgtcccaccaccagagcccaaagaatcaaatttttcatgttccttgcgcaatgaaggttcaagggggttgaacagaaagctttggtctagccttttgcgaactccaaggccttgaaaggaccaccattccacctcctcctccaccattcccagtgacatggaccaacagtggcatctcgaaccagaccgagatgaacgagagagagagagagagacgaagaaaggggaagagagggagagagatgaagtttgggtttctaagatctacgagttccatggtggtgttgatgaaattgtagggggcgccgcacgggttggaaacagtttgagagagagagagagagag

SEQ ID NO: 48297 - DNA, 1391 bp, Cannabis sativa
ccttttccagaaagtaaggtagagatgcagcatgatccaagtgaaaactgcaaaaattaagtataagactctaaataattgacgaaagtctattatgaatgataaaattcaacccctttaacagagtgaataagaaatatacattgctcaatgttttaacaaaaccaaagtaaaagaaatttgttgagcacttatcatccctccccctattataaatatatatatatatatatatatatatgtgaagaaaaaacgaaaaagaagataaacaatctcatacaacttgaaagtccaaatttagtttttccagctagcagttgaagcgacatttgacttaaaaatttaatccatatgtaattcttaatgaagatataataaaagagttacatactgagtgatgagaagaacatcaactgttgaaggatcaatctcatcaaaatatggcaaagcagccatacctgagtaggcaggatgaatcccacaatcgaactacattcaccagaagacaacccaatataagaaataaaatcaatagtttatatatatatatatatatgaagtccattatattattgggcataccaatacagtcttccctttgtaagtcatgtacacacaagagcggccaacttcattacccgctcctaaagggattacaataagtttatcttcttccctagctgaaaatgaatctcttcgcttaagagaagccggttgcatcgttgttgaagtcatcttataaaagctatatctccacaaccctttgtatcaaattacataacaaatgaatagtagcgttataagttccatgtatgacaaaataatcccaaaacatgaataaatatgcatattttcttatttttcttagtcagccattagagcaaaaccctaataattacacaaacacaagaatcttgaacgaaaccagtctcattttattctattttagctagagaatgaatgtaagttctttagaagaagaaggccatccataactgactgactgacagagaaagctttccattggagctctacagaacagaagcagtaatgagactgaaaacggtgtaaaagagaggaagaagacgagattgaaatgcccctccaaaacgacataaaccctagtcattgaatactctatcatatgaataaatgattaagaaaattgagtttattaacaagctttgtttcaaacacaaactcaactgtatcatccttgctcaaaaagatatgccagtgattacaagctgaattcaaaagtcgaaaaatcttacctggatgacgaatgcgaagaagacagcagagagagacaaaaagcgaggaggtagtccggcgaaccagcgaccagtagagagagagagagatcggagcctgggtgaggctgtgttggt

SEQ ID NO: 48298 - DNA, 1069 bp, Cannabis sativa
aattgctgatttccagttctcctcctgctcttgtacttcctccaaatccacttgagctatcttaatcccatctctaatttgaggttctgtaaatagcagtttttgatccctagtgatcttctagtcccgaatgaaagattcccaattcttcttagctgaatttcgatatgtctccgccaattgttcctgctttgcttcgacttcctccccccaactcttgccttgtcttccagttgtgaaatcgtgtgtctctgcactgtcttcccctgtaacaattgtctcatgatctacaattaggtcgtgcgccaccatatctgctatgagattcagaccttcattttattccgatgcctgaacttcttcattttcctcgtcaacctccacttcctcaaccaccggagccctaatgactggcttgcgccccacttttttcctcttcgccatgggagagagaaagcaggggaacgaagcttctcttggtgagtaggtatttaattattactatacatatttaggttgtaaaatttatttcctatttcattttcagttttctaatcatttgtattcagtatatatatatatataggccattctcttcatcaataaaattagattagaagtattcttcatcaaaaaaaataaaaaattacataaagttgtagtagtctaaaaattggaaaattttccgattaatttctgcgcttctaaaagaataggattttgcactcgctcaaccttagaaaatcatttttaaggtgatcttctactctcacctcctacacaggaagcctgctacaccccgttctccggccaatctcccacgcatgtggcgcgtgtacgcacgtgcaacaccctgacaacgagtgagattttttcaatgatgtcctcctcgacactccctaattcttctatgattttattttttgaaaaagagaaagggacttcttgtcttagacaagaccctcacaattatgtattgaaagtcctcatttgtggcggagggataccttagttacaaaaacgcttagaaacaaaagttagcacacagcaatgcttaaaaaaattgcta

SEQ ID NO: 48299 - DNA, 2028 bp, Cannabis sativa
  modified_base (326)..(339): a, c, t, g, unknown or other
  modified_base (408)..(410): a, c, t, g, unknown or other
  modified_base (567)..(572): a, c, t, g, unknown or other
ttactattttataatttttttttttcaaaatcttagttaacattcattttagaattttgttaattaaattatgttatattatacaataactaattagtttttaaagtaacaaaaagtatataaaataatcggtatataaaaatggtagcttgttatattacatgatagctcattagtatcgaaaatattttttaaggttacctagatgtattttatattataatccaccataatataacttaaaaataactatttagttactaagatgtatacacactacaaaaaaggttacttttagtgacaacattttagtcacaacataattnnnnnnnnnnnnnntgtaacttttagtcacaataaaatgttacttgtgactaaaaatagtatttaaatacaagttgtcactannntagttttagtcacaacaagtattgtaactgaaaatacatttagtcacagcaaattgtgatttttgtgactaatacctttatccacagactttttaatcacaaaataggaatgataatttataattaatcacaactttttcacttttagtcacaagtnnnnnngtgactaaaagtaagatttttgtagtaacaaataagtttttaaaaaataaccaaaatgtatctcaaattatatgatataaaaataaagttttttatataaagataactaattggtttcttatcagcacttttagtaaccaaaaagttacttttagaaagaaaataataataaaacaaaaaatgttagaagacgtcgaaaaacatctgaaacatcaaatttgactgatgtggcacgtcagtaatagttataacgttattattataaattaaatgtaaaaaatatgtattattataaacttccttattaatgaaatgacaactgtatcaatcgtatggttacttactctaattaaaatctgagaaaattatagaaacgaatatttatgtttttaatttaaatgttagatgtataatacttctctaaataaacatgtctccatcaattaaaacaatcaaattgcactttttttttgagttggaacaacccaacaagattacaacagaaataggtaggggtcattgccacttcaatactaagtgttatctaacccaatgaccatttatgctaaagtatgcgctgctgtattcccttgcctaggcaggtgatgaagggaatgggagtgaagataccaccttacgaagagagctcacaatcgctccatatgcagataaaatatcctccttagcttgaatatccattatgagattcatgcactccgatttcacttgatgaatttcaatgttattctctcggcaccaacataaagcttgtaataaagcccatccttcagctatttttgggggcatcggcccttgatgactcatagccatcgaagccaaaacttgccccgaggagtttcaaatcaaagcccccatgctttttcttccttttttacttgagacttcaccattgacattgatcttcaatttcccataatctagggggaaccattccttctatctggtttggctgtgtgaggggagatgagtcttctgatgttgttgagattattggtagaaggtcaaaaattcctttgcttcttgatagaatctcgtgggatgctcctgttgattcttgaacataaaagagtttctactgttccaacacttccaaagaatacacatgaaaagatcaaaagtatcagtggaaaaatgggacttaatatagaacattttatcaagaatatgcattcctttcaaatcattcagagcgtgttggaaaagcgtacctgacaacaccctcttgatactcttacgacagactcaagatgcatgttacaatgaggacaagtgggagaggggagacattttttatgaaagagatttttaatagtgggaagggtgttatgacaaagtccgtaaataaagtattttatcttagggggaatgcattgcacgcagagggatttccaccaagaatcgagagtatcagtgttagaagaagagggcttgacaa

SEQ ID NO: 48300 - DNA, 1955 bp, Cannabis sativa
taaacagtcatttaactttattagggaaggttttctaaaaaaactgttttgaaaactgacgggaataagctattttgtagtagtgttgggaactcttttcaatattctttgttgtgtggtggtgatttaaataaaattttatatgctcatgaaaaagaagggcgagtgtgagattgtcctatcttatacataacttctaaagtgctttagatgagtgtagtttcatgaatatgagtttttctagaccaaaatttacttggtgtaattgtcatgagaattcttcttttacttaagtggatatgaattacgaattttgccaaaaccgtctctaaaagccctttctatagtagtgtagagaaattagaaagggaaacacaagagaaaaaggaagtaagaaaagagaaaaagttgaaagatttgtggatcctggcattcgaaatatggattgaaagattagaccagttgtaactccaccatttttgatagtgcatactctgagcatctctgaggcaagatcaccaacgatgtaatatggatttttggtgaaccttgtaaaatctggttgtgtctttcttttcttgcatttttcttttggctatttctctatctctctgtgattgaatgtgtgtgtgtgtgtgcatgtgaaaccctagcagagctgcctgcgtttgtgattttcttgaacattcaagcttagtaaggaagaagaaaactatacctaggtttaggttttagtttttgggttgggtcgagacttttgtttgggttgtgttattggtttacactgtggacgcatagtattttcaataatacagttataattatatcactcaatataagtgtctcataatcacattaaaacattattataaatatgatatactaggtgggaggatatgactgaaacaaaaacaatacttcaaattgcatacaattttcagctacatagctagtactcttggataagttcttcattagtattaatagtattaatagtatctccttgttcaaatctttcttcactcatttttgtggcagaattcaacaagaattccatgtcctttttcacttcttcaactgttgacacatagtcatgaaatttataatcttctttgaacaattgacttggaggaattatttttccatctctagatttttggattttccatcttcttatttattctcataggtatcagctcttagaaaaaaattgatttcaaattctttccattccaatttttgttgaatatattttgatcttgtagcttctacaaccatttggtaacaactagaagattttggcgaagttagtttgtaggattcgcgctatcaaatctcttaaatgcttagagagagttgtctaatgactggaattgtaaattagttttttctctgtttcctaaaatatcataatttgttttgagattaacttcaacttttttagtacattggtacattggttttttttttttttttggtgaattttagtacactgtttgaaaagaaaaaatatggaggagcttctttaaagaagtagcaacacctttctgcgtctacttgataggcaacaacatacgagttaagagcgaatattgtaaatgttatggcaacacttggattgttaagtctcacatatacaaattgtttgtctttgaccgctgccagggccagccctaagcataggcgggctaggcccgcacttagggcccactccttctagggccctaataaaaaaaatatacatatgttttaataatttttaaaaatatcatctatctttatagtaagaatctaaaaaaaaaattacctagctcattttaactcaggaccggccctaaccgctgtagattttgtgcacaacaatggtatatatgccatggctctcgattttacaaggcaattctcttcaaagagattgcatgaaaatctggtatgatccgacgctcatacctttg

SEQ ID NO: 48301 - DNA, 1960 bp, Cannabis sativa
gatcgtctcaaaggttgtatggatcggctagtctcccctttccaatcggccttcattcctggccgatggattgcggagtgttccattgtggctcaggaagttcttcatgccatgaaaggaaagagaggtaaagtgggagtcatggcggtgaagacagacatgaacaaagcttatgaccggcttgagtggggattccttctgcgggttttgaaagcgaatggcttcaacagcaaagtctgtactctattgatggagtgtgtcacgacggttagatattctattttgctcaatggtgcacctttggctcccctcaatcccaaacggggcctctgccaaggagatcctctttcaccattcctgttcatactctgcagtgaagttttatcgaaacttattcgccgagctgaaaagaacggtgatttgaaaggggttcgtgttgctaggaacactatcccgattactcacctgttttatgctgatgactccattttcttttgtagtgctaatgcaaaaaacgcggacgctttactaaaatgcctccttaagtatgaaagatggccggggcaacgtgttagcaatgctaagagtggagtagtgttctctccaaacactaagaaatcatgctgagaagaaatcaaagggatcttgggcttcaatcacttaaatccgaaggagaaataccttgggattcctttctttttctcggctaagaaaaggaatgattttctgttcttgaaagacaaaatcctgggtaagttggaaggctggaaggcgaaatatctttcacaagcgggtaggactactttggtcagttcggtactccaaagcatcccccactactttatgtcaacggtgaaagttcctagtactctgtgtgaggagctggatagggtgattgcaaagttttggtggagtggctgtgtggataaaaagaattactgtgctctaagaagctggaatgagttatgtcaaccaaagagatgcggaggtcttggattccgcagacttaaggacatgaatttggccttattggctaaactttgttggatggtaatggaggagaaggacaagccatgggtgaaactactcagagaaaagtattgcaaacacaatgatgtgtgggtagtgtagaaaaatgggaatgactctaggtgttggaagagtattctagaagccagagagatatgcgtgaatggggctagtatactgattgctgatggctcatgcgaaatctgggacagaccttggattccaaggcgaggcttagaagacatcaaagctaacttccaattccaacgaaaccaacctttatggcgcgttatggatcagttcatacctggaactagaaactggaatgagaaggtgattaaggactgtttctcggtggatattgcagaggagatattgcggattagaactctagatgagggggtgatattatttttcggaaggattttgcttttggtaaatttttttgtaaagagtgcctattggctaagccggaaaaatcgcgtcaaagagccccataagctctgggagaaactttggaagatagagttgcaccctagactaaaacacttctgctggagattgttcagtgacattcttcccaccaaaaacaaacttggttttctccaggctgagctaaaaatgtgcgaattctgtcatactgatctggaaaccgccctgcatttgttttgtcaatgtactggtactcgggctctctggttcagggctggtgtaagaacccaggggtgtaattggaatagtttgatggagtttggtatgtggtggtgcagtttaaatgatttgaatctgcaggtgatggctgctgtgctgtgtgagtcaatttggcagtggcgaaatgactgtatctttaaagggaaagatgtagatttggagcgcttgttcgatcatttttctttccgaactcaggagttcatctctaaaatagctggct

SEQ ID NO: 48302 - DNA, 6294 bp, Cannabis sativa
agggcacaaaacccaacagatggaccgtccaatcctaggccacagaatcaaactatgggccaaatggtagatgagtaagttttaccaactcgctacttgggagagaatgatcaacctaacactagtcctcaaacagaggtattgggccaaccccttgttcacaatggtcagacaagaagggcctctaggcgaatcaacctttacccaattgggtaccgtgcatgaccttaggaatgattttaattgtagaatgggattagacgaacaggatattcctcttaccgtacaactagataatacaaattactatgtacagggtccagttctaagagatcctaatatgacacaggtcggtaacaagtaggtcaagttaatccattagcgcaagtataaataaatcaacttaagagcctcgttcaaggtctggtcggcccaaaactcatagatctagaacctgatcagactagagaatcactattctcactagaaatcaacgctctagacctactgccaaagttcaaaatgccaacatagaaaacgtacatgggcaaagatgatcctttgtctcacattaagtattttgaaatgcaaatggacttacaagcagtgagaggtgatgtacagtgcagaatcttcccagctacttcggcagaggctacctagcagtcctacttcatgttggcttcaaggaattttagtttgtggaattctttcatgtcagagtttcacacatagttctcttcttcttggaaactcccatatcacttagaagacctagtcaaagtgaaacaaataccacgagaacccttaagagcttacatcagcatatttatgattaaagcaacaaaagtgaaaggactggccgagtaagagaggctagatgcaatcctatgaggtatcgaagccctaagagaattggcgaaagacataaagaaacttactatacggttaatggtagaattcttggactaagaagaaaaatttgtaaagctcaaagaagcagttcggtgtgtggacaagttggactgaagaaaaattaacaacatgcccctacaaccaatacatccatctagccagaccagaattcacaaaatcacagcagcttgagccaaggttgtaaaagaacatataatggcaacaaacaaggtaatggaaaaaaaaaaaaagtagattcagtggcaactccgaccaacatcctcgcgagaatgcctcaaagtttactgcatttaccatcctaacagataatataaagacaatttttacaactacccagtccatggtaccatataaaaaacgtcttcccatgaagaaagacatgagcaaaagggataccactataatctgtcgctttcatatggactacggccacgacactaatgaatacaaaacttgaagtaggaattagaattcctcattaggaaaaataacccttacttgaaaaaatatgtcaagatcgaccaggaataaagggcaccaaaccatataacactcaaaatcagttgatgcctccaccagtggacagacctcttcaggttatcattggaggtcccgaccttgctagagactcgggcaaagctagagtgaaatatgcccgggccttacaatatgaacagacagatgtagttttagctaaagaagaaagaaagtctaagcaatcgcatgttggagaatcaatcatatctttcagtgaagcaaattctgaccacgttatttatccacataatgaccctttggttgttgatgttcagattgcaaataaaatgatgactcggaccatggttgataatggagcttcctcaactattttgttcaaaacaatatatggaaagatgggacttcaactcaaagatctagttccttgcactcagctagtatatggatttttcagccaaagtgttgccccactcggatagatccacctacctcttacagtgggacaagacccaacaagcacaacggtgatggctcaattcatagtgatcgatgtgccttctgctttttatgtcatattagcccgactagccttacatgaactgaaggccatcacttttgtattccacctatgtgtaaaattcctaacaagaaatggagtgggttgtttgaagggaaaccaaaaaactacacgagaatgttgtaagctcgctctatctaaggccaaaaaggaagacaattttagccagagttcagagaagggtaaaagctttgtccaataggaatacgtccaagtgaggacaaagatatggatcctcgccatggggaacctaagataaatgttgggctagtgaacgagctagaagaagttgaaataaaacccaccatatcgaccacgaagctcaacattggtacggatttgttgctcaaaataaaaattgcttttataaaatttctaagtgcaaacctcgaaattttttacttaattgcatgaagacatggtcaataaaacctataccctttctgacgacgagaataaccaagaaagacacacttcaatgactttagatctaattttgtgacatgtgaactaatatctcgagtaaaacaaacactgccaaatacccgaggagcaactggaaatagttacttttcgggaaaaagaattttaaatgagatctcaccattaagtgttgaggatggcattcaattaataagaaagcatgttgtggaaactgcatcgagcaaaaaaggtttaggaactttcatttgaaacaagagggcacgctcaatttcaagaatatatctatttttacgttttgctacaccattttggggtgcaaaatcattgtaagaagtttcatgaagcatgtcattacagatcatataagattgaaatcaagtagatgtgtattccttggcattctttgcaaagtacaaaaaaatacattaaattgatttgaatctcagcacaaaaagcacaaaatataaaaaacagctgataactatttttcattaaatataaccaagttacatgagaataatcatccacaaaagcaacaaaataattgaatttaagttttgacaacataagagaagggcccccgacatcagaatcaaaaggaacactagcatgtttattgactcaaggactcaaattaacacgataattttgggaaaactgacacgactgaaaatctaatgaagacactttactatagtggggacaaaatttcttgagcagatgaatggatgaatggcccaaatgacaatgggcctcaaaagcaaaagaaacacttggacaagaaatagagattggtggaagtggatcaagaacatacaggccaccagattcatgtcatttgccaatagtcttttttgtcataagatcctaaagtaaataatgattaggaaagaatgggatgcaacaatttagattacgagtgagttggctaacagaaagcaaattaaatgatagattaggtaaatgtaagactaatgataaagtaagtagaggtgtaggagtaatggtgctagatccaagaacataagaagaaggtccattagctaagttaatcgttgaagtggaactatgagattaaaaattagaaaatagattggaattacctatcatgtgatatgtggtgccaaaatcaatgacccattttaaggatgtggcaagaaggaatgcattagatttacttgaatcaacaatagcagtgacagaaggagatgaagacttaagtgattcttggtaccgcgagtacttggcaaattcatcagcagaaataacgaccgatttgtcagatgcatcaccagtgcttgcaacattagtgaactgtctttgctaatttttaaattgaaactttctacactcaaattttgtgtgactaagttttttactatagttgcaaaaattcctccagaattcgatgttcgactatcaaatccttatggatatccccattctatccacttgaggtagaagatttccctgacacattacaattattgtgactaaccaaagcaatagtaagtaaatcagatgaagtagtttcaatacggagaacatgactaaaggcatctgtcaaagaagtgatattagacccagaaagaacttgcgtttttatggaatcaaatttaggagagagccctgctagggagctcatgatagccatctactccctctgacattgttgaaccttcacatcaagactagaggataacaacacattaagttctcatatgtattcttgaaagccataaaatagtttatgtgtgattgatcttgtttttccacacaataaaataccttgcacacatcatacatgcgggagagatttccatttctagagtaaaaaaatttcaaataatccattagttctttaataaattcatagtgattaatcaaacaattaccttattttcaatggaaatttgaatttgaagaaataagcgagcatcctccttaagccatgtcaaatcaatcatctcttttgaatctaactttggaggatctcgagtcaagtcatcatctttgtcaatacttcgtaaatagaggaagttagtctttctctaatccatattgtttgaaccattgagtttatgatcagtaattttagacattaacgacaacacatccgtcacaattgaagacttatttttagccataattctgaaccaacaaacaaggacagcaatagagggaagaaccacaagaaagtataacaaataaaccttaacaatcacgaaaaagaacttgatggaataaataaatacggaactaagtcaaaaacaccaaggttagaaactagcaaaaaatggccagaaaatgtatagtcagacacctacatgcgtcggtgcgtgggagaagtctctggatctttaggcgatgtgtgaggctcatgcgcagagggccagatcactaaactctggggttacattgattggtgactaggcaatttaatggtatcgacagtgagatattactttctctctaagtatggtttccgaaaaatggaaccctaaaaatgaagaaccctaattgcactttttttaataaaccctaattttaaatttcaaattgatgctctgataccatgtaaataaaggtggagagaatataacatgtatttcattgaggaaatattttatgtatttatacacaacttagggaagttatactaggaaactaattagcttatttttagctaattttacagctaatatacatctcaaataattttaaatgatgataacattatattttgattcctcattataagtataatatatgagatatctttcattcttgtataattaaataattatactgccattcaccaatttacaaagctcgagttgttgtcaaacttcatgatgcaacaagaaacttagaggttataacatttggaaaaattattgaaatctttcttggttgttctgcaaatatactcgcacaatataccaaaaaagtatgttatttttcttcttttcattgatatatttctgattttttttattattcccacaatatacaggagacaattaactgcttgcatagaatcaatcactcatcaaaccaaggaaaatacgccatacacttgaagaccataaaatcttttgctggtaatacaagtgccatgaaaatatatgttactacaattttaccaacatcactaaaaccagcaattccaactattgaataaagtgttcttgaaagacatggtgacacaaattcaacttgtaagaaatgtgttcttcaagaacataatgactcaatttcaacaggaaaagaatgtgttcttgaagaagataatgagttttttgatgcttcatgtacttctcttgatagcatatcagctacttcctctagcgaagtgaaaactgtataatctcaaagttgtatatacatcttttgaaacttctcttgtacatatttcttttgaatcaattaatatctaatccaccacaactatctaaagataatatcatagtcagtgagagattattttttgaaactgaccaaatacttttactgttaaaataaaatttgaatataaatatattgcttttttttgctagatgtaaatattctgaattttttttggctgaatgtaaatatgctatttttatttttaatgtattatagtctcttaagtttacctttatcttttttatatatatatgataactaataattattatacaaaacatatgattaacctatgagtttgtgcctctgactcctaaaccaaacctagtatgtatatatataaatatatatttatattatcatgactcatatcaatattattaaattttaatatgcagtacatctttttaccccaaacaagaaatacc

SEQ ID NO: 48303 - DNA, 2193 bp, Cannabis sativa
aagatagaggtagttgagaattacagtaagttggtttccaaagtttgagatcatattttgcacaaactttagggaagggactaagtccaagtcagcattggaaagaatagatggtatcatgtaattatgaatgaaatcacttgagccaattgaaatgtagaacacagccttttggattaatagttgcatagcaccatcatttccaatgcttgagattatattttgccttgtattttcaaagttatctatctgggcatccatatttattcttccaacctatatataaacataaattaatcaaaacaattaaaaatattaaaaaatatatttattattatataaatatatatatatatatatcttacaaatattttgccagtttcattgagaattccagcaccagcagaagcataattaacacccagatcaagaactcttggctctaataatttatcatcagtaattgctaataagggagacaagtaaggaagagtgaaatctttgtaacccaattcttcacctgttaataataattaaaagattaattataacttattgtcataagaaaatcaaagcaaaaagagtatatatatatatagtcttgcctatgatgtcagtgactgttttgccattagtgaatcgaccagttggttgaccaaaatcgattccatagggataaaaatcagacttggagagtgttggtatgaagttgttgtttccagcatcaaacaaagcatctccaaaaataaagctaggaccaacactactattttgtcctaagcatattccaaacaaactgatcatcatcataaacaatattaatgttactatatataatttactacaatttgatgagtaaatagccatgctaaagagtaacaaatatgtattttgaatatcttgatgatgaatgtaatatataactaagggtactgtattataaatcataaataaggtatatatactattacatgattattgtacacacactatctactcatcacaataatgagtaattaatctcaaattttaacataattaaaatgatgtagttctcatatttaattatgtctagggtagaaattaaataatgtatataaaaaaaatgtgtatgtgtatatatcactacattactcatactatacctataaagtttaaataattactatatagtgctatttatccctaaaggatacgtaacgttattaattaatccgccatgaagtcaaataatatgcactctaatacacttcattcttcatacttaccaaaccgatatagacttagttttatttttggcattgttgcgcatcagtggtgtctagcatcatattgaggtagcgtcttattaatgattaatgatattctatcataattataacattatattatgtgagacgcgatacttaattccactaatagtgacataacatcttaaagggtactaagtaccattggtatcttttaatattttttttacaagtctaacaatatagttagtaacactaccaaattccaaaaccataagataagaaatgaatagagacttttataagaaaacattaattcacttattaatttgccaaaaaaaaattattaattactcatttttataaatatcgtgatctagaacataacatctcaattaatttatgaattatttgtgagttattactcattaattgtgtcatgatttcgctcttaaattgtatacctcttccatcttcatcaattgtgaattatttgtttttccatgtttaacttttggcaattgtaactttgtggttgtcgcatgaggagtagagatctcactactataaaaaaaattctttttatgtccaataaaaatagtgatagagatagaaaagttttggggagatttcatatccaatgacatgaaaagtgagtgggaatgtgacaaatgattactatatatatatattttaatttttgattctatttttacgtccaactttgatggacatggtgttgcagggtgttacgtgcagtccaagatggcacgtcacaagctaagtgatgcccacaagttggctaagtggtggtgaagtggtggcgcatgttgtgacgcatgcaggtggcatgctgatgcttagtttgtatgcagtggcattttcgtaaatatttttaatattgtccggaacgggacgggacttggtattcaccatttatttg

SEQ ID NO: 48304 - DNA, 2964 bp, Cannabis sativa
ctttagaaagttctgtttgctccccaaaaagacttgaatcttaatatttgatgaaaaacagagaatgtgcccgaaagactttttgaaaaaactcatcgaaatcggcccaggttgacaaaatatctacatgggcgctgggccagcaccaggtgtcaactgggcgctggtccctcactttggcctcctttcttcattgaaagtacttgtttttccattttttatgaagacgaagaaaatgcccgagatagatttttgatttaatgattagaagtgttgtcaacctgggcgttgggtgcctgaggcactcggtgcttagaaatgaaagttctctgaatctgactctgatgccttaaatatgttcgtgacatgtttagttcatgtcctagtacaaagtttgtccgatttgcactaagacgatcccgaaaatcaaaaccttggttgggctgtcaacttgggcgctgggtgaaaccctaggcgcccaggttgatttctgtggtgttattttgtgtattttcagctcccgggccttggatttggatgattcatgcctttatagtacataacactgaaagatagtgaattgaaaataacttggcgaaatccaaacacctattccggagttcttgaagtcaacctggacgcaaggctaaggacccctcccaggtcgactgctatgactcggaactactcaatttcgaaattcttaccacgtgtcaaatattaatatccacgtcaccaaaaattaatttttagattaacaattgtcaatatatatatatatttatataaactcataataccataatatacatatataaggatctcacgtataatagctcagtaaatatatacatgtcaaaattttagggggacaaagaggtaacatagttccgccacttaatgtttatagtcacaattaggacggacttagcttcaagctagggtgtgcaaatgcccctcctcactttatattaatttattttaatgtatacaatttgttaaaaacttcaataaattataaatataattttgctcattctaaaatataaattaatatttttatatttatatatgttattctcccacctcactagctaatatttctaattcggtccaatatcaaaggttaaaattaattaaagaagtactaattacaatttcctattacaattttatagtcaattttcacgtccgaaattatatgtcgaaatatattttgtttaatttttttttataacagtagtcgttatagttacaatatcatccctgtaaatttttgaaaattttcaaatagtttacagtaccgaaaacaaagttcttgatatttcaatttaccacgcgtgttcaaaaaacttcaaatgtattttcgacacagtaagaggttgtttgacttcataacttaaaaactgttttttgttttttgaaactgaaaacagtttttaaaaactaataggggccgtttggcaaaattttttaaaaacagttttttaaaaaactagaaaatagaaaacatcaaaatgtttgttttcaattttcaaaaacattttttttttcgtctaacatattatatcttatatttttgctcgtatactcggatcctagacccaaaaccatacatgaacccgaacctggatgggttcatgtcatagtatggtgttaaaatattaatttttttagtaagaaaaaatctaaaaataattttaaaaaatttgtgccaaacaccattaaatttttaaaagacaaaaaactgttttctataattacttttaaaaattgaaaactgaaaacacagctaaacaggttctaaactattcgaaaatttttaaaaatttacagagataacgttataagcataataaacactaccattaaaaaaattaaaaaaatattcagtgtgttttcaaacacaaaaatggactaaaaacttataatagaaagttaacgtaacagtactactaaaagaattagccccacattcacatgtgccgtaatttgatggtaatgattaaataaatttaatgaaacgaaagccaaccataccaaaaagctattgaaatgtgttctctttctcaacgaacgagacagagactgaaaatgacatccaccacatattttgtccatagatatttcttttctcatattatatatacaccataacattacttccatttatttgttatcgctttcttttctttagtcttttggagtttgggtcctactctttgttgttttaaagaggttaaaaaattgtcactatagtcttgaactgtcattatggttagagatgatctaagtagttaaattgggaaggtgctccaatccattatttatttatttatttatttttttatttaaggatgaagaactaattgattttaacagtgagtttgtttgtactgaagtactattatttttttcatcttttctttataaacaatagttataaattcaaatgtactatattgttgacgcgacttttcgttaatagatctaagaaaatcataaaataagattgaatacaagttatttaatgatgaatgaacaattataaagtaaacaagacacaatattttataattgttatattatttgtaatttaaataatataatattaatattaaaattgtgatatatgtatttggaggttatattatatgacatataatgtaataaacacataaacgttataacataaggagttctaattctgaaaatagatttagaatctacgattcacagttgataaatatataattaaataaataaattacatgcgagaattatagaatcaaatggagaagtttctagttggtgtgcaaaagttgtcccaggcgagggtgatatgttgcctaaatcagtgcataggtgaatttcaacgttatgcaatgtatcttgaggggtttaatgatattgctccaagcgacatgtcgcctaaaatcttttttgggtaaaaatgttacataa

SEQ ID NO: 48305 - DNA, 1502 bp, Cannabis sativa
tggattggatcgattctatccaatggatgtatatcatatatatttattagtttaatttaggtttatctaatattttagacttaatatttcttagatcggatcgattccatttaatattttagatttagtatgtattggattagactggatccatccaatccaaaaaaaaaagagtaaaattataatgttaaatttcatatatacatatagattttacgtataacaatataaaatttaattactcattcaaactaaatagaagtactaattagttcgattagatgttggatgtattgaatttttggacaactcatccaccaaacgatccgatccaattggatatttaaaaataacatccaatctgatctaatcataattgaatatacaatgtttggcggtcggttgtaattggatcgatcggttcttattggattggattgatttatgcacacccctacttacacacataaataattttaaaaacacatttaaaatcaaatttatatattagttccaattgtaatacacacattaaaactttaagcaacaatcctacaaatgtaaaattcataaacattgatcgatatataaataaaattattattattaatattacattttttttttgaataaaatcgaaacttgattaacttaaatcatcccgaactagggaagcaataacagtaagtaaagagtgactactgaaaatacgatcagccttgccaagagaggatcacgccagacaatgcgccaccctattagcaaatcgcttaacaaaacataacgaaacattatcaattttagcaaacaatgccttacaatcagaaataatgtggccataggagaagccatatttttattgcaatgtaaatctgaaataacttgtagacagtctgactcaacaatcacatcgtgccaataattagctttcattcccattgctttgacttcatgtggctgaagtgcacccaacttgcacactgttttggcctggataaccacaccagaagcagcccgagctactagacccactccaaaccgattctccataggaaaaactgctccatccacatttactttgatgattggaaactccggggccttccatttatcagaccgaggctcatggtgatctttggtagtgtctgcagcagcattttgtgcattaaaccagtccacataggtaattttagcaagctgaattacctcctccatcattgggattttggcattccataccacatcgtttctagtattccaaatagaccaaagaaccatggctgcttcaacactctcgtcatccctccaagagattaatcctgcctcaaaccagctcgtgaatagcattgcagcaggtgcaacagcaggcaccttcgtctgcctccaacacacatcagcaaaattttaggactaattaggatttttttctccccgaactttgacatgtaccaaatcataccccctgaatttttttggtcattaaaaatttttcccgaactatt

SEQ ID NO: 48306 - DNA, 2587 bp, Cannabis sativa
ctctctctctctctctctcgtccaaagataaatgcgtgaccacaagcacctaccagtcttctttctctcgtccactctttctcgtaacttctttattattatttttattctgagatttatgtatttttaagatttttatatttcacagatcatcaaagatctcggggttgtggtttcgccagaactgtgggcagagttctactactattaatgggtgactttgcaatttcttatgagcacatgcatcccaggtgattcaatcatatggttcttcagtatctacacatggccttttttcctaggtgtttattttgtatgggcttttagtctaatgtttctcttcagcaggcgtagttagtggtaagaacttattgaatttatcgtttgggctcataataaattaaaggttgctcctgctactcagcctagagccttgaacattgaataattcttaaaattataagaaagaaaagacttactatctttgggatctaatgctacaccgcaacttcaataccttaggggatccactctattacatacgttgattcctaatttttatgtcatatcatgacataaattagcaattcttaggatttgctattcttgtggggctcttaaggccaaataaaacttccaccttagttttgaagaggatgaagacgatttttttttgggagaggggtgtaatccaatatagcgacgatttaaaaccgtcggctgtactatagcctgccgttttcaaccgttgaattttttttctccaatagttttctaccgtcgcttattctacccagtattcgtaacgctgatataagcgacagttttatagaccgttgagaattctttactcgacggtgtaaaactgttaggaattccaaggttttagtagtgctagtacctaaccaaaaacttcaaaaaaatattatatgatctaattttgtcctcattaatatatttaaaatgtttattttattgatatttcttttctcttattcgaattttccccattagggaatgcactttgttcaccttatattaattatattgaacaaacggttgttattagagcatctccattattaaatggtgagaagttaaaatataacttatttaacaaaaaatgtgctataatagtgtgtcaaaaagtggtgtaaatttagcacagtaaatcttgtgtcgaatttgacacaacatttactataatataaaatttacatcacaataaatacactatttttttttatttatatttatgtcatttgtgttattttattaatatttttaactatagcattaaattatgaaatatttattttattttttattgacttacatattaaaataataataaagttattagtttttatatatttaataaaaatattaattagatattaaattttacattaaagttttgcaattgtgtattggagcacaatgttaaaatttgatgtaaatctaccacaaagctatttttttgtgccaaatatagcacaatttttacatctctcattagagatggtcttaattattagccagttgccccacatggattaaatataaagttttatatttataataaattatgctattctattcatcagtgattagttttgagatgaaatctcatgactcttgtcatggtattagagttattttcctagcgaccaatattcgatctacacttatccagatagtaagccagaaaagcaaaaaaaaaaaagtgcatgcacaacaagagactcacttagtgcaaaaagagtacattagagatccaaacaaaataagctaccatttttaagggggatattggataatattatcctacgtggattgaatataaaaatatattgaacaatttataagaatatagattatttaactcatcactaattgatttacaatggaatctaataatttttttaggagaaaattctcaaccatcaagtaccaaaagcaaataaacactttaaaaaagtggggagcgatgatttattcaaagatagcatcttctaataatagttcatggatacctaggattacctggccaccaaatcacactactattagtcgataaagcgagtttgaccaaataataagcaacaacattacaagatatataacaatgaacgaaaacaacttaaaacctattacaatgactaaaaatttcatccaactcaagcctcacagaaacaataatagacacattgcttttaattttaagaacaccactcagacaatcagattcaataataatattgtcatacctaaaagaaagacactgagccaatgcattgcaaatagccaagtattctgccactctaggttcaaaagtcgtccaatctccagctcgtcgaggctcaaactacactcaactcatctcgaatcactatgtccaggctactatacatttgccaactgaagcaatagttgcatttgtattaactttgagataggctaaactctaaaggaggaggaatccatctatgaaccatcaaaatttagtcgtcaaccgagaagaagcgggaaccaccatcgtttgcttcttgttttcaaagtttccaaggtaatcacagacccaatt

SEQ ID NO: 48307 - DNA, 1563 bp, Cannabis sativa
cattgaacacgaagaactcgcagagcctggagattgaatcgctagatttgaccgaagaggaggctgctacgctggaaacattggggctgacctcttctatgtacggagttttcgctcttttggaccaccaaacggcggcgctttcgacaattgcagatgcagtggcggcattatcatgtgatgctttgaaagctgatgttacagcgtttaatttgatggattctggggatggctatactgcgaaggatgagattggtgtttgtggtgatatgaaggtacttctgaatgggtctaagttgacggggaaggttgagattaatgcggtttcgaaaatccccaaaattcacggctgtttgagggaacaagccaaattggttcattccaagactcgggtcgagttgaattctgccgttaaagctggcaaaggagggcctgggagcgtcgctggagcagccgggatggtccggactgcgttactgccattggctgcagcgctgtgggacttgggtacttgtagctttgaccgttctaaatcaaatttatattcaatgggtagcgatgatttgcggtcgagtttgggaggtttgtttgagaagaaatgcccgagtaatgattccctgaaaaatgagtttaagctgttctcggaactggttttcgaaggggaagagaattatggcaaattagcgcatcaagtgaatgttttgctgggccttgtgtggaaagttgtggcttgggaggcaataattgcatacgtttcccttgaaggtgctgaattgaatgaaagtaaaagcacagaggtcaatggagaagagaaagcgaaagttgataagaagagtgagaagaaaaggaaggtggttatggggaaagggaccagtgttatgatccagttgattaagaatagattgagtaagttagatgcttgtggaagttcagggttactggagaaatgggttgaagatcttttatcctttatggatccaaaggacattgagtttgatagcttgttgatcaaagtgaaggagattgtggaaagcaatgaaactagaagacttcctaagcttccaaaggtaaataacctacttgaaattttaatcatttacaccattatttataggtgttcttagtctatatattgtacatttttagttaacagaaggggaaaaaattacatttctgacttggatatctgttgcatttcagggtactcgtgattttgcgaaagaacaaatggctataagaaagaaagccttttcaattatagaagatgtttttgagaggcatggtgctacggccctggatactccagtatttgaactaagagagactcttatgggaaaatatggggaagactcgaagttgatatttgatcttgctgaccaggttagcgcactgattttctaaatttttattcccgtgaagtcttttgcctctgcatttattacacactatatgaatcaatcgcttctaatttgcaacaaactaaggttttgtgatggtctaattcgttgacagggtggggagctctgttctttgcggtatgacttaactgttccttttgctaga

SEQ ID NO: 48308 - DNA, 981 bp, Cannabis sativa
ttgggaatttatggaagataatatgggttttattaaaagagaaatgcaaattaaaccaggaattacatagagcaaaactatggtcaccccaccaacacctgggttcacagtactcattccaactcttaatcatgttcgaactcaaaatatctttgaatatgtaaattaatgggggtggggtatgaacatttatttttgtaaacttcatcctataaatattaaattagacatggataaatctaatccaatttcgcaaagggactttccagaatgacaattgatatacacattcatgtaactaaatagaagtggaagaaagttgataaacatttccactttctataagtttcacacaatattttaactaggactgaaaatcaacattacgaaaacagaggataagctcaattcactccgaaagaatctaacaaaaatgtcatgaacaacttcaaaacttccatttcctcaaacctccaaaccgacatggattcctacaatttcaatttgaattagctattagtatggttcttcttcttcttctatgcttggcttatcagagtttatctaagacatactgaaatttcataaaagaaagcatgcaagattaatcttgagtgaacaataaaaagtaaaaatcttacatgtctttgagaaagaatatcatgatgagtgccttcttcttctattcttgttgtaattggttatatacaattgaggaaagagcctcacaccaacatcatcaatgtgctcaaaatacctcatcctccatctcttgcaaaacacaagtggtacaatcacagctccgaagccaacaaccaatccaatttcagcacttatcagattccaatcaatctcattatcatttccaggttttgaaccattctcttttgggttgtcgtcggacttgcatttattcaaaggtggtccacatagacctttatttttagcaaagcattgtggtgaaaatgtttgaatttgagt

SEQ ID NO: 48309 - DNA, 2067 bp, Cannabis sativa
gtatagctgtataataataatctgtttttattgtaccatatttttggggaactagtttagggattcattgtatctttattatttgactaggaaaatgttacgtgccgagccacgtaaatgttagttttatttaaggtttagatttttttttagattttagttactaaagtggtatgattattcgagcgatttttttataaaaataaattgtgtatatcaaagtatttagtaaataaaatataattgtgtctgtaaatttatgatatgtacattgttattaacaataaaaagtatgttaatctcaatatttatatactcatatagtagttatccataatgtgaagaaataaattatgataaggcataacaacatatgactgtaacatttattatttgtttctaaaatatttaaacgaacaatatatgtattttgtaaaatttaaaagaaacattatgtagcaaaaaaaaaaatgtgtcatcttaaaataagaaaaaaataaagaaggccaattcttcaagacctacttaacaatcatcattaaaaagaaaaaagaaactaataaccaaatagacttggtctaaatcttcacaaataaacaaataaacatttgctttagaaaagtactggtttaaaacttcttttagtttcagaacaacaccatgtctgttctagaagcaaataaccttatgaacctcaccacattaaatggccttacaacacagttgtggtatgaagggacactatcttcaagttttttcccattgaaaatgtcaattcccacaaagtgacactttgcaagccaaatttgaaagagaacgatatgcaatgtgtcaatgtttaaaaatattagacaaagaactgttatgtaatctagaaatagttcacaataaatgtgaattccatcatgaatactgtgaaacagtttaaaataggaagcataattcagcaacaatcgaatgagcctttgtattgcaactccattgcaactgctgtagaatgacagtttaaaaatttgtgatcaaatgctgaaattaattaagtcaacagaatgatattatatttcatattgagtaaaatatgaaaaatgtaactacctttttttatatgaccagtggcaactgtgatgtagaacatatctttatttgatttgtcttttaacaaagtgctctgccacactttcataatatcatgcaatgtttttccctacatattttcaagatgcaccatttgacaaactcatatttgaacaatttacgcaaacattttaaattttatcacgatatccccttgagtttatgattatagcataaatgtcgcagccttagtcatcacaacgggactcacatgggagcacttcagtgtgagttgcccaaatccattactcacacatatctttagagctgagctaatcctcttacaactcaacatttactgaactattcagttagccccttctaaacactacatagatgggagaaatttaaaagtctaaatcaaatgacttatcaaattgacttgaaattcttgattaatttttctcaagatacattcacattgttgaaagagttgaaaacccctcaatgcatatctacatttgtgagttgtgactgttcccattttatttttccttatccttctcaatttaacgacataggccaagtaaaatcacattttgggttggaacacaaatgagcatggaatgaccacttgggagtaaagttatgctacaaacctggtctgttgacgcttctttttagcctcatctgtatttcttttctcttcgagcttttcgtagtactcgaaatagaaaaatcaccaattaaaatgtacccataattgtaaaaaactattatcatatggagtaactatgtgaacaaaaggaacttacggactataatcttgtctcttttcgttttgttactctttcatcacttttgaatttgaaaggagattttatgatagaagattgtgatttgcttcctctcccaccagaagattttgagttggtgcgatgttacgaaaattatgtttattacgcaagtgtacgcaatcaagtagtatctcac

SEQ ID NO: 48310 - DNA, 912 bp, Cannabis sativa
tggtttccttcgttaatccacttttgaagaacgtttgcaacacttcgcttgggttgcctgagcctaaagattctacttttaaggtcatctttctccacataatcagcgacgatatcagcactggaagctcccgaagataattgtctacaaaatcctccattgctgaagaaaggaaccgaaaccgagccagaattttctttcaatgaactgatttccctgcatctcctgagttcgataaaggtttaactttaagcagttgatcaataaagtattttgaaaaatcactactttgaatctgagaaatgaagtaataaagaaacgggaatgcattaagctatgcgatttgtgattgagttgtagacagttcaaacttattatacagattagaaactaaggcaatagataaaagagttttgaattcagagtcccaaatatccatttgcattttctcgggaaccaaacaaagacagatgaggcaagagtaagggaaagcaagtaagtattgacaccaagggttgtaatagaacgtaccgcctgaggatgaggagaactgcgcgagacgccattaacggtggtttgggttttggggtttgattgttgtaagtctttcgttgaggaatttagacaccgtacctacattcgaattacaacttgctactcgtttggtatagtttcatattagattgtattgtagtgtatttaataggttgggattctcctgtcttggtggttaatggggcggtggtaggggacgatttcaatacccaaagcgcgaatgaggcgggggcggggataatactatccgtaccatatccgactccgatataaatatataattttctttttattcttaacatatatatagtatatatatgattgataatcaaaaattttgattatcatccataatca

SEQ ID NO: 48311 - DNA, 1411 bp, Cannabis sativa
ccaaacatcatctccccctttttcaccttaaatgacgcatcatggctttggatgactaaatcttccttagcgtggccgtactggaatggaaccggaggctcaatccttaaaacctcgtacaccactgacttggtcagtaccattttctctatggcagcaaaagtcacccctccttcttgcttaacgatgtttctgatctcgtgagccagttgggcatgcaaactaggccctgctcgacctatccacttgaacaagtttgggaagaggactttcatgcctccataggtattaaagcacgcgaggaaaatcaagttatggcaagcctcttctttgtcgagtgcgaattcctttgctctgtccaaaactttggtggccgaggtggagaaagcttggtatattttatcatactttgatttgacaaggaaaggtggtattgggaatgtgtgaatgagaagatcttccgctaattgtaggaacttcgatacacctatggttataagtggagccacttgtgggacaagccacgtgtcaacaatggtgtttgcttgagaccctaagatggtgtcttttggagttttaccacagaagagattgaatacatactcgaatgagtaggtgtcgcttatggggttgaactgaacttctttctttgatgacagttgtgagttgagagtgtggaaaagctcggttaaggattttcgcaagagagggatgaagttgtcgtgtttggaagagagaacagagaggaagtagcctttgagggctttgtgtttgggctcagaggggtcaagaaaggagaggactctgtaaccaccggtaaagccagtagaaggcatgtaagttccatcaaagacattctttttctcgactttggtcatgtcgaagagaatgggaaaacttgcagcgtcgagaaggacaatgaccttaggatttttggccatgaaagggcctggtggtccgttggctctgaagactgtagatttgtattgggtcattcgggcttggaagaatccgtcttgaccttggttgtagtagaaatcccatcgatccttaatggcaccgaaaaagggcaagccataacctcctgggatctcttttagtggcaaatcttctctttctttttcataattggatggtaattgatcttctaagtcatgaaggagtgagttggatgatagtgaagacatgactacagtatttgagttaattaaggtcaagtactactactcatgtgtatttatgtagtaatatggtatagtacgtggctctcaattctcatagcagcaaaacgaaagtgaattaaaacgtgtaacgcatgcatataggaagagagtagttgaggattcatctttaccaatgaagaataattaattaattaatttactattgcttatactttgatttattctat

SEQ ID NO: 48312 - DNA, 704 bp, Cannabis sativa
  modified_base (284)..(284): a, c, t, g, unknown or other
gtcaatagattataacaacacatgtgtacaaaatagtattttctttataaataataaaaagaaattgtaaaggtaagtgagacaatggttgtgatagcattaaatcataatatgcaatatgggtcatctcatgggcatgggggtgtgtgtagtgtcgcccacattattgggtgccaactacaagggccacacgtacataaacaatcttctaacttgtcttttttggacccccaaatgttttcaacctttccttcaattcaattattgttattgttattattatnattattattattattattagcctagaaagtttgagttcgaacacatatgtcaagagtcagaagatcgcaatcttaacaatcaattatcaattacactggtgtccttttcctatttttaaacacaaaataataattgtacaactccttctcttgtcatttgatatctaaaattttggctcaatactaactacttcacatgccactatacaagtataaatttacactagaacatctttaagggccagcactcctaatggcccatcaaaactcaaatagtcttatgggcctgaattctcaaatgggcctttgttgtgtccatataaaattaaaaaatgggttaatttcacaaatgcacaaaaataataaaaaaacaacaaaaatacggttttacggaattttaaacatttttacgattatttt

SEQ ID NO: 48313 - DNA, 1171 bp, Cannabis sativa
caaaagtagactaagcagaccgagttatgactgaacaactataattttattgtgttctttacataatttgttatttatattctattaatcactgtgttattttgagtattcgttactttagatgaatatttgtagttttatacgtgttgtttttgcttaggtcgaatattcgtattttttagtgatgtctagatgaaaagttgtaaaactaaatttaaaaatagtttaatttattattattttttaataatgactatatttatattaattatatggggtgcaaattttgaattcattaataaattctatttaactatacaaagctagtgtgaaacgaaaactacttgtacatcacgtgatgtcccacttatctattgattaatttgtatgtaatttatttatcccaatcaattatgaatagacttatattaaagatgtatagtgaagggaattctttaataatttaatttgttatgataaccctaagaatgtttggagagttcaaacaaagaaaaataattaattactatcattgtcatgtgtagttgcttcatctatattttatatatacacatggaacaaattaattatgatcaattcatactatgtaacatatttatatatatatatatatatttatataatggaacttattgtcaacctgaattcgtgtcacacgcaattttattattacagaaatattctcttagctataggcttcaatcttagacactaattataaaaataattgttgattcttaattgaaatagacacttggctctatcttgaagcaattcaaaatatttgttcacactttactttaataaggtatatgtttttgaatatagaatgtatatatagtatttgaaagtgaaaaataaaaaacaatataagaaagaaagtgaaaggaaaatggacaagtttcttaaatgcagaaaaagaccaaaatcgatactataaataataaatacgtcataaaatattcaaatattggcatcgcagcatagtggacgtcggttggggatgcaacattcagcagctggttgttgagaatttttatcaggggcacgaagttgaaatggaaaaagcggcaatggtgagttgggcaatttggcgtgcacggaataactttgtttgacaaaagaagagttggcttgcttcaaatattgt

SEQ ID NO: 48314 - DNA, 1802 bp, Cannabis sativa
tgaaaccagaaatattttaccaaagaaatcaaactacatgaaacagatactgagttgctactaacaaattaaccagtctattacatgaaacttgtaattaagtgtatagaagctgaaaactagttttgatttgttcttctcatgataaataagacaaagggtcaccttagtttgattcctttaaacgtgtatttggctctaaagagaagagaaaaagtagctaagggagaagaagtttttatcagactaaagaatttttgcactttgagttgcatgtgcggtccaggcacctaactatataagcaaatggagagtcacacatatatatatacaagttcatcggttaagaatactataaaacaaacgtgcatgcatatacacttaaaaatatcgccttatgatattagtagtagtagtagtagtagtagaagctataataataataataataataatatttttaaaaaaaaacactaaaaagcaaaatgagaaaagttaaaaacgtgcataaagaagctttcatggagttggtacatgcctacatggtaaggctaaaacaaaaagaagaagctaatagaataggaccgggagtaggtgaaagtgtacgtatatgaggaattatgcttatttcttttaaacgcagaattatatttggaaagagtatttcattcttaagctatacactaaataaacatagattttctttctctaattcataaacaacgaattctctaaagactactgttatatataatgtacgtgtttgtttatgataggaagttgagggaatgaggtataataaggccatgcaatcacatatgcgcatagatacatgaccaagttggtaattttaaactaatatgtttcaacaaatacaaaggtataaatataatatacatattatgtatagatcgaattttatataatatacacgcataaaaagacatatctaataatatttttattctatttgtgcatatactaacagaagaaagaaaagaaaaaccacaactaggttccagtttcccattatttcactttgtacttaaaccagaaaaaggtaatataaaaaatgtttttggttggccctttgaagatgtaagtttttctatgaaaacaagctattatatggtaaaaattaatgcatagggaattagggatcaatgtgcaagtgaatcaaaaccccatttgtgataaagttggcaagcacttggcaacctgttggggccggtgtgcatggtgcagccgactaaaatcctataagaactttaatgcaactctttcgtacataattaaattaattagttgttatgccacttaatgattatggaatttgtacatcataactgttctaattaatgattatatgattgagttgttttcttcttgttgaccggttcagatttttttatatatatttacctactttacttaggtagaaacagtagtaatggggccgactcggggcatgatggtcattacagaaatatagacttataagtttttggcagtataatcattttaataataataataataaaaaaaaaaataggtttgtaaaattgtattttcaattgtgcctatatttggtaaatagagtattgtgattaagtattaatttgtggggattcagaactatctgccttattctaacctcttctttacttttataactaactgtaatttttttagtataattagaaactgtaagtacgcggcccataatgtgaccaaataagcgtttgccaacaatgatacgggcatggtagagatatctactatacctgttaatatcttttgta

SEQ ID NO: 48315 - DNA, 2546 bp, Cannabis sativa
  modified_base (1447)..(1448): a, c, t, g, unknown or other
actgaaatagtaaaattaaattaaattagataaaaatccttaaatctaacaacctcaatagtgcaaggggaatttttaatgactaaaaaagttcaggaggcatgatttggtacatgcaaagttcggagggtaaaaatcataattagtctttttcttatatatgattgaaaacttgcttctaactttcttttctgcttgatttaaaaatcactactaattacatgtaaactagatgagtgaccaaaaaatatattttgttcatatattatatgtacattaatagtaacatggtaacttgttatatgtagataactcattaatttctaaaagagacttgaatatacagcttaaaacttaagaatgcatactttttgttaagataaattaataatttgtattacaaattaaataagacaaatatgtatgtctgttatattaaatatgactatagtgttgtttttttaattaaaaaaaatattataattcaaatttaaactcactacacatatttctctaatattaaatgtgatcatataacttaaagtgttttttaatattgcaatgtaaatttaaacacattgcacatatctaaaaaaatatatttttattattatttttttattaaatctacatatctaaaaagcaatatgtgtatgatatttttaaaaaaattaaaaatattacagttaaactaaaattataattaataataaattttgattattattatgttttattttcataaatatcacttaaattcaacattttttaataattttttaataaaaaattatattttgtttgattgaataatataaggaaaaaaaaactaattatacaactaaaaatatacataacccaaataaaaactaaaaatataactctattcgtaatattaacctaatatattaaataatagatattataatgacataactaaaaaaaaatcaaaaatacatttttaaagttagtcttatcatatgttaattttgtctattttaaagccactaaggctagcttaatggtgagggaagaatgagaaaaagagagaggtcatgagtttgaacccagaacccttaagttattaagctattaattaattgtaaaaatatcattacgctacactcaaaataaaagtttatctactttagaaaagctgagaaaaaaaaagaagaaaaaatcgagcaactagtcatcttcctatttttgttgtgatcagtttgtgatcaaatcaattatttttgtgagatgagttatgtatattaaaatttaaacttcataaaatgaattaggaattattacatggaaaatacaaattgacactttatttacaaaaatactttcataaggtgtggacaacatttatatcttttatgtatttttaattaccaaaatacctcttacactatcacttcacaatcagatgatggttgctgggtggttggcnnaaggttgcatcagatgaaagttttaatagacgaaggttgtgggtggttggccaaaggttgcattagacgaatgtttcaatcagaggaaataactattagcaaaatgttcatgcaactgtaatgcaactgtaatatctacgtatgtaactctatctacatgtcttttcatgatttaatatgaacaaattcaccattaaaaatttgaaaaataacaaaaatacacgaggataaatattttactatatattgatgtaaattttttcagtttatacttgagttagattgtttgggaactccagttcaactttttgacatctgcatttcatgaatttaaaaattgaagtcaggacattagttttatgcaaattaaactaaattttcagttgaattttaacttcgtagtaggttttctacactttttttcatgaattcgaaacagtccctgttttgattgattctggtcgtcttctcaagtgaagttgccagaattaatggtcgttctctttctggttgaattttttgtttcggttgtgttggttgtgcatgtgtgttgcgtagtgttgcgcgatggttgcctaggaagcatggatcttgggttgaaggtgtgtgtaagtggtatatatttgtgtaatttttttggtttaggtacatatttatttatttggccatctggaagtatttttgcaatattgttatttttttttggttaaacaaggtatgaatattatttttgaatggacgttttcatttaaaaaataaagagtaatttgtggctaaattatctaaactttaaggtttggtacgataaagtcctaaactgaaatttcgagggtaaaatcctccaaacttcaattatatatattctggtctccactttttcgttagtttttgactgttaaatgccaaataaacttactaatgtacatacaattggtacatttttattggtacacctcattataattatctaaattatttagaaaaaaatatttaaaaacataaaaataattagaaaatcatcttaaaatataaaaataatgaaaattaaaataaatgataaataataaaaaaaactatattattttttttttaaaaaaa

SEQ ID NO: 48316 - DNA, 2516 bp, Cannabis sativa
  modified_base (1935)..(1948): a, c, t, g, unknown or other
ccccaagtaaccaaatcaactcaacccatatgcagccaatagtgtcctatatttgcttttatagtgaaaacagaacaattgtaccaatttctacagaaagagccgaaagcatattttgttttattctcgaatttaatgcccatatccaaacaaagcaaaatcacgggctacacagttgtatgaggcagaaatattatatacaagaaagtgaaaaatcaatactaaacgacaaaccttgttccctatattaattgtaagaacattcaaaggtgcatatatactctacaataacgtgctcaatatgaaatacttactttggtgtcgcctagcctagttctgtaaatggaataataaaattataggaaaagtttctatctcatataaatatgtagcagttgaaagaacccaatataataataaaaacaagaatgttctagtcatattggtgcttcatggatatttagttttaaatgatattcattcttgctgagttgtaatttgtatttttgtcaataaatacttttaggagtaatagtattacaagtttcagttttaaaaatgaaattgctttttaaaattaaaaatggaaaactttagaaacaataaaataaaaaataaaagataattttttattattttaaaaaattaacggtatttaattaatatattttaaaaattatttttagatttttttacttaaagaaatacttcaatatctcatatcgcaccgtcacgacatgaatatggccacacccttaccttagtacacacttcgaaagtcgattatgaactgggacctcgtccctggacccagacccaaccctcgtctggacctcgacctcgacccaaacccaatctgacctcaaatttgaacaccgaccctgaactcggacccaatctgatccccaaccttggccccctaggttgggacctttgtctctgaactgaataattgtcgtaagctagaaaaaaaaaaaaaaattattctttgatatgttatgaaagaaacttgacattacaatttcccctctttctcattatttattcggattaggatattgtggtttgtaacctggtaaatatgggtagtagaatcatctccttcaaacaattttagaaaattttggttttcttattatttaagcataacaataacaaaataactgtaatctaacatttcatcttgtatttggcataaatgaaagaaaagtcaaaagataaaaaaaaaaattaaggtagaaatttagagtaatagaaaagagaatgtagtagaaaaagaatgtatcattttatcttgtttgaaaagaaaaaagaaaaaaagtgtaaatgtataattattctttttaaaatttgtgttctgcaaaagttattaattgaattctctgttttgttaaatgataaaataaattttatataatctaaacataagaccatgagctcaattttaaataattttattttttaatatatccaactttaagacaattacggaaaatgtaaccagttttgtcataatatctctacattagattattgttaatttttattttgataaaaaatcagttcatggtcttatttatatgatttttaaaaatacagaatctattttgtcatttaactaaacagatggtctaattaataatttttttaaaatacagaatttaaaataatatttactaattacaattaatatttttttatatatatatttatatataataaatgcctattggatgaaatttgttgtgtttaacagatttgttgtatattttatgtttattttgacagtttaaaactaacacggtcaattagtaattgtgtatattacaaatatttgttattattcaaaacagtgcaatattaatttattattattattattattaaggagactattctaaacaatgcaatatcaatttattattattattattnnnnnnnnnnnnnntattattattattattattaaagagatgtgttaacagagacacctattattcatccaacaaaataataagttcaaagataataaaaaaagaacaaccaaggacaaaacatagagaaactgttctcagaaccaacaagaaccagaaacatattaaaattactaacttaaaaattgcttgtgctgtatttatatatggtgggccatagtcctataaaacacaatcctaaaagagatttaactctaatatatgcaccaaaatggcacatttcttcatttagcaatgttgtctacttaagtattttatctttttagttcccgaactttcatttagggatgttttactgggtataatttttattgcatgtggccaaaattaatgaagatcaaaaaaatttatcaattaattatatataaagaagccaaaaaattcatttatttttcattgatatactgatacccattaaaaaatgagaaaaaaatgtaagaatttagaataagttaaataaaatttcatctcaaaattaatttataataagaagagtaactcatttatcttatatattctatt

SEQ ID NO: 48317 - DNA, 1203 bp, Cannabis sativa
  modified_base (1033)..(1038): a, c, t, g, unknown or other
  modified_base (1144)..(1148): a, c, t, g, unknown or other
gagctagggttcaatgggctctttggtcaacttcctacttcctaggagagtattatccctaaaaaaaaatattctaattattttttattattttactatcacatttatatttataaaaaagattatctacgtcaaaaattcatttcattgacaatgtcataaattttggcctataactagtaatcatcacacattctatctacattaataaaatatatacttttagccactcatttaaattatataatatatacaattattgacatatataattaatctaaagagtaacacataaattcagtaaataaatttagaattatatacaagttgtaattaattatactcaagctgcaagcatatataatcctaaaaaacaaaacacacaaacataggtattaattgttgcactatagttacatatatatgtccctttacaattgtgtgaaaaaaaatggctataatgctctatacaaaccttatcataaatatatactatatatatatgtatattaatttaccatgtagttgcttcaatactacatataaatatatataatgtaccatatatatatatccaatgtacctagagtttataaatttcatataataatgtacatataatatatatatatatagtgttaaaagtagaaaaagccatgtgtgagtttgtgtaaaaaatatataactcctatgctatgctagctcatgctttaatttgaatcacatataattaagcccatgcatgcatggtccataagctagctaaaccaaattgatattaattttagtatatcatgtaaacattatttttgaacttatattttataaaagtataggactatttattttgttaaatgacaattcagattctgtactttttaaaatagtacaagacaatactttcataagcttaggtgccgtttggtaacaattatgttttctaattttttaatcacaaaaattttgcttttgaaaaacaaaaatgcgttctataactacctttgttttttaattttaaaaacagaaaacaaannnnnnttctgtaaagtttatttttattttattttttgattttgtttaagtcagatctgggtccgggaccgggtccgggtccggatcgggtgctaggttcggcaccagggcnnnnnccgagtttgggtctgagtcggagtctaaaacattaattaaaaaaattgtttaaaa

SEQ ID NO: 48318 - DNA, 548 bp, Cannabis sativa
gtctttcccatccatgtcccctagattgagatacttggcaagcataattgtctcaatagtcctctcgtccgttttgtggggatcgaggaaagtcttgacttggaaggtgactgggaggttcttccttctatcgtgacctctctcttggggcttgttgatgtgttgcttgtgcattagtatgtggaggcttaggatgccttattggtgatggggcgaacctgattgctgaaggagggttccgaacatggtctcttcccctctcgtcaacaccaatatcccttggcgatggaggtggttgagatggtgggatcccattttaatgtgttgtgcccctctccccacggaagcctcctcatgggtgatttgtagcattgtcttgtggggcagtaggtccttgtgcatccttcctagtttgttgtggtgtaggaggggggtacattattcctccaattctcaagaccagaggttgttactcgttgtccttgttgtgatggaggacgcttgctcctcctgccatggttgtcattttcacgagaaggtcgttgtgg

SEQ ID NO: 48319 - DNA, 1726 bp, Cannabis sativa
  modified_base (445)..(461): a, c, t, g, unknown or other
tttttttagcactgttattaggtacatcagtctaacactttctaaatgtattatcttacgattggttagcgctattgttagaaaatactattagtgtctactacccttttcgatatcatactactattagtatacttacgtatcaggtctcatataaatttagagcatctctgagcaacacttatagttgtcaaaaatacacacataattctaaaatattattttttattttctttcttatataaaatttaacaactttttgtacaaaaattactttaataactgacaactccaaaaattatctatcatggtcacatgctactatttaaataataaattttattaaatattataggaaaattttacaatgaacccccttaaaatagatacattgatgcaccctaatttgttttagcacccaaaataatttttagtcaaatttttnnnnnnnnnnnnnnnnnttatagttatttaagacattctgcaaaattataagaaatttggaaaagtttaacacactgaaaagtacgttcaaacagtgtattgcacgcgtgactattttattttatacgcgtataaaataaactatttgaacattgttttctatattgtaaattattcggaaattctcaaaattttgtagattatcttaaatagttataatgtacatgaatatgaaaaaaaattagactaaaaaaattttttcgaggccgaagtaagttaagagtgtatcagtacatctattttaaaaggatgcattgtagaatcactcaatattataatataataccataaagtaatttttttgaaaaaaaataaaataaaataataaaataatgccaaatataaacaaaggtattgataaaattacattaaaaataatgaatatattacatatgtgacaaaaataataaaataattttacgggcaaactcggagatgctttaataaaataatttgtagataatatcgccaattaattgtagggcgctacttatagaaggtgatgagcactattggtagcaaatagcaatgttcctccctaaaagttattatattaaattatacgagacttgatacttaatttaactaatagtgatattgatatgtaaaagagtgttagattttttattattattattatttattaattactatacaaaatatttgtttctctttcctgttactttcggtccggtgcgtcctctccctaaaattagcaacccttcatttttatttttatttcctttttgtacttctccttattttggtacggttttttctagtattgacaaatccattttggtattcacaaaatttgtgttctaaatttctaatatgtatttttttattatttttagatcaaatcctactttctcaaaaaacaaaatcagatcctaattaccaaattaaataagcttacccaaataataatgataattagagtggccaatggccatgtttgtttgtagtaaatatttatatttatttttacatcttatattttttttccctttttattcttattttatagattttgaactattattttattattatatgtactttcataattaaaataatgcaattcttttataataaataggtgtctttataaaactttgaggtgtcaatataatgctcttaataattataatgtgtgatcttagcaataatataatgttgtattaatgttcaaaaaataaaactatcaactccttttttt

SEQ ID NO: 48320 - DNA, 1718 bp, Cannabis sativa
  modified_base (1616)..(1619): a, c, t, g, unknown or other
aaaaaaaaaaaaaaacatttattatatttatattactattttataagaaaaacacggaaatcctaattcctttactcttcacgctctctctctaaatttttttccgatccttttgcatggaaacctaaaaatttactcagcctcttacgaatagaccttgaacgtttggaggatagacaactccaagtgctccagcaagcatcagggtctcggtagatcatatcgctaatcaactgcaagatgcaatttctaaatagtattagatatcactagtgcctaatatcaatcctatacatacaaatgcaccttgagtacgtaaatataatagcctgtccattaaaccctagttggcaattagttacttcaactgtatgatagtaattgatttgatatttttggatagcatttaaaggatcattaataaagagaagagactagctaacatacatcttatcaccatgtatgttaataatacaaactcctaaatagtcacatgatttagttataaggacaatttatcatttttcatcttaaaattggtgataaataaagtgtttatgttataacttattaatatttgtacattaattcaaaaatcaagtgggaaatatttaaaatgtttggagagataaactcatcacatcaaggtgagtaacagcctatatcaacatttttttaagcttcaattttgagcaaatgttgaatgtttctaacaatttgtgtaacctctaaattacctatttaagttcataataaatactacttaattaaatattgatagtaacacacatttaagttcatataagaataaaaactctataaattaaatatatataggccatagtcacttaagatatatatttacgataatatacttatttttttcattacatataagatacatatttatgatgatatacttatcttcaaaacactagattgagtatgagtaagtttgattaatccttgtaatcaatgttcggaaatacaataacatttcttgattataaattaaataataatataaattattattattattttatttctaaacaattttaataattaaatattactaatattaattttaagttatatattttttatttattttaattttaaatattatgtagctagtaaatgtgttattaatttgtagatagggtatacactttgagtgtcactataccattatttatattatatttattgtgagttcattattcattgtagtaatagcccttaatggttaaaatcattgaaaatgtcaactaaaatggtttgagtttaataattcaaagtttggaaaatggacaataaataattaaaatgtgatatgaatgataattaaatagaagatgatgacatgtaatatattgttgaccaggtcaagtgttagatagtctaatcatattaattcaaccccaaaaccgcgtattagtgaagattaaccatttgagcttgattaaataatgacactttaatatattcaaaaaaatatatttattttaataaatccgcttctttaattaaatacttttattcacttttttttttttaacttttttcttgttgcttggatagttaaattttttgggcccgtttggcacagcttnnnnaaaagctaaaagctgcttttcaaaaaagctgtgacaaaaaggtgtttggtaagcagttaaaaaacagcttattgaagaaattatggaaaagctacagct

SEQ ID NO: 48321 - DNA, 2045 bp, Cannabis sativa
ataagtggttaagtagaggtgtgtgagatgttataccgaatcttatcattaggctttactacaaagaaaagattacttttgtcatttttcaagtcataaattttttacattaattgtcaaaatcgatgtatatacacaaatagtattttattagtgtcaactgtcaattaccaaatgacacataaaactttacgcgtcatttgataaccgacacaaaatataagcaaagtctgttaacctttttgcattgattataaagtgacacaacaagtttagtgtcaaactgtaaccggcgtaaatattttttctgtgttagttatcaaatgacgcataggtataggtccgggaaaattattgatatcacacctgtaattttttagatttcaaaatcaatttgtataaccgtatttttatgcactaccgtaacatatgtaatataataataataacatttttcatgtaacaaaaattgatataaactacaaagaaactatatgattaataataatgaaactaagtattactaattacgtaatatagaaagtgataacagtaacgatcaaaaaaagttatatcctatatatcatcacaaaaagtgaagttgtaactgtgtactaataactctaacacttcaaacttcacaaaaccttcctattcgtcccgtaagtcaattgtctccttattgttgtcaggatcagaataggggaactataaaactaaagatagaaaatatcaattaattataaacattgaatgtatttgaaatgattatcaaatgcataagtttaattacttgattctgtttctgtactgagacatgaagttttggataaaattcatgaggtaatattaacattgtatatcatctggttacccttggcatacatactttgtggtctttgccccacccatgtttaatagattttctaaatcttataaatttccatagcactggaccaaaaaaaaacaattaaaacaattacttttttttttttttttgcaagaatttaactagtgaatgaatcaataattgttgaactcgaaaattcactaattataaattttgagatatttaagctaatcagagaaaagttctcaaaatacacttgaaaaatatatgggcaagaaaatgggaggctaactagcaaggtgagataccccacgaggaggagagctggcacggggagaagccaaggcacgggttgagctcctccctctccaggatgattggggctccctactctgcccgaggctcccagcttagctcaagctcctcgctccccactcaacctgagctccatgctccacgcacgcctcactctcccttgttccctgactcacttactttatcccatagtcaccatctaatgccccttgctctacataagggagcaatatcacttaaagtatatgttacaatggagtgaccaccaaagagattgaggaggaaaatcctactaactctaaacaacaagaccacgtctcatggtcccaacacttaattaaattttctaatgatatttccatattatgagcttgagttgtagtgggagagataccaaatgaatatatgataaaggacaagttcgacaaagcaagcatgcctcttagagggaggaggacgtacaatgggtacgacatgtacaagtagtggagacaccatttatcccacttaaggtacaaactgatacccacccgaccaccacttctccactacccctctgtcgtgttgatcttcatgttacatgaatcctcctttccacggaggtaaatctttgcctgacgtggccctatcctgacatcatcacaccggcgctttcaaaaacatcaataagcttattgacttgattgaaggaaactaagactttttattagcttagctaatatgttcttgctcaagtcgttggtcttcaaacaaacctctcgtgacgtgctgacgactacaggggaagcaactgactacttttctaagatccattgctcgattttgcatgctctactccaaaaatgtagagagactggtgtcagctgatccttcagcgtct

SEQ ID NO: 48322 - DNA, 1312 bp, Cannabis sativa
  modified_base (378)..(403): a, c, t, g, unknown or other
ggcagcagtggtggtgggtggtgggtagtggtggatggtggtgtggtgataagcgaagaagaagaaaaaaaaatttaggaaaaaaaaagagagaataaaggaatgaagaagaagaaagaagatgaaaaaaaaaagatgtcgagatgaacaggggagaaagaaaaaggaaaagaaagaaaaagaaatattttttttcagattttttattttaattttttaaaagaaaaaaaattgttacaattttttacttttaaattaattttttaaaataattttttacatggaccaataaaattataccatgtgtatactatgtccacgtagatgtacatgtagatagtgacacttaacaactaaaatagatgaaaatattaaatnnnnnnnnnnnnnnnnnnnnnnnnnnttttatcgccaaaatttgagttttagggattaaatgcaagtaaaataaaagtattggggaatttgccgcaattaactctttaaaaaataaacaggtgatcctaaataattacaacgtacacgatcataaatacaaaatggactcaatactctcctaaataccgaaacagataaaaattgtgttaaaatacctttgcttcggtagtttttatgtgagttgctatatgaatttcagttacgatttaagttgctccattagttattacgtgcaggggcgaagctatttcggctccaaaggggaccatgaccccgcctaaaattttggagaaaaaaaatttataaagcaatttaatgttaaaaatttatttttttttcaaaaaattatgtatttggcccctttattatttttttttatatcttttggcctcccttatttttaatttttgtctccgtccctgattacgtgggtttctatgtggatttctgtaaaaaaatatacatcaaaaaactgtttgaaagtgtaaaaataaaaaaatccctaaatataagatttttttttttttttttttttatgttaagcttaatctttaatctttgtatgttttcttaaatttcccttttctatttttattttctaataaatttcctcaattagagtttaattttgatacaaaatagtctctataatcaataataatgttaatctttttattaaaactacaacaaatagaattccatacaatttaattagtctccctattttatttgtgtgtattgatctccaacttttttcttaaaatataaaattttaatattaaaaaaaaatcatactaataataaaacaaagggtgtttatataattatttaaaatgttcttccaaattttaacaaatttataataatttactat

SEQ ID NO: 48323 - DNA, 1156 bp, Cannabis sativa
tgtaaagggttttatttagggcacaaaacccaacactatcctcggttaagtcctaggatctctctcgttaccacgagggatttcgtgttccctagtacaaggttgccttctgctcgcatttttacgtgaagattctggtaaatcatggtttctattccactgggttgtaaatcccttgggtctacgaggcacctcgtggtaatgtgcctcgttatttggttctcatcttcaggggcatccttagtttccccgagttattcttcctaagcattttaagggtcccctaagctatctcagacctcgtggcctccttacctcaagatcatgttgcttttgagtgtcattttcctgagccgccctagctgcgactgcctcctgttccaactcagcgtttcatcagtttgcctcctccaaatgtcgcttgagttggaaatttgccaactccaccaatggcacgtatctagtgggatcatatgcatcttcctccctaggtacataaccaccagcttcagtatgagtttcttcattccacatttttgggttttggccaccttcaggttggcttctccttgaatacgtcgatcgagttatccatgagttgggaggcctttgtgagcctgccgactcttttctagcgtggtgagttgtctcttcagtttgattattatcattttccctcttgttagccacagagaaaagtttttctatttgttagaagggattttttctaggcttttttcacataggctctcggtgaaagcaccaaactattgacgcagaatttcgttaacaataataaccccattttcgtgataggatcagtacaaaaattagttgaaatctaagaaagaataataaaacaaaaacaacaccatgtttttcgttaactttgcataaaccacgagtcaatcttatttagattagtctgatacaaatttctttttctatcaagcattttttgtccccattttctgtacattctgcccctatttataatgacatagggtgacaatttattacaattaaatacaaatcccacaacaatatttcccaagaattgtgggcttttaatacgctccacgtaaataaatgcgcttattatttgaaaatcatacaactgtgatttaaagcacttttaacgggtcaacgttgatct

SEQ ID NO: 48324 - DNA, 1598 bp, Cannabis sativa
aacaaaaccactttaccatattacaatgttttctgcttgtttctatcatctataatgatttgacccaaaattcatctctcttatgttgatatgatttttgaatcataatcctctgtttgtataatgtgtgttgttgattaagtaaaactaatttcgctctctttgaaataagtatctcatcacactaggaatgtcttcatatttgatgatgtactatcattgcagtttatcttggtaactcatccgaggactggtgaccttagggaatccttgaagtacatttgcaacttgtatgtagaatgtgttgtcaagagccctctttattctcctggatctccaattaggtaacttatgtgttccatttataactttgatgatactaactaagaacacatatacacactttccatctcgatatatttgttttctacactgacacaattttatttctccaatatcttgttaaaattattggcaatcaactacacttacacaataatagatatgtttgtatttgttggcggtcttactccatttgcattcttactcttgtaagtattttataggaacaagctattcaacacattgcttgatcaatatgtaaggagcattgcatagaggttgaaggtaaataaccaaccaactattggaatgtaaagatacatcatttatgcttctgtctcatacaaacaagtttctaaatgtagttttgaacccgtttctggcatcaccactgtggcaatggtttctatgtatttgtttgctttgaatatagtatgtgcctaaccgatctaaaatagtgttatgtttatccttgttggttggattatggtcacatacatttgctttgttattaagggagaggactcacaatactttagtagaaaaataataattatattttggctctagattagtgattgaaactaattactattggttacatttgtgtctatgaaaagcactatagattttatttctcacaccatttattattatttgctttgagtacataatttattctaattgtctatctatacctccaaaaaaagttaaaactatttttttaagtaatttatccctatgtatgcatgatcttagctgaagagatgcttattatatttttttaaagaaaatggactacaatataactttggtattttaatacctaactaatgtttggagggagaaaaaaatgaattaaatagataaataaggattaaaaactcaaagccccagctcaataaatcgaacaaaatttaagcccaaaaagcagaagggataacctaaaaacctataagaagtttaatggtaaagacgaaattgcagggaaagctaacatacctggctggtatcattggaaacagtattgaggacgataccgtaccaagataggtcgaggatggcaccgtaccgagataggtcaaagacgacatcgtactgagtaggggtgttcattaaaatgttcacgctgcatcacattgcataaaaaaatatggtttgaaattctttgcgatgtggttgcggtttgtatttttttcaaaccgcacacggtacgatgcggtttgcggtttcgaatttaataattgcggttcaaa

SEQ ID NO: 48325 - DNA, 2021 bp, Cannabis sativa
aatgataattaattaatttgactatacgtttttgaattcctaacattagtttttttttaaaaaaaaaaaataatcaaatcaacttcaattaattaagagcaaatcactcaaaataataaataataatttagaaagattatcacccttcttcaacaaacaatcaacataacaacaagcttttcaaacaagaaacatttaacaaagttacgtttaacaaactgttaaacttacaaagtttaaagaaacatttctcatagaccccaataatctcttacaatcaaaaattaaatttcaaagaccaaaaaaaaatatatttgaatattattacgaatggcttgcaccgctacttgactacgtatttcctccagagtgtgagcgaaacaatgagacttgagccaactgagagcttcttttattccgagtacttttgcctttggagctaccttaccgcctttcctcttcacaacagcaatcaccaaagaagccgacgagtcccacaccacaaaactgaacttgaacaacttttttcctcaaaactaaaccaaaaatagttttcttcctaaaattagtttttattcctaaaccagaaacttgaataatttacaagaaaaaaataatcagaaaaagctgagttatatttaaacttaatcatgaatatgatgaagaattagattataattacattaactaagttatttaatgatcttttattaatatttgacttatatatttttttatagcattgctattaagcatcagtggtgcctagcaccttctcgacatgtcgcgttatgattggctagcgatactcccataaaattattgtattaaattatatgggacccaatacttagctgaaccaatagcgatattaacacatagaagagtgctaggcaccactggtaccctttaagatttctctattattttacttttaacactactacaaaataagtatttagaagcattttttagttgattaataaacaaccgatgttgtagagtgtgtcaaaatgaaattttaataaaaacacctatggcgtgagttattacaaaataactgacgccataaggtgttaaatttttaataacaccacatatggcatcggttattttgtaataactgacgccataggggcacgcattggcttacacgtgtcccttatagcacgcattggctgactcgtgtcccctatagcgttagttattacaaaatgaccgatgccatagggtttatataaccctatttagcccttcgtcttcctcacttagtcttctctccaaacaaaataaccagctgtcccttcatgaaaccatcgcccaaaccaccgcctctcatcccccatttctccatttttcatctgtttccacccaattttttttcatattcaagaacatattcccagaatttgatgatcttttgttttatttttcagggtaaatcgagcttagaggtggtggttgtagctttggcagccgcttttagtggaaaaatcgttaaatctcaacgtccattaataaatctaatctctaagaattttagtaatttatattgctttattttttattttgtaaatgttttagggtttttctagatttttaagattgtgttattgtggtggtgcgtggtggtcaatattggtggctggatttcgacagtaaggtaaaaatgtaaactttaatagtatatatgtatgtattttgtattttattaaatatgtattgtatgtatatattttttaattgtattatatatgtatgtatgtataaaaatattgtaattatattatatatttttttatgtattgtatatatatatatttattgaatattttaaactaatagttttgttaagtattatgaatgagaatgagataggagagtgttaaaacaaaagtatagaaattaatttttaaaaaattagtttataaaaaaaagtttctattttttattattttcaattttattcatgtattttttttagtagctagtaaaagttagttaaaactacttaacaagtt

SEQ ID NO: 48326 - DNA, 1438 bp, Cannabis sativa
tcaatcaattcttccattccatgctttcaccaccaaatttgaaaattacaaaacagtgtctcatataaaaagcataaaccaaaaaacaacctgcatgcaattcaagcttcatcatttagtcaacttttccatgtacataatgggaaaaattggattcaattgtcagctaaagacaacccaatgggagtgatagtaacaatttaatcgatagaatctgatccatcacttgaaattcgttaactagcaccaataaaatgttacagagtctcaaattaataatgtataaaaactaaataccatacataacatagatgagctactcctccaaactaaactaaactctaacgagtattcgatcaaatccaaaaaccggtccaaaaagacagccatttgtgattcatggatagtgagccaggctaatatttctaagatttctacttagatgaacgtattttatattcgattcaatttctaggtttcctatacctgtcatgaactgaatatattaaaaacgtttgaagaaccatcaacccagtgatcctttcaatcaaattcttgcatgcattcactactaaattcaaatttcaatcataacaaaatgtatgtacaaaccaaaaagatcagaaatttataactgtttcattacctcattcaaccagaaatgctcattggttttgttagtgatcaaattcccagtccaactatgagcaagctcatgagccacaacctgagctccactagaatcacccttaatcacagtcggagtcaagaacaccattctcggattctccattccaccgtacggaaaactaggcggcaaaaccaacaaatcaaacctttcccattcataaggcccaaacagcttctctccttgcctaatcatatcctcagttccagcaaactccctcgccgccgaatccaacaccgccggagccgcctcagcataaaccctagtcctcggacccacctccctaaaccctaactcaccaacggcgaaagcgaagaggtaaggcggaaccggctgctccataacgaactcctccaccgccctaccctcggcgcaccacatctgatcgccgcagctcagaaaagatccctcgccggagatcggagctcgcttctccacgtgacgcgccgccatcactgccgagagctggcgagggatgttcaatcgggcggtgtatcgcacgcgcgccgctggtgtgtcttggcaggggaagacggagcgcgcgtggattgcctggcactgtgtgtagacgagtgggtaggttttgttgaaagtctgaggcggtgagagccattggagagctgaggcggaagggtgagttgtgaagacgacgaggactgagtcgtggttgttttcgagggagatggtgaggtggcagcctctgattggatcgggtaccgaaagtgagaagggaagcggtgtatgggattt

SEQ ID NO: 48327 - DNA, 1620 bp, Cannabis sativa
ccccaaacgatgtgggattgtacatacgatgtaattatacttgaccaaacaaacacgcatttaagtcaatactcaaaagaatcacaaagaacaaggaaacaaattaaagcagtaagacagaaaaaatataataataggtttaacgagtttgagtcttgtgcaatgctctatgtcttggtcagaacagtagtagtcatatattaattgatatcagtgttttcaaagttacaagattcttttcaaacttttacagagattagattacaagttgaagtagtttagactctctctctctctctctctaaccttacacaatcacgattttctctcaatctttcaatggtttgattctctctaaattacaaaggtgataactatatatagatttctatagttgccaaaaattagctctgattctattgtagctaattaatttggtcttaaattctccaagttagcaccaataatatattccacatcagcttcagaaatgtgcttttaatatggacaagccgaaagacaatcacatgttttggataggcgttcaaggctgacataagctatctggaaggatgtctctgaatgtatgacaatctatctggcagactctagttatggaagacaagctattaggaagaaccatctagactagccacaactttattaacaaagctttttgaatgaacaccaagctttccttaacttctttctgaagtaatatctagctttccgaaagatgaaacttgtaaccataatcaacaaatgtccaccttggttccaagttgaagtcgcttgacaaatttttgttccatatactattgttccctagcccctttcaagctcagctgactccaatcagctttaggcaatgctcaaacttacacatcggcgctaccttagtaatcatattagaaggattatctttagacgtaactttggcaattttcacagcttccttctccataacttctcttatgaaatgaagctttatatctatgtgcttagtatgttcatggtgcacaaaattcttagttaattaaatttcactttgattatcacaatgcactataataaccttctagttgagttttaactcttccattaattcagtcaaccaaagtgcctcattgatagcttccgtcaaggtcatgtactcagcttctattgtcaacagtgctacaaccttttgaaggtttgctttccaattaatagttgttttgaacatattaaacacatatccagttagtgacttctgagtattgatacatcctgcataatcagagtccacataaccattaataaatctcataaatatctactaattcttatgatttaagtatgtcgtcattaaatcctacctctcatcaccaccatggaacctctataaactttcatgattccattctcaactttgactaaaaatccttgatcatctagcattctaacagagatcaaatttcttttgagatgtggtaccaatctgacatcctataccttttccatgccatcataaactttctatcttacagtttcaactcccactatcttacaagacttattatcaccaagatacacagtcccatagtttttcaggtttaaattcttcgaaccaagatttat

SEQ ID NO: 48328 - DNA, 1024 bp, Cannabis sativa
ttttgatatattatataaaggaaggaatagtatagtactagctcccttcatattttccacttgcacttctgagttacattatatatttgggtagttaacttttagtggaaatacttagtattattcatacatttattttgatgtttatataatagttatatatatatattatattatatcaccaatttatataattattcatgccttggtgtgggctgtataggcttggcaggtggctttggagcaggctgttcaggctgttcagttgggataggcacattattcacctgaaacaacattcataaatatatgtgtaaatctatatttgataataaagagtatcacatgtataaaaaatattaaaagtgagataatttaccaattttctaaatagaaggctgtaaaacaattggaggtatctttgctttgcctgtttctgctccttattcaactgcttccaaaaattgtagatgcagcccatgttcaacaccttgtttgcataaatcttccatgtgtagctgaaaaaagtttatacattactaatttgtaacacaacaaaataggctcatagtatagttttacagtaactaatgatatgtgcacctaaaatattcgctcaaatattacacactgttcataatattcaagtgaatattttgagtacatatggtaaaaaactaggaatgatacaaagttattaaaaaagttttcattgcatgtaagatttttagtttgtttttacattaatgttttaattattttgtttaaatataagttgatgaataattttttctcgttttatttctgtaaagtctagttgagacagaagtgtcgattttatagttaattgaaatctttaacgatgaggcctagtccaactaaagtaaaagaagacttagtatgttagtattgcgttaacaatctctattttctaaattatgttaagaatcaatcagataagttttttctaaattatatgcaatttaatataatggtattttattgtttttctaacataccattc

SEQ ID NO: 48329 - DNA, 955 bp, Cannabis sativa
tatattccttgttttttcttattttttttttttttttaaaaaatggtcatcaatttggattttatagtttgattaagggtatttttcaatcatatcatattattattataattattattattataacaacgcgttcccttgttgttagtttagttatagttaccctttgaattccaaagtttgagaatcttgattttgtatcttattagttattattattgtaatatattgtattttgttttattgatgatactcataagctgctgattagtccatctttcacttactaatatattttttttttttttgaaaaaagtgatgatgtatacacgtagattatgtaacaaaacatgaacttaaataattgtcatttatttttttaatatagtatcatatttggaataaatgtaattggttaaaataatattttggtaaaataatttagatgcacatttaaatttaaaatattaatatgtatgtataaaaggaataaataaaaataataaatggtacttagtaacttaatagagtgtggaatgagataaatgaggttacatctcaaaattaattgctaatgagaggagtccattcatcttatatatggtattttattcccacacattagcaatgtgagactaactctaatacaccctcctcacatttaggtctggaaaatgtgggtataacgacgacctttaagagaccacatgaccgaacgtgacatttgaaagaatcctacaataacaaatatcgagaaatttgtaagtgtatacgttgagaaatttgtggattttaaaacatgtcaaagatcctaacattagaaactggcatacattggtcgaaaagttctaaatagaggttcaagaggaaacaacagaagtttttagtttgactcgtctttttggaccggtggcactttgggcttacaacggatcacaaacggctctgatatcat

SEQ ID NO: 48330 - DNA, 1486 bp, Cannabis sativa
  modified_base (73)..(74): a, c, t, g, unknown or other
actcttatgtgtttaatttcatcacattagagatattcatatttaggatattaattcaacatacttgttagtnnatctagatcttggtaaaataaattgtaacaactggcctcagagctataataatgatttacttcgatgaaatataaatttaaaacgatgaatttgttaaatttgttgatttggatgtgttcatgttggtttatgtgtgatttgacgattgtatgtgaattacgaaatttttctataaaaataattttatttggattcattgtaaaaaattaagcaattttaatttttacgaaactcaattccgataaaaattgagaaagttatgaaagtttgaatttttcgggttcaatgggtgtcgagatgccccaatcgcacacacagaccctcagacaaggaggatctgcgcatgcgtataggggacaaaatcgtgtctgaagacacggtgcactcagtcaactcccctccttcggacaagccttccgctcgcgtttatgctgtaggctaccaagttctttctctcaaggaccctgcatctcattcatgtgcgcgcatttgaaggctgcgtgcagcctattgcatgcccaagtggattttcaccccaaaatttcgaattttgtgattttttcactacttttgggattttttcatttcaaataataaatatcaaaataaatttttaatatttaaacctaaatatcaaattttcaaattaataatatttaattttattagattattattaattctttgatattttaaagtttaaatttaaaaattaattatattttttaaattatggtcagattttaaaaaatttgttaatatttatatattatttaattataagattggatatattttaaattaaaagatagcattatccttttaatttgaaatattatattaaaattatcttatatgataaattaaataattaacctagatatttttatagatatctgttaaagaatattttcattaactaattaatcagtgatttttttctctcaaaggttttttgttcatttgtctgtataatctccccaatttataggaatataggttgacagttatttacatttgaatttgaaatacataactgttttcacgaaatgtgagctttgaccacgttccgttttaacacgtgcagagctaaaaatacgcataaccgtttgttattcttatctttaaggtagtgaacactcacgtgagataggagcatctcgctagaggcatctcgccttatacatagatgaatgacttggtttattcatatgccttccaataatggcatgaacaccgctgtactgagctgtcacgacccgagccttaggccgtggcagatatgtaatatccataacttgggtgctctaaggtcacactttgacccttgtaggaagataaagcttataaatgatccttttatttgtatcacaaaatactaatttaaaagtaatggattaactcctatatt

SEQ ID NO: 48331 - DNA, 1833 bp, Cannabis sativa
aaactgaaaagtaaaatatagtcagtcagatacaacaataaacgacatagaaataaagaccttcacgacttctacagtctcagcaaaatgcccacttcctctattttgaccaaaaatatagtctgttttgagaataatatagtctgttttgaccaaaaatgattttatcattgataaaaaaatagtcaagaatttattttattattcttgatcttttctttttctcccacccccaaaaggaattccctttttatactacctcctctatttatatcattcttttacccttacgtgtcaacgtaacaagattttactttgacatatgtttattactttttatgaggtatctttatatattttgacaaatgtcctttattttataagtgtccatattttatatctcttttatacataatgtgtagctttcttataggatatttaagtcattagtcttatatatgttctttatcttgaatgtaagtcatctattttggatataccttccatcttgaatgtaagtcattattttgtttatgtttatgtcatccaggctatgtcatcccatgaaaagtatgtcacctcgccagccaaccaagatacgccagttgatctagatatgtcgaccgaccgagatatgccagccgaccgagataagtcatctcttctgagttatctcatcctatctgagatatgtcatctattttagtatctaactcttccacctatatgcttatttcacctaggatatatcttttatatatatatagtatttcttataaaatgggccttttctgacttttggcattttttataataatttgagcttgctgatttttctcccaaacataatctacactgcaaacaaaaaaaaaaaagtaattctattacctctatccataaaataaaaggcaattccatcatacgacataaattaaatcactacttcgacaattctcaaaaaaaacatcttattgtagtgtttcagcttagacaatgagaacttcaatggtgtcaatgaatggtttgaagatgaagagagcaagttttgaatacgagtattttgggggttcagctcggtttctaagaagaaaaggatgcgatatataaattacttcaattatataaaatattttttatttgaaattatttaatagttaatgtcacattaattttaacagaatttaaaaaaaaaaaaaaaagttaaataaaaaattctattaaataattacatttaatatataaatatataaaaatgaatagttgaaattgtattatctattgagctatggagtatataaatagttaaattaccttccctagtgtctattcatacaattaaattcttcataatttgtcttttatttcggttgttaattttagtttttttatttttttattatattattttccaatagaaattttattgactacatagaactagaaaatttatttattggtaattaatactcaatttttgtggaaggatattctactttctatttcattacttgttaatgatacatgaacttgcgttgtaaccatgattattggtgtcttcaatttcacctcatgctcatccattagaagcaaaatatttcaccaacaagtctaatcaataataataaaacccattaaaaattattacttctagttgctgccagaaaagaaaaattgaaactttcagaaatagtcttttgattgattctttagaaaaatctatttttggaaagggattagaacttagaagggactaaacatcttaccgttttcttataaaattgagttaaattgtgcccaaaataaagtctaattaagtcttggtgatcattttcc

SEQ ID NO: 48332 - DNA, 1285 bp, Cannabis sativa
ttaatttattgttagagacataaaataataatatagttatgtgaaaaaaaatatatatttttttcataaatattaaataatataatattgaaaagtaactaatccaatccgtatttttgcagattggattggatttgagctattgtgtggattgagttggatccaaaatatgaaattcgcacttaatgaggatcagatgcactataagaaaaatagttcggaatggattggatgaacacccctactttaaggtgtttaaggttttttgcggttggggcggctgatttttcattagagttttgtaaaggttggctagggtttttttatgggctgaagtacatttagaagatcgcaacctttttagaggcagttatttttttataaccgtctctaaatgggttccaatgtatttcttttgcttttagttataacaacgcttttttttttattgattaaaaaggtatgtacgtagctgaaagtcttttttgaaatggtgatatattaaggaaaaaaactatatgtgtaggtcaaagatgacaattaatattttgcatgtgttacacactatagggttagattaataagcatacagagacgttacacaatcacaatgtttgaattaattatatttagttttaacttaggttggtttaatagctaaaacctctaaagccaaagacattgacaataacgctaaccttaacattaatctagttgaacccgatcgatcatgatcttaaatttaaataagataataaatttacgtaaaatttacgaaatataatattaatttaataacataataaaaataaaattaatatttttaggtaattttataatacactccccaaaagaggtataccgatacacctcttatttgtttcgccatctagaaaaaaaaaataatttaattttttccatagttgtgtactttatagttgcaaaattgtaagaaatttggattaatttacaatatataaacagtgttcaaacaatttatttcatatgcgtataagatgaaagtgtcgcacgtgcaacagactgtttgaatgttttcggcgtgttaaatttttttgaatttctcagaattttataaaatattttaaataactataaagtacataactacgaaaaaaattaaactaaacaattctttcaaaatacgagacaaatgaaagtgcaccgatacacttcttttatgaggatgcattgtaagaaatgaatttttctttcaatttgtaaagtgggagaattgcttgttgaaattgttattattattattatt

SEQ ID NO: 48333 - DNA, 1765 bp, Cannabis sativa
aagttttaatattatttttcattttaattaaaaaaaatttaaacttaatagtattgttcgggtatcgggttaaaacccgaataaaaaaatacattattttaaaacccaaacctgaaacccgtgttgagcattttcgggttagacccgacccgactacacgggttttaaatttttcggcttttttcggcagcgggtcggggcgggtggtcgggttttcggatttgcgggtctaaatgttcagccctaccttggacctagatttatacattattctatttttgaaagaaaatagaacaattctattaaaagcacaaagcttgaaaggtctcaaacaaaaggagctcacaaaattagataattaaattcataggaagacctgaccaccaaacatgtgacacatctaaaacaagagcttgctttgctaaacaatgagcaataatattcttagacttgttacgatgtcacactttgtcaattggtggaggtgcttgtaaaaatgagctcacctatgataattacaaggtgacttagagtaacttggtgagttacagttaacccaattcatcacttcataatgtcagccaatcttagtgttattggatatgcattctacgactggattttacactattcccctattagttccatttcttcactttaccagggacaaggtaacgtcattggatgtgccatctgcatgacaaagttatactttgtgaatttggggacgggcttgtaaaacttagctcacctacgatagttacccggtgacttagagtaacttggtgagctattgttgacctaattcaccacttcacaatgcctaattgtccttgcgttattggatatgcattctccatctcatttttatactataccactagttctatattattttaaataatgataataattaaaatttcaatacctaaatatgtcataactttgggcttacaaaaccttctccaccctaacccccaacgtaacaactttacggatttcattctttcctagtcatacctgccacagtcacccgattacttagaattatcctatttctttgctttatacagaccaaggtagcatgatcggatgtgccttctgcatcatgaagttacactttttaaaggaaagaataagctcagtgggcatagtgagccacttgtaagaacttcttgtcaagcaatgtagttgcacaacttttgttaggattgcatgagttattaaaatcttatgagagatcgtacaagttgttatggtcttatgggggagatcgtataggttgctatgggaaaggttgtacgaggtggccaaagatattagattatagaaggcttcactaaatcatgtgttcatatttttcttatttgacagagggaaaataaagaagagacaatgcaaattttttctatcataatcgtgagcttttttgctcattgacattttctggacatatgatttggtaaagccttttataatctaataccttttgcaacctcatacgacctttcccatagatatcatagatatgttatgactactagtatctcgacaatttacataagaccttaacgacctgacttatctctcttataagatccaatttaacatcgatcaaagatcgtaactttaaactttagccaacaacattaatgattttaaaatatcacattttatgggaaagtaaaatgactattccaacagtgtaatatatattcataaaaatgaaacacgcaatcagcccaacccacaagtcctactgtca

SEQ ID NO: 48334 - DNA, 8853 bp, Cannabis sativa
  modified_base (443)..(446): a, c, t, g, unknown or other
atgctcacatactgcctacatactgcctaaaatggaaagcggtaaataaataatcatataagcagtaaagcatctactctcaacacttacagcaccacgagtcgagcttgtctctggcgataattgtacatgtttggtcgttctacaagaagtttaaaaaccatggcgctctagtaccaaactagcacgctactcgaggtgattaagaaagcctaatccctaaacgagattactagtaagataattgcgggaaaatttgaacattaaacgaaaactgaatgaagaaaataaaacttgtaataacttaaactttacaatcaaaatttcatttttagagatcccaaaaatatttacaaaatcagagttagaaaagcacatcactggtaaatactaacgctcttagtcttctgtggcccgaacatgtacatacattgcccagctcnnnnactcatggctgatcagagacaaatttaccctttcttacacagtagagcacctgtgagctaagccccgcaagacagtataattatcaataatcataattaacatataacatatatattaatgcaattttacatttgtctgtatgacacagacccacgtgttacactcacacgcatatttatgtctatgtggcatagacttacgtgttacgctcagacgtctatttacaataaggccttagaacagttcatctcggttctagttactgagtccaacctgattatgccttaaacgcataaccctaaacctcaatatacacctatatataacatgtcatagcacattcacattaataatcactagagtaataaccctagaccattaaacccctcatgttagggtgataaccctaatctcggttctcaattatcaacacatatcatttttaatataggtgtcaccatgcatactctacgtgctaactactgtcataccgcatgtccaacaaacgtggagattccagattctcgggtgctcctgaccaagtgtcggtaatcctagtcctaatttttcggattcacaagtatagggttcatccctaaatccatttccacaacataaaaaattggcattcagattgtagataatcacataaagctagatatgagctttccaacgaaataaagaacgtcccaaacggagtcccgagtcaaaacttatggcaaaaacaaaagcaaaaaaaataataaattgccataatcaaggtctcaacatgacctatgattgtcgcgaccactgggtttaaaaacccataaaacccaattttcagcttcaaaaaatgcatcaaaactcacttaaactcaccccaaacatgcatatatcccaaaatcatttgccacaataattatcaacgtaacagagagttaacctacgaatttcatgcatcaaaatccaacaaaatagaccctctaaattcagatttaacaacacaaaaactaggctccaaacattgagtatgtttcacaaaaatcccaacttcaagagcttaaacacaagaacgaaactcaactataaattcgaagctgcggaaattaattagagaaccaatctaaactcaaaattccactcaaaacacaacataaagcatcttacataaatctttaacacaatcaagcataaagtattaataaattacactaatataaacatgcatgcatctcaagaactttcaaagctcaaagacctatttatccacttccatttcagcaacaatttcaaattaaaactgtaagaaaactacctccaaatcttccacaattcaagctctaaagaattcacacaaatcaagttgaacccaagctatttctcaacaaattcacaagttgataaagatggagaaagagagagaggggaatcggttttggggctgagaaacaaactgaaaaaaatgcatttactttatttaaaattttctttttgttgtagataaaataaatggtcaaaaagacaataatgcccctagggccataataaagcataagcatcaagcaagggtaaaaatgtcattctcacataacacccaattcaattaattttcagatatatcacacattaataaaatgccaataaataatcccgaaaatgaatttcagccctgaacccggttcggcgcaaaattcctaactgtgactataccgcgccgacttgtcagaaaacacctgagaaaggaacacaacaagtacactgtataataatatactccaaaagtacgtaattaaattaaattcactgtccaaaagtacactataacatttcatatacaagattaattcacataaaataaattatataataacataattccataataatacacatttaactagctaacatttgctaatccatattcgtattcttagggtattacattgatgctctctcctgcaatatgcgcacccccccccccgagataacaaggatatcctctccttcaacaggagaaggttgtaattcctagttgcttcggttgttgggcagattgggctggttatgtccattgccctgtctcttcacatattgcttgaaatggcctcacgcgatgagactttctaactcatctttcaactgacggcactcgtctattgtgtacccaaagtgtttatggaacttgcagtacctggtcggatctcttttatgcctcacgtgcctcatgggctcaggtttactgaaggcacccttgtgctcatgcacgaggtaaatattttcccgagtttcattaagctcggtataaatagtataaactggcatgtacttgttgtgcttcttttatttcttcttatctttggacgaccccttagagttgtctttcctctttgagccagaggcccctgagttatcaaatttagtggagacactgcttttttaaatagtgctaggtttgcctcccaatagagtttttaacaagttcatctctttttgagcttcttcctcttgtacaaacacttgagccctctcgttgaacttggtgatgttcttcactggacgaccctgtaagtcgtcccaggatttgcccccagcagtagagagatcagtagtgatccccgctttaagggcagtaagttgtgtactatcatccaaatttgttattcttgcagtagccgtgccaaaacgacttaagtacgccttaagcatctcgccaagcttcgggtcacttgtcccttgcggcaaggaactgctttttgaagtccatagacagctgttcccaagaagtaatggaatgatgagtaaatttattgaaccagttgcttgctgctccaactagtgtggtgggaaagaaaatacaacgtaaattgtttgtaacgtttcttgctcttattgtagtgttgaagttattcaaatccgagaccggatcggtggtcccatcatacaacgagacgtgagcgtttttaaatccctggggaaaaggagtatccaggatatctggatggtatggctcgagttcctcatctaagtcaatccagattgttttcctagctcccccacttgataccttctgaaattatcctccaactcatctattcgcaattagattggatcctcttactttagactgagttattggcaaagatcaggttttttcttattcaagtgctctcgcaaatccggttggttatagttactagcggacctcattctactcacggactgtgtcctacttacggacctcgtcctgctcaaggacctcgtcctactcatggacctcatccttgattgacttacgatcttacttgtactttctcgatcattgttgcgatgagtaccttctcctccttgcgttgacagactgtgggttcttgtgcggcctgaggttacactcccttcttcacgcaccgttcttcccccttaggcgtggttcgtcgtgttccacctactagaatttgtacgagccccttccctatgggtatagcaagaacactagtggatcctcgctagtgacctacatcccccaggttgtgtcccaggattttcctcgtttccacgtggaatttcctgttccccagttttgggtcgcctcctattctcatttctatgagatgattctggctaatcatttgggttttcagggggaagctcaatttccccaagttgctcgttttagtgggtccctcagtttccccaagtcgttcttcctgagcattctgagggttctcctaagcaatttcttgcctcttggttcgtgagccgcaaggcctacctcgtggtcttctcactccagggtcagcttgattttgattgttattcccttgtgccgccctggctgcggctgcctcacgctctaattctgtattctgtcagtttgcctccccaagacagcacccgagatggcagttttctaattcaatgatgggcatgtacctgtaggatcataagcactgtcatccatgggctgagcacctccaagatttggttcctcgtcccgtactccagtgttttgtccatttcattactcagtgctccttgaacgtttggattgtgtattcaggccgccctcaggttgagtcctcctagggcgagtagtacgaatgcgtgggccaccctcaagttgggtcctccttgaacgagtggtctgagtgcttgggccagcttaaggttgggtcctcctagagcgagtggtccgttcggattgtgagttagaaggacttctacagcccattggctcttttctaggacagtgaggggtttcttcatgtggtgcgtcaacgttctctccatttttagccatgaagaaaattgtatattttttttttgaatgtaaggagggttttttctgagttattttcacgaaggctcttaataaaagcaccaaactattaacgccaatttttgttaactgtatttaagcctagacagtgatagattgcacagaaaataatacaaaaaaaaaaaaacaaagatatgaacacaaaggtttttacgtggcttgcggttaaaattctccatagtccactagtcaatcttattagatttttgatacagctctacgactgttttctctcatgaattttttgtcccctttttaatataacttgcctctatgtataattatatcatagggcagttaattatataggtgactgatatcttgcaacagttatctcctgaaattgtggggtttgatttcatacaacgtaaaataaatgtggttaacatttgaaaatcacacaactataatgagtccgcttttaccgggtcaatataaatgtgtattaaatacgttataaatcgtaacgttctgagatgtctcgatgagaagacaacatcaataaccttgctagcgagctggagcttttcccatgtttttccaaggttgatgatgtaagcttggacgttcctatgcttgaagatataattctccatctaaaaatctcagttcttggcgacaaggtgaacttcaatagccaacatcatttgaatgccagtttctatccaagagaactaactagacggagctgtgaatcacattgaaagatgtttggtgctgattagtgaaggtaccacgagcgtgccttcttataatgagattgacgcctcgctattagttgtatgggtttacccgactgttatacttagattgtatactgtgtattatacgctaattatcttagcagtcattatatctcgcttatgtctctacatcgtaatgaggttgatgcctcattttactcatataatgtcttatggtttctcgttaacgtgcgagacaataatttgtatatctttatctcgcataagaccttttagtaagcaacttgtaaatatactctatcatgcctgtattaatgagttattccactttcaaatataattaccattacatggttaattcacattcttccccgttttacacgtgtccccctctaaatggtagccgattttcaggtataacattagctgttacagaatatgctgtgagtgtcgtgctaatcagagaagaaaacaacgtccaacatctagtctatttaagagttatgctctcgagaaaattccaagagaagaaatcacaattgttgatgccttagcctgacttgcgagcaacaacataactgaaaaagctaatttaatcccaattcttccttgaagaacccagcatcacctatgcagaagaaattgaaatgattgacacaattccaaactagatgacaccaatagcagcttacctcaacattggagaacttcaaaatgatagaaatgaagctcagaagatgagaaggaaggctggacggcatatcatcgtagaaggagtcatgtatagaaggggattctccatgccactacttagatgtgttacagaagaagaagctgcacgacttttgtccgaagtacatgatggattttgtggcaaccacgcatccaggcaaagcctatcaaagaaaataccaaggcaaggatatttttggcagaccatgatggaagattcaaaggcctatgttaagaaatgtgaaaaatgccaaagatgtttaaagataccacgtgcaccgcccaatgagctaactcagatgcaaagtccttcgccttttgctatttgggaaattgacctaattggacaatttcctaaaggtaaagggggagtacaatatgaagtggtcatagtggattattttacaaagtggatagaagctgagccattggcaacaattacatctaccaaagtattagaattcgtgatgaaaaacataatatgttagttttgactccggtacaaaatagtctcggataatggcacacagtttgacagccaattgttcactaatttctgcacaaatcatggaatcgtaaaaaatttctctaagtggcacatccttaagcaaatggtcatgtcgaagcattcaataagacacttaaagatactttgaaaaaatgacttgaagaagctaaggggtaccggccgggggacttactagaagtactatggtcatactgctcaattgcaaaacgagcaactggatagactctgtttgctatggcctacggctatgaagctatgtttccagtagaaatagaacctttgtcccacagaaggttgacctatgatcaatattctaatcatgcccccctagcagaatcacttgacgaaattgaagaaaaacgaggctcaacaaacataaaaagtttgtccccatctcaacaaaaaggtggctcggtacttcaacaagcaagtgaaggcacgaaaattttttggtgggagatatggtcctcataagagtatttgtaaacataaaagacagcatgactggtgtgctcagaccaagctgggaaggaccatatcaggtggttgaagttctagaattaggagcataaaactttggtggtatgacaaaaatatggaacttgttctagtgccaaggtattggaatgggtaacatttaaaaaattactttcagtaaaagtacaagatcggatgaccactttaagtgcaaaactacggatcccgcccaaaggttcagatgaagtgattaagtactcaggtcggatgaccacctttgaatgtacaatttctatttaagtgcaatttgttttgtttaaatttagctaaggatctgattagatcatgtaatagctttatgtaagttactacagtaacaaaactctttcgaccaatgaatgagtaaagatgtctatctaaattctgattgtgtcatatctattagcaaggtataaatttactgttaaatgcatacaaaggcctgctcgaatccaaagaagcaaacatacaaaaattgtacttgtgaaatacaagtgagcaagagtcaaaagtttgctcggtcacttggggggcaactatacctgtacaaagcattggtaaaaataaataacaagctcaaaaaaaaaaaaacaacatacttgaactgatgattatcaaaacaaaggacaatattcatttaaaaagatcacaaagtactgtaaacccgagattaaaagccccctagtcagccaattgtcttaaaatgcaaaaacataaacccaagtttaaaaactgcttggttggtcatctttgtctgtaaaaaaaggcctatgggccgaacagatacaaataaaaaaatataagaaaaaatttttagacggtaggggtgtcgggctctctgtatggattagtctagtctgtgtgggctagagactcaatgttctgagtagcatgagtgtcggtgctttggtaggcctaaattttagaagtggttgcctcagggtgttctttggtcacctaactcgcacagaaatcaagatacatccttttagaatcgccaaggtaatcaaagtttcctgtggggttagccttccagaattcgtagaagacctcaagggcagacatttctaggctttccaccttcttctctagctccttctccctgttctgcctagtcaagacatcctcttgcaggtttataaggagagtacggagactctccctctcgtctttgagagcattgacatccttggtgtgagcctcgttacctgcctcaagctgggcagtagagggcattcatgcaattccttcattagctcactaacccggttttcaatagcaaggatgttttttgttcacctccccgagctccttcctcacgtcttgaacctcctttttagctacatccaccaacctttgtaaatgtgttggctgtgtcaaggttcttggcagcagtggatttggctcgggagtaagcgtaagccatcttcagattgacctgcacaaaaattgttcaaatctaagctacaaaaaagagaataaaacaaagaaggaaatatttacctgtgtacctaccttcaggactcctcctaagaccagttccaaatacagctacttgtccgccctggacagttgatcacacagtttaggaagtgatcggtttagat

SEQ ID NO: 48335 - DNA, 922 bp, Cannabis sativa
aaaaaaaaaaaaattctaaaaatttaatactaacctaatgcaacatacataatcatttaaaaaaaaaatcttttccttaatatcaaaataattaagtggaatttagttgagatgaataaaaatatagaaataagaaaagaataaaaaataagaagaatagaataaaatttaaaatagataaaaaattaataaaaagttattattttttttttatttttttttaaataaaataatcattctactcaaatagtagaaacaacattcatgtcattccaatactagtgcaactaaataaaagtatgaaattaaaattattttcttttgattacatttcagtgtattgccaataaatttgttaggaagtttccttcaaagagaatattttgtcttcatgcgaattaattggggttggaacatatccatggtttcaatttgatgagtgtgcacgatatatacaaagtataaaagtcatatattttttattattgaatataatgtatacatattcctaatattattatagaatattatattatacttaccctcacaaatattcatttaaatatccaacctttataatattaaaatgatattttatttaatttgttgaagtagtcaatgtagttaagtttattttcttacaacattttttccgttcataagaaatgaaaaatcttaaatggtattacataactatttttttaaaacactacattaataatttaataattattagtggtacaatcaatgtgcagattcagagtgaaaaaatgctctccgtacagcttgcgttttcccatttcgctgtgggctgacgagcttgtacgatttctgagtggaggtaacggttctctctgtggtttttgctgtatttgatcccctggtgatctagggttgagtgtgtgctcattattcccctgta

SEQ ID NO: 48336 - DNA, 2115 bp, Cannabis sativa
  modified_base (525)..(532): a, c, t, g, unknown or other
  modified_base (867)..(881): a, c, t, g, unknown or other
tgtaaagggttttatttagggcacaaaacccaacagcatgatctccgaaacgatctaaatcgtagaaggggactggacagataaaacattccaccaaccgtccagctaaatacccacacccaagatccagttcaaagagatcccaatgtgacacaagtcggtccataggctgaacaagttcatcagcttgtgcaagcacaaatagatcaactttaaaacatggcacaattctcggtgatcgatgtcctgacagattttaatgtcatgttagcttgaccaaccctatatgatttaaaatttggcacattgatttttcatctgtgcatcaagttcctaactaagagtggggtaggctgtcttaaaggagatcaaaggattgcacgggaatgctataatcttgctctatctaaggtcaagaaggaaaacacctctagccagagttcagagaaggggaagagaattgcccaataggaactcgcccaaggcggggacaaaagttgagaatattttaccaagatctagatnnnnnnnnaagtatgttgattaacatcctaattatgaattctctaaaaaaatgaaataaacacataagggttcaagaaaaccttacattaatagatgagttggaggataagtttagaaggtatcaagtgggcgagctaggaaaacaatctggatatgactcagacgaggaactcgagccatacaatccaaatatcatgattactcattttccccagggatttaaaaaccctcacgtctcgtcgtataatgggaccaccgatctggtctcatatttgaataacttcaacactataatgtgagctaataatgttacaaataatttacgttgtattttgtttcccnnnnnnnnnnnnnnngcagcaagcagctggttcaataaaatcactcatcattcccttacttcttgggaacatctgtccaaggacttcaaaaagcagttccatgccgcaagggataggcaacctgaagcgtcctcactaactaacataaagcaacaacccggcgagacgcttaaggcgtacttaagttattttagcacgactgctgcaagagtaataaatttggatgatagtacacaacttactcaggtggggatcactactgatctctctaccggtgggggcgaattgtgggacgacttacagggtcatccagtgaagaacatcaccgagttcaaagagagggctcaggtgtttattcgaaaggaagaagcacaaaaagagatgaacttgttaaaaattggctcgggaggcaaacccagcactatttcaacaagtactgtctcgactaaagttgataactcaggggcctctggctcaaagaggaaagacgactctaaggggtcatccaaagacaagaagaaacaaaagaagcatgacaagtgcgtgccagtttacactatttataccgagcttaatgaaactcgggaaaatatttacctcgcgcatgagcacaaggttgcctttagtaaacttgagcccatgaggcacgcgaggcataaaagagattcgaccaggtactgcaagtaccataaagacattaggcacacaacagacgagtgtcatcagttgaaagatgagatagaaagtctcatcgcatgaggtcactttaagcaatatgtgaagagagagggcaatggacataaccagcctaatccgcccaacaacccaagcaacttgggattacaacctcctcttgttggaggatatcctggttatctcggggagccgcatattgcagaagagagaaacaatacccaaaagaggtacatgaaggaaataaaaaaacgagcagttagtattcgctccagaatcttccaagtaggtaaaaactgaggaacctccaattatatttttggaggaagatgagaagaacgtgaggtaccctcacgtcgatctattggtgattaccatccaactcgccaataaaaggataaagagggtgctgatagataacgggagttcagtgaacatcctttacagtgaaacattaaagaagatggggctccaaaaggccaaattgaggccttgcatggtaaatctatgcggattcactggcgatagtatcgccagtcaaggtataatcgagctc

SEQ ID NO: 48337 - DNA, 2329 bp, Cannabis sativa
atatatgctttttaaatttgttttttcctttaattgaacatttataatatatatattgatatattagtatatgactgctttgcatgcgcattaatattgttagacaaaaagaatgattgtatttggaaaaagaaatggctccttaacaagtatatgcgactcacccttttgctgtgtcacgtttgagagtgcaattaattacataaagttttaattaattcagtcttctaaatatttatatttgcactgcacctcgctaaattatatatgttttgccaagttaatcttcaagttttatttttttgataaattagtccccaaactatatatattttggcaagttgatccacaaactttatatcttgataaattggttcccaaacttttatttctttagcaacattaaattctcactatcagatattagcattttattgatttttatttcttttacatactttaatttaatttttgtgttaagttcaaataattttatttttttcaaaattttaataatttttttggtgaataattatattaatattattaattatattaatttcattttaaattttaattatttgataaaaataataatattaatattttttattttaaatttttagtactcgtataatatatactgtaaaattataatatttagttttttaagaaaatatttaaaatatactttattcatatatatattattaataaaaaaatagaataaatattagtggactcatataatggctagagagaattccagccccctcatattattatattttagcatttatagtatattttattgttgatttacaaatatatatcattataattttttaatcgtatatatatttattgattatttaaattttgcatcaataatgaattaaaaataaattttaaaatataatttatttcggtaatttataaaaaaaaataatgataataatatttaagccttttcaattatttttttcttcttattttgacatatatgaagaaaaaaaatacatataaatcaaaaaatacatgtttatttaatttcataatatattagtataaaaatattttaaattaatataaaaataaataaataaataaaatactatcatttaagagtgaagacttaatgtttcaaagaaaataaaagtttgggaattaatttgctaaaaaataaagtttgagaaccaatttgcaaaaacttatataatttggggaccaatttatcaaaaaataaaatttaaggaccaacttacatgcatgtctaatttagaaatctagggtacaaataagtcaatattttatatgtttttttcaatgtgaatgtaatattgtgcttgagtactacatgcatgaagcatgcagcttgaattttgtatccaataatatatataataagattattaattcaaaaattaatcataaaaaggagagataagtacactgaatccatccacttgattatgaattttgcttttattaattgatgtacaaattgattaactgtagttaagagtgttgctattttattttgtatgtctaacattttgaggagcattttgctacaagttaggtataagtggtacttagcactatttaacatgacactttataaattagtacaatactataagatccaatactattaagtacaataacgatcgatatgcacctttcatttttaacatttttgtccaacattacataaaaacattatactacaaaagacttttgccctcttttattttctcttgacaattagtatactacaacatgtgcccggcaaatgcccaaatacttcccattcccaaagtgaatttgtgttggcagaaagggctgccaaagcctcatcagtaaatgtgtttttcccagtgtcaaatagacaacgtcgactgaaagtgctaaatcatttaccagaaaaatatacgaaacgctagcgaaaacaatatatacaatattatagaaattacatttgctgacacgttattgtgccagcaaaggtgatagagttttgcgccaacaaagtttgacttgtgatggcgcattaacacaccaactataatcatatttttgctggcacaataattacatataagttcaatgtttaacaagacataaaagcatcaacaaaaaccttcaggccaaaaaatggacaaccttttctgggattattagaaattagtatctcgggggtcgagaaaaggttactaagaaatatattttattaatttaaatttgatttaattttaaattataatcaataattcaaataaataaaaatagtgaatataaaaagttaattttaaatactatataaatt

SEQ ID NO: 48338 - DNA, 1707 bp, Cannabis sativa
  modified_base (268)..(268): a, c, t, g, unknown or other
  modified_base (1678)..(1681): a, c, t, g, unknown or other
gtacgaccataagtgaatttttgcccaatattttattctttttttaatccatataattcagccctaagccttagttgaaacactataaaaagaaatatgatactctcatctcattcgcttgacaatttgtcaaactaatgtcaacttgactattcaaccagcctagatgagagagttccttccttagtgatttcacctcctttattgttcttcactattcgaaccttgagtgaaagagtgccatgctcacacatagcaagtcaagtantcaatcatagtgagtaagatggtgataaccaaacccgaaggagagaaagagatctaggtttagatcttgataatgctttgcgacagaaaggaatcaagggctagagatctataacgggaggagtcattatattctgttacaaccaatgtaaggttttctaaactcttatgtgtttaatattattgttttatagaattcatatttaggatgctaattcaacgtacttgttagtaaatttagatcctggtaaaatattcctaacaatatctggcagcaaaacttatggccatgagcgagtttggatgttgtaggattcgccaagcttgcttggcaagcataacctaattaaagtggacaagcaatcaaaatcccaaacaaccattttgtttggagcggcaaagcttttgccaactttgccagtgggtagagggtttgttgttggaattaaaaccccaccaaaggttaaccataatggactctaaggaatgacagattgcaacagggagcctgaaacaagccatagtgtaggtgggaatggctggaacaacagatttaagaaggacctctttaccacctttggagaaaaccttgtgttttcaatttatctttgattggccaatgtactaaggaagtcccagatatttctcaaagtatctcttccatggatacccatgaaatctgagattaaggttttgtccctgagagccgtgtttggggagaaatagagcgaggatttttgaagcttaacttgttgcctcgtagctttttcatagttgagaaggatttccttgatggcattgtaggagttgatagaagcgtgggtaaaaagaatgttgtcatctgcaaagaaaaggtacaaaatcgtcgggcagttctggcaactcaaaaaccccgtagagactaagatctttcttactgagagatgagggaagagaagcctttagaacatatgaggaagatatagggcgagagggggtccccttgttggatacccctcgaggggctaatagatcccgagatctgaacgttaatattaaattggaaagtgaccatagtgaggaaattgaggactagattagtgaaggtaggggaagtggaatttttccatgatggctctgataaaactccattccactttgtcgaaggctttagccatgtctaattttaaggtcatccagtcagttttatcacttgacttaagtttgatggagtgagtaatttcctaggccactaggatattatccgagatgaggcgtccttggaggaaggcactttggttgggagaaattaatttattgaggactaattttatcctattagcaattgtttttgaaataattttgtaagtgacattgcaaaggctaataggtttgaagtccttgatagtggttggtgttgggttttatgccnnnnataaaactctttacaatctgattagt

SEQ ID NO: 48339 - DNA, 1088 bp, Cannabis sativa
ttttttttttttttgaaatataataatttcatcatcataataagttttttggatcactattacagctagctagctagcttgcataaattgatacgaaaacttaattgaattcttttcattacaaccatggtagtttcatcttaacgatttcgattatcttatctctctctttcttttttttttacttaatttgttttcttcatagatcaattatatatacagattgggaaatataataataataattgagctgacgtatatatatattattattattattaataattattttgaattattatatattcaagatatataggacccgttatgatggagagatgagatcctaagtttagcataagaaataattactagctaggtaaagagatctcatatacaccaatcaccatggaaattttccacgcaagaaataagtcatttaatttaattacagatataaaaatggaaataatactagatatttacttcgttttactttttactgaattaggatacaattcaataaaaaacattaatggaagccaataagatggggaagagagaagataatatataatagatcaacaagagaaaatatagctagcttttagaatttaaagaattatagaggtaaatatttttcacaccgtatatttaaaatccagtaaaaagaatgtttatttgtattgtaaaaaacttcatcaagatcaatctttttaagtgatcaaagattaacaaaaatatgaaaacaattaaacaatcaagaaagcaaataactatagctaaaacacaataaattaataaataaaagcaatgggtccaagttccttatgaaccatactatttcaatatagagattgtctatttatgcataacaaattgataatatcaaaataagaaatttcatttgtgaagctgcaatacattgcgacatataataaaatggagtctattgcgcataagtaaaaaattttgtatttttgagatcttgatgataaagttcttactatttccttatgaacttgagcatactattattaaaatatttctaattgaggaaataaaataatattattgattctgataaa

SEQ ID NO: 48340 - DNA, 3184 bp, Cannabis sativa
  modified_base (2499)..(2505): a, c, t, g, unknown or other
taaaagttaactcaaattccaatatttttgtaagtttccctaaataaaagagtgggatcggattagttcacctagacccgtggctaacccatttctgcttacaatccgtccgtcttttggcccgttttcggttcgacccgtttacagacccctctcgaatctgaaattggagagattcagagagagagagagggagaagcaaaaccaaacttcactttcttgtagatctccgttcgttcatatgatcggttcctcaattcaccacctgtaatgcgatctgaaaatttccttctatgtacgtaaacagtagtttttctctttttagcttgttttgaattcaatcaaaatctttaacttgtatataattcttcaagtttgagtgtgcgtatgtatgtatatgttactgaattttcagtaattcgaacccgagaaactattatttttgtgttggcttttgtttgtagattgaccagcctacgggattttcagctagaaaagagcaatggacaagtctagtgctttggagtacatcaaccagatgttccccacaggtgtctctctgcctatatttacatatcttttaactcatatatatacgcattttgcgttgatgtatgttattatactaaaattttagtggctaaggaagtgttgatgaaaaaaatgcatttgagtaaacattcattgggaaaagtaatcctccatttgtatgaagatgatgatgagatagttgcttgcttcttttggttaacttatatcatttttttttcttctgttcagaggcatctttgactggtgttgaaccacttatgcaaaagatacataatgagattcgacgagtggatactgaaattttagcagctgttcgacagcaggttctatcttttcctttcttagtgcctttacttgcttttttgggtgaaatagaaatgtatacagctgtctagtcataattttagtagaagcagtgccaaggatttgatatagagaatggcagacatgaaagaagagagtctgatcatctgataatttcattttcgcaaataatccgagcagagtttgacatagctagttttatgtatagacagaaaaaaagaaaaagaaaaatacaatcctttgaaattcggtctcctaattaatcacaagatataaaattctggttttcagtttggttgaaaaatgttaaaaagtttaatacatttcccatatatacatatatataaatatgtgtgtgtgtttttatgagagcataagagattttgtttatagaatgattttgttttgaagttgtatagtcatatcaattttcaggaggttagattttagttgagtaatcttatttccaaactatattatacatacactatcatcatttctaataagaaacagagttaatataatattatcaataattaaacataagataatactcttataacaaatacaaactaaaaacataggaaaatagaaaatgttgtcacttttaaaatttatgctaagctttctcttctgacaaattgatcactatacttccagagtaattcagggactaaagcgaaggaagaccttgctgctgctacatgtgctgtggaagtatgtatttaatgaagacatgttgttctgcaggttcaacctttggtcttttttagggattctttgtgttgtttcttccataatgtggtgtgtgtgtgtgctttcatgtgatgcaggaactcatgtataaaatccgagaaataaaaaccaaagctgagcaaagtgagacaatggttcaagagatatgtcgtgacattaaaaagttggacttcgcaaagaagcatataacaacaacaattactgctcttcatcgccttaccatgttaggtattaattttcgtcagcgtatgcttgacaatgagtatttctatgactctttgtggtttatgcttaataggaaaattccttttcaaggctatcaacagatttctgaattgtgttcttatactgggacataaacgttgtcttcaaaaggaatattcctctcattcaaaaccatgcatgagactttcctctccacattagaatgttccaacccttgaatggatttctcaattcaacattaatctatatgaattcattttatcaagaactaatgtatatatttaaatttagatggtaaaggattaattcaaaaattgtggtataatatgagccacattaattatactcctagagctgcaatgtgtgcccaatatatttacgcaatatttataacaatatggtacttatgaaatgaagaaaaaaacaaacaaacatggggttgttgaatatacttatgcttaactcaggaacttcgttttagtatttcatgacatactatatcttgtgcagtatgttattgcataactgagtcattactttcagcatggatagaatttataaaccttcactacatatagtaaaaagcacataaatgctttcaaaagaaagagcgcagaaataacatctctctctctctctctnnnnnnntctctctctctctcttttcctttcataattatatacttcgttactaaataaaatctaggaagacatgaatatatgtggtactttttgaatcttatatctgtccaccatttaattgttcttatagttgattttctctatcattattgtgacagattagtaatgaagttgggaaatgagacacctaatgaacagttcttttaacaaacttttcattgacatctagaacttgtaaacatatagtttgaaactgaaactgaaaagaggatcaatttatcaataattctcctgctcttgccattgagaattgagttgattggttgtaaattagagaaataaaggtgcatctctttacaactcccaattaattccactttcaatgtattgcagtctctgctgttgagcagctccaagtaatggcttcaaagagacagtacaaggaggcagctgcacaattagaggttctatttatttatgtataataatgattgtgattattcaattgaaatttctaatttgttatacatcatatattgagtcatttctcagtaggttaactgttgctatatcattgatatatttcatgtatttttttggtctttatcttggtaattatagcttaaattttatctttctctattcatttgtcaagcactgattactctttgctgatatagataga

SEQ ID NO: 48341 - DNA, 2060 bp, Cannabis sativa
tgccaacaatatccctattatatcaaaataaaataactgtaattggaaaacactaacatgtaatatttattttcagtagaagtactataatcctggtttgctttttgttcatcaactaatcagatatatggttgtaataatctagtacttaatagttgataaaaaaaatatttttttaaaatatttgttatagttaattgctggtaaccaattaaagtgaagagataataaattattatagcctcgttaaaatagtctttacctttccaaacaagcgagtctgtaaatgatatgaatcctccccaggaacatcaatgctaacacttagctagaaacaaaaggcgaaaattcagagatctaacacaaagaaaaagcataaggcatgataaatgaaaacaggaacactagtacaaatcatactatttgttcaccaaaatcgactgaaacatttttagcaggtacacccttagcaaatattgtcactaccacttcttctggcttttggtagtgttcatgcctgcagagatttgaacccataatgattagatatttatctcttacatctggatattcccataagggggaggaggtggaagtactgtacaactataaaattactaattaaaagttgaaaaccatatcacttgtaagaacgcatcaaaagcaaacatgcctgtattttggtttagcaggtgtaactgtcacctcagtgggagagttgtcgacagcaacaacaggctgaacatcttctatagacacacttgtgctactggttgtctccaataatttctgttgtagatcactagtttcctctgaattgatatgaaaatccataaacaaagggtcattgaagttttcttcatatgcaattctataccctaaaaactttgttccttccaaaatgcatccattcccaacaatagcacattctttaatatcactatttacatatatcacaaaaaggtgtaagaatgtaacaagaaactaccaacctgctatacgctgatcacattctttaatcaaattagtaaatctagcatctcctggagccaaagaagctcccttttccaaggctaccttggcagtctgatattcttcaagcttgatgcaagcatttctacagaacagtgagaaaaagagttgcagagacttatcaaactcacaactaaatagaaaccccttctacaggacaaaagatgtcatgccaactaccttcaactactactctctttctttttctttgacaaaaacaactactactatcttcaaattgtcaagaaggccacgtatagaaatacaattcatcaattaacaagtataatttacatgacacaagcaataaaagcaaacatgaacttgctaaagttaatccacaaaagagtttaaacatttacaatagtttataataattaagtccaacacaaatactcagaaggtgaaacgttcaactacacacccttttcgcaggtaggcttttgcatttaacggttccaactcaatcgccctgtttgcatctgcaacagcctctgaatagcattcaccaacaaaagtacagcaacaagaagaacattagcacattttgaataacattccatactaaatatcttatcagcacaaaaggaaaaaaaaaaactaaatcacatatgattttgggtgtgtgaattttttttttaaaaaaaattaatcacaagtacatgggtcactgttcataaaagtgagatcgaaacccgagtctaaaagagtatgaattcgccaatctattaggaacaaacgaacaataaatatccatgaaaaaaaaacatatacgtatatacacaagaaccaagcctctgagtaacatgagcagtgagtcaaccgttatgacgaccaccaaaaaaacaaaaaaaaaatgaagaaaaaaaaaaagagtaaaggaagtacaaggtctaataaacagtatgaaattgggaggaagtggagggtcaccagtgaaattgtcgagtttgatattggcctgggcacggtcgagataaaggtcggctttggtggggcaaacatcgattgcttgggagaggaggtcg

SEQ ID NO: 48342 - DNA, 1191 bp, Cannabis sativa
taaaagtaggaggagcagcaaccccgtaaacatcgtgagtccctcggggtgccttctctaccatatgagcataggtagaagtggcattggcaataatcatcagatcatgcctgatcttagcattaagtcctgccaagtatttctttttcttactgaaatcaattagcattttcccaaagaccaacctagcaagtctatcaaacttggttgtgtacttagtcactgacatgaattcttcctaaaccatctgagtaaattctcttctcttggtactatataccacctcattataatacttggctttgaagagatcttgaaaccatcccaagttataattgtagcatcacgggtgaaagatactagtttccaccacactaagacatcttcctgatactaaaatattgcataagttacccagtcattatcgataattcccataaaattcaagattttattcatggaagtcaaccactgctcagcctttatcacatctgggcctcccaaaaagattgaaggtccttgcttgtagaacctttcatacaacagttccactcggttactagaagcaggttgctcaactggaaacactggaacagtacctaatggtgcctgaggaggaggtgcaacaagaggaccctgttgcctaagtctctaaacctcctcgtcctgtctctaaaatctggcttgcatttctataaacctctactcccaatatggtgaagactgtggcagatttgcattaccgttgccatgaccctgcctatggcctttgactcagccatgagcatgagggggattttgatttccttgaccacctctagcctcgaccatatcaccctaacttctattgtttccttgggtctccatctataggatgagcctattaatttaaaagccaggttgatcaagcagtggttataattggatactaattactgcataacatggaaatataagtatgcacttattctcctatcatgctactaacattcttcctatcatatttttctaatcatgcttatctaatttaaactactaaaatatataagggcttactaaaccgtgagtcgagcttgtctttaatgatgattgtatatatctcgacagtcttggaagaacaacctaaccgctctgataacaaattgtaatgccctactagcttaaaaatgttactgtattttattaattatt

SEQ ID NO: 48343 - DNA, 1236 bp, Cannabis sativa
  modified_base (1167)..(1173): a, c, t, g, unknown or other
taaaataatttccaacagtgatctcctccatcgactccataggcccaacaatggtagtggtctcaggatgaccgtgtggggttcgtgacttacacaccttatgatgtggtctctcaatagcttgggccacatcagggccaacatgggccatcatacaaacaataacattctcatcagcaggattcttacccaacctattcatcagatgctccttctcacataactttggaatgccaagtggcacaccagttgtcatacccacagagcagaattttgaaattccctcagcaaaatcattcgtatcggtcgtatgtacgactttcgtatttaaggtagtggcctcaatgcacgtccccgcaccttgcgtctcaagagacactgtaccattcacctgaatattcgaagtcccctgaatattcaccgtccgatcaaccctgtcccggagaagagaaggacctttggtatcaaagcaactacgaataggaacagtagccttgatccagggaccatacaaaggaaccgcattaccaatcagaggataagcataagcgtggttactcgaacaaacgttgctgccattgggccaaatagccacacttaaaatagattttcgatagcttccgatatttgaactgaatccactcctttcttcctctagtaatactcagataaaaccctgtcagaatccattggtcaataaaaatatccacctccagcttcaaaaagccccatctagcgatggtcctgttatcaactccatttgactccaaaaactcatagttctgaaaagcaagataaggagtagggagcccatgaatctcaacccaaaacgcagctttattcattagaacaccaaaccaggccccgtcgagaggccattccttgatattcagaagttgcctagcaataatccaagggcgatgtttaaggacctcctccttatcttccaacaagtcaaagaagaaaccccatgtccccctctccaaagtcttcattctccatttacccttcaaagggcaaaccccagtgagaatctgtttaactcttcctttggcaagaggacgggatccaaaaatcttagccaaaacacttgttttcgcgacctcagagttaatctcgaaatcatcttcaatgtaaagaccacttagctttaatttggaaattagnnnnnnnttagggtttaattatgaaacttgtttattagtcttgaattatttaattatgttgatttatttg

SEQ ID NO: 48344 - DNA, 1255 bp, Cannabis sativa
atgttattaaactgtaaacatcaaaagtgataaacaactgagcatacagaggttacaagggaccacgagagagagagatctgtgagtgtgcgagtgagaaagagaaaaaatgggagcggcggcaggagtaagagtgaggtagggttagagaatcaaagaagactaagcaaacatacatatatataccaataaatctgatgaaaaaccctaattgtatgtagttaataaaaagaaataaaattgtatagttttcattgaaaaactggaaatgaagaagcataaccctaactacaaaccatgtaagatgaaaaatagagagagattagggtatcgaacctgtgagggttgtagttttggtaaaccctactgagagaattgagcaggcgacgaagaacaacaagggttcctaaccactctatatatactcgtatcacttcttgggcttgggctttatatatgggcccactatttatcagaaacccatgaccctgtgggctcgtttctaaaaagcccattggacatgaaggagttcatgctatgtgtttttcaaaacactactaccaattataagaccatcttattcaattaatgatgtaagattttgtgttaaatttagctcattaggatacaacaaacaagttttgagaatacttaatggacttcaagagatatactttaaatttattatttttattattttgatttaatatatatacatctggatttgtcaaaaaaaaaaatatatacatacatctagagatatattgagatatggtacgataataattaaataatacgaaactttttcgttacgtacctgatttagtaccataaaactaacacacccccgctctaccacctaaattgtcgtcgccaccagcaaaacccacgacccatctccaccagagtctctctctttatctcactatggttgaaaccccataagcccgaagcccggaaggccgttttagcccggactaatatgggtaagtttttttagggtaaatactattttaaatcctgtattttgtaaaagttactaattggatcccctattttgttaaataataaaatggaccttatattttctaaaaaaataaaaataagacactgaactcaattttcaattattttattttttaatataaccaactttaagacaatttttaacacaaatagatacataaaatataaccagttttatcataacattcctagatcagattattattaagttttattttgacgaaaaacc

SEQ ID NO: 48345 - DNA, 1635 bp, Cannabis sativa
accaacttttgccagcacaaaaatatgcttgcaaaagtgacatttcttgtagtgtttgttgtgactaaaaataagattttttgtagtgttctttttgtttggtcattcaagattgtaaaagtttacttgctaatttatgaaatgtttctatttaaattattaaacgatcaactaatgtagttactcggaattttactagagctgctattttgtatcttcttcgtcactttaatttggagtttgttccaactgatttgttacctagcttgtttgataattgagattgatggttaaataaaattaattttgcattcaatatatatatatatattaatgggtattacctttgaatgggtagtattaaaaaaattttagtttttattattaatttttctatctaataaaaaaaatctcttatttttatattatatgggcagtattaagaaaattttagtttttattattaatttttctatctaatcaaaacaatctcttatttttatattatatgggcaggagttgttctatcgactaacaaaaaaattaaaaaaaaaatgagtttgacttaattattgagtataaacatgttttatacattgggtaaaaaatgtatttttgatattaattttttctgttaagtaggttaattaagaataaaaatttaaaatttcgttttatttttagtagtaagattataatataatggtttaatatttttaaaattaatatctataattaattttttttagtaaacatcagtatatatattttattatttaatttcgtacgacgtctaacaatgattaactctctagtctctatttgttgttgagtctaatatcttgttctatcttcacacacacacacacacgtaacactcatatagacaatattttgtgtaacatgcacaagatgcatgcattaattatttaatactagctaatagaaaactacgtagagcaataaatgttcatagacacatgtttacagaaattattatgcatgtaaaactgcgtgcaacctcaagcggatgctatatattgactcgatggcagtaattctgatgggtacacttcttttggaagatatggtgcgtaatgtggttctggtgctggttttggtggtggtggtggtgaccgatgcggatggggatgcggatgaggattcaaattctgctttgaccccactgcatcataaagaaagtatttctagggttaccatatatacatatattttaatggaacatatatagtataacctctcaaataaattttatattgttgcattccttttatgcttttgtctcgtactaatattacaaccataattatttttatacgacgatgtgcgttgtgatgattttggactttttttttttggacttgaattatgtgggattcaatattaagagttaaaacgataaacaagttttcgcacagctactatttacatgtgcaagatacgcggttaaaaatatcttggccaataatattttgttatcatatgcagaaagatataagcagtatcgcataataaatatgtaatacctggtaataagtttcttgcttcaactattaaaccagcactattatagatagaaagaaataatatgagcattaaacggaaggtggtact

SEQ ID NO: 48346 - DNA, 1556 bp, Cannabis sativa
ttcaaactctttgaactctagactctactcaatacaccacagaatctctatgacacacatattttgattagacatggatataatataatgagtgaacttccaaactaatagaacttattcttaattttgtaagagttcttataaacatgttactatcataatagtaaatagatgctagtgaaatccttgcacatagaatcacagtaccttatctaagtggaaagatcgttaaattctagtctattattatttggatgacactagtgatagcatactatcatatgtttaagaaataaactttagttaaaataaagaaaagttaatctaaccattcacatggacagtagtaacttatcagaattataaggataagataggaaatttttgcaatgtctacttgaatgacttaaacacaattcctattccttatgaaatgttttatggcatctatagtgattactttatctgtagcaagtattttataataatgttaatactagaatgatgtgttaatgacttagtctaaatggaacttattgttttagactaagattaaatgtcacaacaaaaggtccctaagcaccaatagtaagagattaaatgcacattagtgtatgaatttaaacagactcctaatgttgagtgggagccatcaaagatgtaatcaaacaaggaacattgggagacaatcaagaaagaatctctaaaagtgacctatatgttagatgataggggtgtttattagaatccttatatctacaccaactcagaacttaatattagagatggtggttactctggcggtggagaaattattctagaaggatgtaaaaacccatctataagaatttagtttcactaatgaagataaataacttagttgttttaaaaggcactagaaagttattcaaactggagaaagttccttattgttacatttttattcctttttccgatagaattagagatgcgtcttctgtatattcaaattcactaatcaagtagtaaagaattcaatatccctagaggagtaacacatataaaaaaaataatgttgcataatatttttatgaacacgaaggaagtaatggtggagatagcagttgcttaccacagcgttatagttgctattactaaggtacgatcagatgtgctacacttgatacggatatcaagacaatagattgattgaaatgcctttctaattttatgtttgtgcaagtgggggtttgttgagattttatgccctaaataaaatccttttgaatacaatcatattttttttttatcaatagtagattagaattcatttatgcttatatgtattattcatgactatggtttaatatacaatttctgttaaatctagaatgtattgtaattcacaattacagtgatatcaagaaagtggaaggtaattgtgattataagcttcaaaaaattatgtcccatactttcaccttggataagttttatattctttccatgatattggcaaagtatgctagtatcgaatgtatggagtatacataggactgagactgatattgatcttg

SEQ ID NO: 48347 - DNA, 2252 bp, Cannabis sativa
  modified_base (52)..(58): a, c, t, g, unknown or other
agtcacttcaaatttcttatattgatagctaatcagattgtaaagagttttnnnnnnngcataaaacccaacaatatattgctccagcatttttgagtttgaatgtcatgaccttgtaataatacagccccatatttgtaatgaagcttttgtgttcttgacgtaaattatgcatcttaatctagttgtacccagaatatgcatccataaaggtcatcagctcgtgtcctactgttgcgtcaaccagctggttgatacgtggcaacacaaatcagtcttttggacatgctttattcaagtcgagaaagtctaagtaggttctccatgtcccatttggtttaggaacgagaacgggattcgagatgagggtaaaatgcttctcttatgaagttatttgttaacaatttttcaacttcacctttcaaagcattttgtcacttggaatacaaaggacgtcttttctggcacttcgatggataagaggtattaatgttaagatggtggaaaataacatttggatcaattctgaccatgtctgagtggctccaagcgaactggtcttggtttgccttcagaattatgattaattactatagttcttcccccaaatcctttccaatgttaacacatttggtcggttcatttaggtctaaatatatttcttccaactcttcaattggcttgagttagttgtactcatcttggattctaggatctaagtcttccatctcgccttcctcgttcaactctaccaaaattaccattaactggtggtttgcccttcgtttctttaattctacatcattacattatctggttgtcagctgatcgcctttcactatctcgactcaggaatgagttgggaatttcaaggataggtgctttatcgagcttattgcccctaaccctgttaatgcaagatgacccattagtatgttgtaaactgaagggatatccaccactaggaattcttttatttgggtcgctaacaatggcaattcttccatagtaagtgggagttcaatggtgccaaggctcacaacactatttgtcatgaatccacataagttcaccatacaaagtctaaatttggcctcttttagacccatcttcttcaatgtttctttataaagaatattaacagaactctcattattgacaagaactctttttattcttttgttcacgagctagactgtgataaccagaggatcaaagtgagcaaatcatacatgtgttgcatcttcatcagcaaagattattggtggttcctcaagcttcgcacgcttgagtggatctggtgcgaaagctaattcttgattttatacttgattcatataccatttttaggcactattgttggttcccgtgagatacaaccctctagaaataaccaagatgtcctcgccctcaactaggggaggttttacacatttgttttgattctggttgttggactagttttgtttattctccctatttcttacgtactgccttacatagcctcgagaaataagtccttcgatctcgtcctttaattggtgagtttcctcaataatatccccaatgtctctgtggaaccgaaaatatttgttcagatcttgcttactttttgagtgactcataggttcgggccttcaaaaagtgacccgattctcatttacgagatatatattctcacaagtttcatttagctctgtataaatagtgtacataggaacatacttatcttgtttcttttgtttcttcttaacttttgatgaatcttttaattcatctttcctttttccattcaacccattctagctcaaattatccatttttattcttacagtacttgcagttgcagtactcgagctggttttatctcccgaacccgatttgagcattttcatctcgttctaagcttcttctttccatttgaagactaatgctctatcattgaattcattgattgttctgactaggggaacctgcagatcaacccacaatttacctctcacagtttacagatcagtggttattccagccttgagagctgttaactgaatactatcattcaagtttcttacttttgctaattctgtaatgaatcaacctagataagcctttaactactctcttggctgttgtttgatgttcgtcatcaaggatccttttagccttctgtctctcgtagcctggaactatttcttaaattcctcggataacttctcccatgaggtaaaggagtggttggtgaatttatcaaa

SEQ ID NO: 48348 - DNA, 1108 bp, Cannabis sativa
aaaatttagactcataattaagttatacaattaaatactattgtttttaatttttacctaaaatactatcgttttcattttccctctctctctctctctgtctcttcctcgcactaccgagaccacttagacgtacgaccaagaacaccaaccaccaccaccaccgaaccttcgctcctccaccaccgaaggatatgactagttcttctatacacgactatttagactttctttcttccacgaccagtacttcatttttctgctcgtgctgttcgatccgagcatacctctttctagccttgtttgagtctccagcgatgtgagggcctccaataatcacttgtaagtgcctgtccacaggtggaagcatcaactgattttgattattgtctggttggacagccttctactcccggttagtcttaacgtatgtagttttgtcacaacgagtcttaacatatcaacaaagtgctcataggatattggcaaagaacttagcagtataatggctagatctcttcttctaatttcaccccaatgttgctgagatcgagagtgattttgttgaatttatctaagtaattcctcaagtctttcccttcatccattctgagagtatacattctcttcttcaagtacaatttattagccagtgatttcttcatgtatatggagctgagcttgttccatagccctaaggccttatcttcactagacacctctctcagaacttcatcacttagatgagatgaatggcactatgtgacttagtttcgatctctttctttttctcatcttcaatctccttaagactttcttcatcaattatattttgaaattctattgtggacaaacaatgccttcatcttgatcctttcataacccgaatcatttctcccattgaacttattaatctcaaatcttgttgtagccatcttcttaataagagtcttcgaatctgaatcttgattgagctaattccaagctctgataccatttgttgtgatcgatcattacagtattaatcaatcaagatcaaatgaacaacaataacaccaaaaggcaacaatagagagattaaatgaatttgagttttattgattttaaa

SEQ ID NO: 48349 - DNA, 1423 bp, Cannabis sativa
aggatgtaaaatgaaatgtgtttacatttacacttattatactaaaggttgtataatgatctcaaagattaaacatattattcttgtgcattgtatagcaaaaatcacactttctatggcctctagtcgagatttcatagaacttctttgaagaaagtctcacttcactagggaattccatggaaattgtcaatatttttagtattgttataaaccaccctaaggtgtccaatggcaaattcttttcttttttctttttctatttgtttgtaagtggattgattgcattatccaaagaaaaggaaaaacaaccaaaattcaaaatctacctaggccatagacaatggtacaataaggtcatctacacatacatacaaacaagacagaacaactagtcaatatttaatttgtgtgagctaccctaaccctaaataaatttctcaatataattaacaaaattatcatgataaattgactaagcatgctcttagaatagatgatgagcactaaaactaggagattaaaaacaccactactaatatgcatatttaaaatttcagggaagatgaataggttacaaagcctttacaagttcataagctcacataatagactttctactaacttcaaaataaaaatctaactacaagtttcacaacaatatttcaaaaaacgtgaataagttacaaagcgattactttaaaagctcacttaacagattttcttattaaggtcaaaataaaaacttaactaaaagtctcgcaacaataggagaaattaaatttctctaaacatgacttagataaccaagggcgaagctacttgaaattaaaacatgtaatattatgattaatcctatactatttggaatttatgtctaaaacgaaaaaataggacagtcacttcacttaatattataattaattttatgctatttagaatttatgaataaatattttttttaggtctttatgcatatattctaatgatcaaataatatttagttagattgtttggtgtaataatatttttattttgaactccatataatacttttattttggaggaagtagaataagctactgttaatttaagagtagaagatagagattatgagtaatttaagtatattgtttgaaatattagtgacattggataatttttcttttaaagtttgttgaaattgttaattttgacctcttagtaattgtgtctgttaagtattcttttttcagtgatataagattattattagaggatgtaacaagtatattatctagatttctcataatgtccttgttttatatacattaactagggaactaatccgcgcttcgcgcggtttttacaatagttttaaattttcgtaggctaaatcattgtataaaattaataatataatataatgacaacacaaattttt

SEQ ID NO: 48350 - DNA, 1544 bp, Cannabis sativa
ggaaaatcatcaataagttgctcctttaaatctttcaaatccttttctgcctctgatagaccttctgagtcctttgataaccgaccaaatgaaaagaaaaatgtcattaaacgagcaaaatcataatattcaattatcaaccaactatttatctcttttattactccccctctcccccctttctctctctctcatttttttctcttcccaatttatctcaacatacaccaaaaagtacatgccacttgtttccttccagttttgttttctttgttttcgaattccaaagaaacaagaaaaggcatgctatctagacaaacttttattcctacaaacaaatattaaattttggaaaaggttacctccttaacaggaactggggtgattgactttatatgagaggaaattggtaagatattaaactcatcatccatggccacacatgctttgcatgatgcaattgataataagaaccgctcattaaatcgtccagtggcctcagtatgggattcagttcgatacctctcatgaacatcctgaacaaagattattatttagatgcttaaaacaacaatgcaaagttaaaaaaaatatatatcataaagctactgtaggaaaaaaaaaaacttcttcactgaactagtcattaaaatatctatcatgtgtatttaccatgacccataaggtagaaatatcaaagcataattttaaaaaacttcttcactggagagagttgaaagtatcagtgtagtgaatccaatcaagtggtagaaggcaattgtaacactgtggataattttataatatttttttgagaagtgaacaagaatgtgtgttatgtcctttacagagaatgtcctttagagagagaatttccatgcaggttaggagtggccatggccattctggtcatggttggcaccgaaaccccactggttttgggaagaaaaaaggtcactaccccactggttctgactggccaaaaaatcctggatcccttagcgaccaggagaatcaaaaatattggagttttcgaaccatccataaggtgtttatgatcacactatcgaatgacgggggatatgttagaatatgtgagaggactcgtctatcgggctatgagatagttgtaacactggatgcagcaacatggttaatcgaaactttagaagtattgcagaaaagggaggagaagcagaggatgaattttaagagaacatttcgaaacaactcgaatgtttgtttcttggagagcttccaaaatagcaggggggtgttcataaggatatctgtccttaaaaataacaggattaccttggtgattattcctgaggaaagacaagctagggggtggagtgagcttgcgagatgtctcaatggagtattaaaaagaagtattccgcagaagaataagactcagaaatcgatagtggaggaggaggagtttgctagaagtggtgggctaaagccctcttatgcgaatatagtgaaacaatctgcagaaccatcgaagagtcaacctggtctcagatactacgatcatg

SEQ ID NO: 48351 - DNA, 1316 bp, Cannabis sativa
agaatatttggattggaatctgattgtagctccacattggacattgaagagttaagaatctcttgttttttctctctcttccttgagctcttgttcatgtttccttattccttttttctaatctctttgccttgtctttttgaacattacattcataaatctcacattggcttgttgatctgtgttttctgtgcaggaaaaattatagtcaaaggtagactatgtaaccacatggtctctcttagatagagaagatgcaatatgctcaagaaaaattaattatagaagaaagcaactactcttcaggttataatcttgcttaaatcactaactaatatatttctaagtagaaaaaactattatgaaagtatgtaacataatcatagttaaagtggttttaaatcttatagttgtatattttagttaacctattaatctatttttttcacttccaagtttgctttcatgtaaaatcaataaacatttgccttgaaaaaaattcttaaaagtagagattgctcaagtgttttctttctttaacaaatctaatgaggattgctaacaagaactataaaaacgcatgaatttccactcacagagccaataaaacctcttaactcctttacactctttatgaagtaatggaactctttgttcattatacaccctaagaaaacaccccccggaaacagaggttttggtaaccaaagatggaatcattttctaatttcatcattcttgaattctcattgacatcttacactcaaacttgtataacgcatatatatatcatcaaatcatacaaccagtagtagtgccattacttactttgttcctattcatctaatctatctaccaatcatttagctcaattcatttcacgatttaaagtaatctgaagtcaaaatcataaatgccatatctttagtattaccaagtctacagatcaaaatcatggttaataattatgaaaacagagagcaaaacaataaaaaagaaatgtttttcttttaagaatgttaaaagtgacaattgggaaagttcctagtaagcaaaccagtttatgagtttgtgagtgtcagccaccgtcccattgacgagagaggacccaaattagcgagcatctggtgttgggtattttttgagaagcatcttctcaacttctttcctccacaattcgctctctttgtctagaaatggaaagagaggagtgagtttcattgagtgggattagaagagaagaaaggcaagtgaagtgaagtgaagtgagtgagaatgagaatgcagttggcaactagtaggatttcatagcataa

SEQ ID NO: 48352 - DNA, 1963 bp, Cannabis sativa
agctacctcttcttcaagtggaacgcggtggaaaggagttgtattccatggtatccctatttgtataaacagttaccggccaataagcctaatatggactcatggactaaggatagtctgaaccacgtaaaaatgtcttatttattattttgttattttttccatctttattttccaaagctccaaaaatatttagttgtcgaaaaaatcggtaaatatttcggtgctttcattgataactgaggaaagaaacatgcatggtggtcaccagcgcaagcctgtaaaaagaagagctcgtgcaaagaaagaagaaggaaggccacctaacggcttgttagggtccgaccaaaggtcaggagggtcttagccaaaggtatcattaggaccgagggtctacgcccttagtcgcccgaagaaagagcagaagatgaacacacgcagcctagaaacactcaccatactcttgctcgcccctaaaaacccaaatctagccagccaactccctggcaaggtgaccgaccactggtgtcctcaagctcgtgttcctcgtcgtccactaaagtataactacgcaaacacaatgaggtgcaagaggttttggggtaggaaaaaaagctaagatctgatgcagttatgacgactaactcaggaagggtcgtcaggaataacgactctatccagctcaagactctggcactagtgttgacgcgagggctagatctattactgaggtctacttcccctgcctttgcactgggccgcatagttggttagaaattgatcatgtaatggtggcaactgagaagagaccatcaattctatcggcatctgctaggcctctaggcatgccatttttggaacagtttactcagaaggtttctatcgcctggtgtgactacaaccctagagttacatcaaagaaagtaacgcattccattaaaaaccggaatctctatcgaagtagcattcatcctactggggtctgagcctttacttcaaaagtcgttgactaccttgtaatccatcgtaagaaacagactgcccaagagatcttgggacacgtgcatgaatctcttagggcttcttggagctcgagagatgcatgcgcatcgctttttgtgtatgaaagatcactgggagtacaatatgtcctcaaccctccatttcaaaatagaaggactgcttgaagtctgccttttgatcttttgaagcaaagtctaagcttgaatttttttgcaactttagccttcctttggaaagtcaaagcttgctccataacatgactctcgcatgcgcaatgtttttcgtgcaagaaatataactaggggtatggcacgtcttcaaccctccttcccggaatggaaggactgcttgaagtctattttactccccatggtgctttctctttttgatcttttcaagcgatgtctacattcaaatttttatgcaacttcagccttccttcgccaaagctgaagcttgctccataagaattcaacatgactcttgcatgcgtgatgttttttgttcaagaaagatcattgggggtatggcacatcttcaaccctccttctcagaatggaaggactgtttgaagtctactttactcccatggtgctttctccttttgatcttttcaagcaaattataagcttcaatttttatgcaacttcagccttccttcacggaagccgaagcttgctccataaaaattcaacatgactctcgcgtgcacgatgtttttcgtgcaagaaagatcactggggatatggcacgtctttaacccttcttctcggaatgaaaggattgcttgaagtctgctttactccatgtggtgctttctctttttgatctttcaagcgaagcctaagcctgaatttttatgcaactacaccttccttcgtggaagccgaagcttgctccataaaaattcaacatgactcttgttggaaatattttacca

SEQ ID NO: 48353 - DNA, 1770 bp, Cannabis sativa
  modified_base (42)..(43): a, c, t, g, unknown or other
taaaattatataaaaatataaaataattattaatatatcatnnttcaataactataataatgagtgataataaattaaataatcaaatacttactatttatgtattttatgtattgtataataaattaaaaataatttagaatgtatgattatatgaaaataaattattatgtacatatattataataaaattatataatgtattaatgcaattaaatggcaaattatattatctaatattagtatgggacgtatatgtaataataaagaataggtgcttcaagggagcaccgccaatatcggtcaccatcaaagatgggagatatgccagccaatctcttatcattcctacactcttgactctcccttctcaccattaacgttattactcaaaactcttcatatatttcattaactatatacatgtaatatatatatacctacatacatatattcattaagtttctcttcacactcatattcatattataacattaattccttcatctgtcaatgacccaaagcccccagtaaaataatacagtgatttttgttaattaacagaaacagataccaaattgtttttgttgtttactttcaaaatcagaaaaaccatgatttttcagatagacatatcataaacacccaattaagtctcgatcggagtttgcccgccgccaccactggctgttgtcgcctctgtcacaggtttgccaattataaggattgatccagtttttaatatttaggtttagttttatgaatctattatatgattattataaaatttggtatttaaattgcttattgcttaccaaaaaaaagtgtttatataaaatagggggaaactcattcttgcattacataattctccatatagttttgttttttttatagatatgcattacatttatataatccaataaagaaaaaaagaagaaaaaaatgtttaaaatttttgtagcagaaatattcttacaggttttcacaatattaaagagcaccgaactaatgaaaatataatacatacaattatatcaaaatgttttatttaatttagtgtggaatggatgacttgagacatatgtgcatcaatacaccttgtattactagtgataattggcttattttagtgctcctctaattctatttctaactctaataaaaaaaaaagaataataaaatatgaaaatgaaaagtgtatttgaataataattgactcaatatttttatcgtttctaacgatttagaagtagttaaagatggcgccgaacctccttccagttccatacatatacctcagaattttcaatatatgccttcattaatataatcacataataaataaaagattttttttaatgtttttctttcaaatttgtcaacggtctccataaggaaaattaaaaagaaaaatacgaaacataagtaaatactttttaaaaacaatgttcacctggcattcatgatttaacaatattttttcttcatctttacctattgtaggaagatggtgttgaatgttaggtgaatgaaggttgtgaaacacatcgccgctgcctaggcaaatagctataggattcttttgaaggggttcttatgatctatcaagtgagtctctctcattattttggaaaaaaaaaaaaaagaaaattaattcaattaactacaaatttatgtcttttttataaaagaaaaattagcctgagcttttcttgattttagaatgcatatgaatttcaaggttcatatttatatcatatatatata

SEQ ID NO: 48354 - DNA, 1911 bp, Cannabis sativa
tatttaagatattatacaaaattttaaacaattcagaataatttataatataaaaagtaatgttcaagcaatttatttcacacgcgtataaatataatagtcacacgtgtaatagactgtttgaatcatatttttggcgtattaatttttttttgaatatcttaaaattttataggatgttttaaataactataacgtacataatcatgagaaacaaaaattaactaaaaaattatttcaaatattaagacaaataaaggtgcatcgatgcatcccttttaaaatgtgtattgtaaaattttcttattctttttacatatatatattttctaccatcagtagttacaaggactatttttttaggagaaaagtctctcaaccaccaaatatcaagagtagcaagcgctctaaaaaagtaagaacgagaatttattcaaacataatatctacactattcatggatacaactcagactttctggccaccaaatcatatttttactagtcgataaaactaatttaactaaagaatgaacaataacattacaagatctacaaaaataaaaaaaaataactaataactcagaacccttaacaatgaatatctattgtgctttactaaatattattgcatggaataattggaagaaaaaaaaaacaaagataaaaaaatatatattagataatgcttttgaattattctctatgaggcatggtacaaatgattgcaatctctttcatcaagacaaaaacattcttctcaaaaaacaaaacacattatattttattaaatactttctgtaacaacacatgagttaggaaaataaaagttgtcatatagtataaaaacagctgggtactagttgttcaaaattagtgctgtaagtttcctttcgtgttcgtgacgtactacaaaaaaaaaatatggaccgtatcgtatcatgacaatatttttaaaggataggcttgatacgacttgtaggttcattatttttatgttgtgctcgaattcctatcgtgctttactcatgatgacatgtatttcttaagtaggtcaacctatttttatattcgagattaacttcatgcttcacttttttttttaataattattaaattatatgtatatttcaaagctttacttatatttatataatttttgaacaatattttacagataattatatataaaaaaaattattaatattattaaaatttgaatatttacttataaatacttaaatttttaaatcacagtctataaataaattgatatataattttaatttttaattttttaataattttaattatgaaattataataatcagaattatatttaaattttgttatttttttaacttatttataattgataaattcatatctcattatattattattattataaataaattataagtttttttaatatatcatgtcgtgcttttcgagcttgtcgcgtattttattttttggactagtttattcgtgcttacttctcgtatctttcgtgcttaattaattaagaatatattttttgtgttctgtcatgccaatttgtagtatcgtgtcatgtcgtgctacaaacctatattttctcgtgcttgtatcaatttcgtgtcaggtcaaaaatttcgacctatatttacagcactatttaaaattatttttctcaagtgatatattataagattagctgtctatcagtcacataagctatgtgattcttgccaatgctggaattgaaaactattttggtgaattttgataactttttcggcaccaatgacaaataaaattgcttaaataaataaaaatattaaatatgggctttgaaaacttaatttacatatatatgacatatcaaataccataaaaatatctaaaacagaaaaatatcatataaatt

SEQ ID NO: 48355 - DNA, 1760 bp, Cannabis sativa
tggggaatgactctttggatgacgaaaatggtttggcttgctttgagtggttgggtttcttcctgcctcatcgtagctgatgagatcgctacctctttccgaactggtgatattagtccttttcatgttggctgaagattatataatacttactactattccaatattcaccgaccccaaactctggttcgtctcttcacaatctattttttgttgcaatttcattgacaacccttttaagtataattaagcttaatgattatttgattatttgctgtgatgggtctgtggaaaatgttttgtcatttgatgatttgagggttgaattcttttagcgtatttaattttaatttatgttttagttgttcctacttttccgcagagcaaaacgattatagaaagtatatgtttcatttttatgtgatttttgctgactgattgcccaatattttgtgcaattcttctaccagattgtaatgctgaatactgatttttttccagatgaatatcatttattgaaatagaacacaattgtaatgttgacatgtatggttgtgtgtttttgctgtatcaaacaatgtttggatattttagctggaaagaagagtaattagactggtccttaactgatcttatttccgaaataaactttgctaccttaatgtaattgattttttgtcttagtctttggttggagctttcataagattctaggtgctgacttatttttaaggttcttggctttctagtttatctaagctgcaatctttggtgtatatagtcagtgagggaaccagaattaaaacatagaagggtttctacataaaagatgtatgtacaaaatatagaaatatataaaaagaaactcttgattttagaagggccatatacatttttacataatttaagtccctcttagctccgtcattgtatataatccgtatcttcatatcacttatttcttggtagacgatttgactaggatcccagtgaggtccataatctggttggaacttggaagtcaggcttatagtatgctagttatagaaattttagaagcttgaagactaagtaaatctgttgcaatagtaagtatttgaagtttgaagacaaaaaagactagacgcaactaatatgtgcctaaatcttaattttaaaaagaaccagggattggatatattctactatgaccatactatatttcagctgatattttagtaatgtttgaagttatgggaaaattgtatttgcaagtcttgggaaattttattcacataattttctgaattacgatgcaagacatgattcttcatcgatgatattctttataatgttttgcttgctctaatcatttagtttcataaattggtatcttgtattctttcagcatgacaggccctatggctagtgttcaaagaaaattctggcttgtggctttacggcactagcatattttttagcatttgcacgcaagaatagggggtccttaagctgctcaaaaaattgagttccagttcaaaggagcgacaccattagggtgacgactcaaattattagtttcaataataccccactctgattcttctttcaattgatattattatcaacaagtagtttctgtttttttttttttttctctttttgagatcacagtaggtacttgctgaatcttgtaacttggtgtatgtgcaaaatgcaatgtcaattacttaaagattgagtgtggttatatatccatttcaagagtacgtactaatgtt

SEQ ID NO: 48356 - DNA, 1501 bp, Cannabis sativa
  modified_base (1227)..(1227): a, c, t, g, unknown or other
  modified_base (1350)..(1364): a, c, t, g, unknown or other
ttagatatttcatgaatgattatagcatattgatattgatatattgtattattggtatttttatacgtataggtcttgtacacttatataatataatatatttaaatgtattggtgggacttgacatggaacacccctccacgtgtatatagaattagaatatagattattaattgtgctacaattattatattacttgcaagcaaaaaactctcatggagacgagcttctggctctccgactggatcttgtgtgggctaataggttggggtttactatagtgcgtgtggaaacggattcttcagttgttagttcttagattaattgtccgaataatatttttatgtttaagctaactgttgaggagattatttctcttttagcggttgttggtggtggttcttgttgtgccattttgcgtgatgcgaatggttcatgcactaactaagtctgttactaatcctttaaaggttcggacagatgcttgtctacaattgaaactacataattaaagtgtcaaattcttgttacaacaataaatattaacagctaaacatctagttatgaactattatatatattgacaaaaatcaaacattacttagaaaaacaacacatgattaattaagaacatgcaacaaaatagagatttcaactagtattaatgagaattgattaccaaagaaagaatctattttcactgatcacccactttggattcaaatttaactctcttccaagtttcaaaagccacttcgttcacaaaaaaaaaaaaaaaaaggtttcaaaggccacttattatttgaataattctcatataccttttttcccttacaaagatttttatttttctttgcatgaatgggagtcacttgaataatttatatgcaagattacatatatctaaatacatataaaaaaaaaaacattgcaagaaggtaccagtaccttatctcttaatcaagtcacgtcttataattgattaataatattttataaaaattaatacattaataattaattaaaaaataactaaaatactagaatatattgtagttatacatttagatatattatatcaatacataaatatagtgtacaagaagtttatataaactaaatttaatggttataaaccattaatcgtaaaaagtcactataaaatatttcacttttagtcacaacaaaacttgtgattaaaagtaaaaaaagttgtgactaattatnaattattatttttatgttgtaattaaaagatccgtaactaacggtattagtcacaaaaattacaatttattgcgactaaatatattttgtcaccatatatgttgtgattaaaactaaattagnnnnnnnnnnnnnnnaaatactatattttagtcacaagtgatattttgttgtgactaaaaattatattcagtcaaaaaaaaaaattatatagcaactaaaaaattgacacttagcaattttttgtaatgagtggagtcttaaattcaaagtt

SEQ ID NO: 48357 - DNA, 2266 bp, Cannabis sativa
taaaaaataaactactcagtattataaagaactcggtaaacaaaaaaactactaaaaaatacagtgttaaacaacctacattaacaaaaaaaaaatccaaaaaactattttaacatataaaatattcactataaagctacacatagatctctaaacaaaacacaaacaacatgtgaacaacttagtataccaaacaactatgtatacaaaaaaacaactaacatataaatgtgcatccacattaacaagaatcaaataaaaaaaatacacgattcagtataaacaaccagtatactaatcttcaattttttttttggcaacataataggggcttcatcacattctgaatcaaaatcatcaaaatcttcaacaacactctttaacttcttagagcgccgatcgtcaaaggaagcctcagaaacaccactcctcttcgaaatggacacattcttatttttcttctccttatcagactcaacaaccttcgaaccagatccaaccattttttttttgcaacttcctctattttttccaccttcttcttcgaaccagacacctccggtgatggagacattgaactcctagtacgcaccataaacgctttaacacttaaacgaaatgggaaaccttaggagagagaaacctaatactttgctgaaatgagggaaaataagaaaatggaagaaaaaacaaaaaagagaaatggaagtgattgagtgagtgatggcttgacagagaaaattagaacgtggaatcgtgtttaacactcaacccactctcaaaaacaataaccgtgtacacatgtaaaaaaaaatcgttactttttaccaaataaaaatatattcggtatatacagtatataattacaaaaagtgtcccacagcataatttttctcttttttttatatatttaacgcagtgaaattaagtttcaaacaatctattgcatgcatgcttctttattttatacccatgtaaaataaattatttgaaccatgccttttattagatattttaaataactacaatatacatcattaatcttaaaaaaaaatgaataacagaactttaattttttatgtaaaaaaatatatagtatttaaatgatataaaaaagaaatataggaatttaatctaagaggaagaaaaatacaaatttgaatcaccttatagtagtgtagaaatacgaacttaaaaagtagaatttattagtatttaattttaatgaattagtaaagaaatggttattttacaatttttttttttttttttttgcaaaattaaaattaaaacttattttcttttcaccctattattacccaaatttttcatcataggatgaaatagctataacaaattacattttgtggaggtttaatgttatgaatttgattataaagtgtattatagaaaatttacagatgaaaattttgaagaaaaaaaattacaaaaatgcgttaacacacaaaaaaaaatatatatttacgccttgaattttattatatacaaaaatacattttcaataaaaatagtaaattgtttttttcttttttttattagtgtatgtataaaaaaaataaaaaatatgttaacacaaaaaaaaaaattatatttacgccttgaactttatgatttacaaaaatacatttttaataaaaaataataaattgtttttttcttttattattaatgtatttatagttgtcatgactcatgagcttgtttttgtagttgtcgtttggttgttttatagttaatttataattaccgcaaaattaatttctctctttagttaattttttactttttgttaaaaaaaatatatttttgtaatccaaaacttcacaaacatatttatataaacaaaaactttagttcataaaattgtaaatagaacataaaaaagaatatttttaaaaaattccccaacattatatttttgagcaatggagtttaacttattttgttttaaatcaaaaagaaaaaaaaaatacattctattatttgatgtattttgacatctaatattaaaaattgtttgatcaatctaatggtgatagatattagtgaaagtagaattgaatgatctttattattgaactaatgatattagtgagctgaatacaggatcagcaaccaactatttttttttttttatttaagcgtttatatattacaatcatgcataacttgagactcgaacccaggacctccaacacacacgcactctcctaaccacttaagctagtctcaagtgatttgatca

SEQ ID NO: 48358 - DNA, 3674 bp, Cannabis sativa
  modified_base (2084)..(2102): a, c, t, g, unknown or other
tgggggaagacaagaagcttctagtcatagtgtcagcttcactttttgatgtggagactgacaagctgctaagagtactccgcactccaccaatgaatgaggtcgtcaaaaaggaagtggtcaagtagttaaatgctggggtggcttacccaatttcagacagtaagtggatttgcccagtgcatatagtgcataagaaaggagggatgacagtgataaaaaaatgaaaaaaaaaatgaattgatccctacaagaatggttactggttggcgaatctacattgactacatgaagcttaataaggaaacaaggaaagatcattttcctttgccattgattgagcagacgttagattggttagctggacaagagtactattgtttcctagatggctactctagttaccatcaaatagccatagcattggaagatcaagagaagacaaccattacatgtccatatgggactttcactttcaggagaatgccatttgaactatgtactggtccaacaacatttcagaggtgtatgatggcgatcttttcagacttgattgagacctgtttagagatctttatggatgatttctcaatgttcggttcttcatttaacaattgtttcaagaacttggagaaagtgctaatcaaatgtgaggagtcaaacttggtactcaactgggaaaagtgccatttcatggtaacagagggaattgtttaggggcacaagatttcgaaggtaggcatcgaggtggatagagccaaagtgtctacaatttagactctaccccctctagtttctgtaaaaggagtaaggagctttctgggccatgggttttaccaaagatttatcaaggaattctcaaagatctccaaaccactctccaatatgcttgttaacggggtaccttttgagtttggagaggaatgcttgaaggccttccaagctcttaaggaaaaatggatgtcggcacctatagtgacttcaccaaattgggagttgtcgtttgaattgatgtgtgatacaagtgactacgccatcggagttgtcttgggataaggagttgacagggtgtttcatgccatctactatgctagtagaacactgaatcatgctcagctaaactatgccgccacagaaaaagaaatgctagcaattgtgttcgcgtgtgacgtgttctggccatacctgattgggaataaagtgattgtttatacggatcactctccaataaagtaccttatgaccaagaaggatgcaaagctaagattgatacagtgggtgcctctacttcaagaattcgacattgagataaaagacaaaaaaggaactgaaaccttgttgttgatcatttgtcaagacttgcattagaagagagccaaaacgcaaagaaggtgcagatacatgaagagtttcccaatgagtaactctttagtttgagggaaagcttgatggtgccttggttcgcagactatgtcaacttcttggatgcaaatgttacaccccctgagatgtctcgtcaacagttgaaaaaattcatttcagacgtgaagcactactattgggaagagtcgattctttacgaacattgtgctgataagataataagaagatgtgcgcatgaagaagagatgtattctgtcttgaaccactgccatgccttacaatgtgaggggcatttcagtggcacaagaactgctgctaaggttcttcaaagcgagttctattggcctactctttttaaagatgcaaatgattttttgaaggcatgtgatcgttgtcagagaacggtgtatatttctagaagaaacgaaatgcctttgataggtatcttggaggtggagttgtttgatgtctgggggatacatttcacgggtccttttccgtcttccttcaacaatctgtatatcttattggttgtggactatgtatcaaaatgggtgaaagctgctgcaacataagccaatgatggtaagacagttttgtctttccttcaaaagtacatcttcactcagtttggaactcctgagcaatcattagcaatgaatggagtcattttttttaataaacagtttgaagctctgctnnnnnnnnnnnnnnnnnnncataggacttctctaccttaccattcacaaagcaatggccaagtcgagattcccaattgggaaattaagctcatattggagaaaatagtgcaaagattgaggaaggattggtcaaggaaactagatgatgcattgtgggcttatagaacagcattcaaaacacctatcgaaatgtgaccgtataggttcttgtatggaaaagcctctcatcttccggtggagtttgagcataaggcctatagggcaatgaagaccctgaacatggatttagcagctgcaggagagaagagactgttacaattagatgagatggaagaattcagaaattaagcatatgagaatgcaaagatatacaaggaaagggcatgatagaaatctggttaagaagaaatttcaacctgagcagcatgtcttactttttaactcaaggttgaaactttttcctggcaaattgaagtcaagatggtcgggaccgtttaaggtggtcaaggtattcccatatggagcggtggaactgaaaggtgagagtctaaaaacttttaaagttaatggacaacggttaaagctctacttgggaggtcaaattgaccaagctaagtccgccatcatattggcgtctctttgaaaggaaactcagcgtctggctataagacaataaagacagcgctcttgggaggcaacccaagtgatttaggtactttgatgtttttttgtcgagacttttgtttatttgtttattttttttagcattttaatgttttgtaaactttcagacatttattttaagttaaaccgtgcaaagcgtgaaaagttgaaaaaagaaaaaaaaaataatttttttctggccatcacccagtggtcacaaccaccttgttcaatggtggcgaccatggtcgcgacttgggatttatagaaaacccataaaaattatgaacgtcagttgtcgcggccagattgcttcatggtcgtgtgactacgggtcttacagagagccttgaaatcgcacattgatccatggtcacgactaggccattatgtggtcgtgactagggatctttatgaaaccctaaattgcctttaaaaagcctcatttcaaacctaaaacctattctaatccttcaatcactcttctaaactctctcagccgaccctacaccctttctccaccaaatatttcaaattttctcatttcatctcaattcctcatcaaaatcccattctaatatcatcttcatacccaaaatcaatcactctattcatcctcaagcttttcaagccattcaacaatggaggtgcattgaaaattcattcaaatagtaagctctatttcttcatcaatgctacattgtttgtttaagtgaatagagggtaatgtgattgggtattgatcaatattttgagtgggattgttgatttctatagaaattgtcgagactatttgcggattattagtgatattgtgtttattgtggattttgattgttcttgaaatattggggagttattttggtgatttgggtaatttttgaatattgtggtgtgaattttggtaagatagaaattgaagaaatt

SEQ ID NO: 48359 - DNA, 859 bp, Cannabis sativa
cccccctccgcgccctcaccccccgtaaggcagcggtgaaaataaataagttacgtacagtcatccaaaattataacaaacacacatactaatatagctagagggtgtcaacaacaaaatatatggtagtgggaaagaggagatcaactcaacaaccgcccccaaggccggttgaagtaggttctccatttagcaacccactgaactgcttcaagaccgaaagagttgaaatcagtgttaggattggtacaccaaacattgtacagagttgtcggtctaccacagcaccatcgtgctcaactaacgtttggctagccgccttcagctcttccctcaattctcgaacgcgagattgaagttcgcctacttggtgctcgaggttcttcttgttcttgcgagcgctcttaagccgacacattgctttgtccttctcggtcccagctgcagcaagctgtgcgcagttgtcaacaagttgggaacaggtgtcgtcttgctccctcgtgactttgtcaagggacagattgaatgtcaccttatagtcaccatagacaacaaggtctgcgactgcttgctcttgggcctcctttgctgttgtgagtttaccctctaattcttagatgcagacatcgtgggaggccactagggtggattgccggtccctttcacctttgataaattctaactcacccaggggtgtgtgataggttgaggaaatccccaaggcccaaccttgtgagagcacctcttgagacgcggtgaccatctgcatgaagaatgattaaacaaaagagaaaaaagataacaaaggaaaagatggaagaaagaaaactcacccaaacagaggagcggaagagttgct

SEQ ID NO: 48360 - DNA, 2765 bp, Cannabis sativa
gaattcttatttaggatgttaattcaacatacttcttagtaaatttagatcctggtaaaatattcccaacaaatagttcaagtgaatgaattggtatttccagcaaatttctatgttttagatatggaagatgattccattcgctaatccgctctaattttgttgggaagaccattcatgaaaactgcatgaaccaagattgatgtccacgaaggaaccttgactatgaaattcgatggagagacaatcaaattcaacatttttgaggccatgaggtatccaagtgatgtccatgttatttattctcttgatgtgttggatgacctctcccaaagggtattagatctacataatgaagattgtcttaaggttgctatacaagagtactttgtgttaaattctggtgaagacttttctgaagagatgatggatgtcataacaacatataataacgacttcaacaagatttataagaaggtggcaaatctggtattgccaatcttaactgacaaattacaagaatccattatacaagctcctaaacatgaattgaagacactgcccaatcatcttaaatatgcttacttgggcaagaatgaagcattactagtcacaattgctaaagaactcaaccaagagcataaagaaaagttgataagggtgcttcgagctcatagagctgctattgcatggtccattgctgacatcatgggaattagtcctactacatgtatgcacaaaattttcctagaagaaggaggtaacccaacacgtgatgcacagcgaaggataaacccccctatgatggaggtagtgaagaaattttaaagcttcttaatgtgggcattatttacccaatctcagacatcaaatgtgtgaccccttttcaggtggtccaaagaaatcagggatcacggtagtgaaaaatgaagacagtgagctagtgccagcaagaatgcaaaccgggtggcaagtctgcataaataactgcaagctaaatggtgagacaagaaaagatcactttctatttccattcattaatcaaatgcttgaaaggctatcaggtcatccttattattgctttcttgatggctatttaggttataatcatattgctattgctccagaagatcaagagaagacaacctttacatgcccttttggtacatttgctttccgacgcatgtcatttgggttatgtaatgctcctactacttttcagcgttgttatgatgagcatcttttcagactacattgaaaacatcatcaaagtcttcatggatgattttagtgcttatggtgattcattcgactagtgcctgcataatctcactcttattcgtcagcgttgtattgaagccaaccttgtgcttaattgggaaaaatgtcattttatggtaaatcaaagcatagtaataggacatgtgatttaagagaaaagaataaaagttggcaaggctaagattaattttattcgctccctacctccactaacaacaacaaaagtagtcagattgtttcttgggcatacaggcttttgtaggagattcatcaaagatttctacaccattgtgccatcctcttcaaaaggatgtcaagtttgattttcaatgagaattgcttggtggatttcaacttttcaaaagaatctttgacttcatctcctattattcaaccatccaactaggagcttccatttgaacttatgtgtgatgcaagtgactatgctatgggggttgttcttcgacaatgagttgataagctgcctcatgtgatttactatgcttcctggactttcaatgatgcacaactcaactattctaccaccgagaaagaacttttggcaatgatttttgatctggtgaaatttcggtcctacttgattggaactaaagtcattgtctatacgaatcatgtaactcttcggtatctactggcaaagaaagaagctaagcctcacttgattcgatggatcctaatacttcaagagtttgatttggagattaaggataagaagggttctgagaatctggtggtggatcatttgagtcgtctcattaactcagtcatagaagaaagatttcacaatgagcaactcctagccctcaagagatgatttcttagtatgccgatattgtcaactaccttacttcaaaagtttttccaagtgatttcacaccagcgcagcaaaataaacttgagagcgaggctcgtcattacatatgggatgaaccttatctttggaagcattgtgtagaccaaagtatctgaagatgtcctcctgattctgacatccggtctatcattgcttcctgtcatgcacatgcttgtgggggtcattttggacaaaacagaacagccatgaagatatttgacagtggattctattggcccaccatctttaaagatttatatgcctactgtaaagcttgtgatcggtgtcaacgagtgggcaacataatagccagagatcaaatgccacaaaatcctattcttattattgaaatctttgatgtttgaagaattgattttatgggaccattcttgtaatgccggtatttgaaatactaaatttacaaactaactttaatatatatcataattattttaataacaaagtccgggatacaaaaccactctaagagatttttttttataaccataacctcgcaactcaaaatacatcttaaaatattgaaagatcaaaaccctccgggttgcactgccgcgatatgtataatctctgccgagctctatctcactgt

SEQ ID NO: 48361 - DNA, 1195 bp, Cannabis sativa
ttatgttagtagtttggtatgatatattttttttagtcattgatatccttttatttttcttattaaataattgggtttggatcgcatcatgaatccaaggcatgtcgttagacacttagtcatatccttttgctcaagcctcaatttactccaaaccatgtttatcttgtttcagctgttttgccctctttgctatcaaagcccttgaattttcacttgttttgttttaaaattctttaagagatataattatatatgcctataaataaattatgacattaattcatcaaacaaaaattagtattgaaaaatgcaaatagtacagggtgacaaaaaaatccatttaatggaagcaaaagagaaaacactaaatatactgacctagcactgatggtttaggatattctgtcattcaagtgatgggcttgagatactcaatttcgcacaatgtatacatttattgacagacataaagttcataaatttttcattctagtctaatttctttatggaggagtgctaggggtatatatgcagttgtatctctcttgctcttttttttttttttaaattgtggtgcgtaataggagaaattacgtttttaatttttttgagtactgggatgtaatctaaccatagttattgtgcttctccaattttatgaagtgaaaatggtagactgattcaaaggtcttctatgccctttttgcttaagaaagttataatattattttttcagtgttgtaacttgtaattagttagatagtgttggtattagtagtcaggatatgtaatatgttggaattttcagttgaaaggtgttattctttctatcttctggaagtgtgtggtgctgcctgtaaacttaattaatacaaacaaatgcacttggtgggcggaggtagtgtttgcacatttatctcttactggaatttttgtgaacttttgctcttttacatggaagtaagaaatgcaagaacattgtaattaagagtttcctttgttacatttaagggtgttatgctacttatggaccttcatctctgactattgacatttctacgttttctgtttctgtattagaatgctgtatgactatatgtttcttcacttttatctgtaacttaaacctttcatgattattctcgtacatgtttattctcactctgagtgacatttttccttttttgtaaag

SEQ ID NO: 48362 - DNA, 1292 bp, Cannabis sativa
ttttttttaaaaaaaatttaacatttccttttaaatatttttttaattttttaatatgttatgaaatttttgtttaatactaaaatttgagaatttagccctctttacatttaattatagctctggtcatatctgtgtatgtcatatcttatttgactgtcttcaatatttggtgttagatgtttggcctgtttttgacccgcatttaattatctcaatcctatgccgacagtaaaaaattgtattgtgtctatgttaatctgttttactattattgaaggtggaatgtagagaaaaaaataatttatatatacctatgtatatattggaatataattgagaaaaactaagaagtaaatataattgtaaaattaataagaatagtttaagatatataaataaaaaataagatatattaatattattttttatagaaaaaaattcaaaacatataatatttttgaaatagttgatgataatatttttcttttaattcaaaaaaacttatacgtgatatagttttttttttaaaattcaaaaattcaaaacataaatacaaattaatacaagatttttttggaatagaatatgaactaggtgatatgtttaaaattaaaaaaatatatatatttatttagtagcttgactataaataaagtaaaaaaaaaaaagagtaaagactataatttaaggataaatttcagttttaataattttgttagtgaagaggttatacccttttgtcagtaacttttttatttattaattaatataaattataaaaaggaaagaaaaaaaatgagaatttatgtaatttagttagagatattttttaatttttaatttatttattaattagacctggcccatttattaattcgtgagtagccaaacccacataattagattagcatcctgtaaatcttaatataccagtaaaaattagttaacatttacattccaaatatgtgatcactactacaaaattcactattcacgtcggtcaacgcgactgttcattgcgttgaccgacgtgaatagtaccatattcaatatattcgtcatttttaaaatgtcacatgtaagctttaacaatggtgaagatgaaagaaaatacagagtgtatagcagagcaattggcatagcctttgaacacaacagattaccaagaaaagcttaaccaaagtggttagcttgagaccatttatttatactgtcatgaagtacaatacagaagggaaaataacagaaaaactacttgcataactaatttgtaactaactaaactaact

SEQ ID NO: 48363 - DNA, 1553 bp, Cannabis sativa
tattattgaaaacatagggtaccaaatatatatatttttttttatgaaaatacaaagtactaaataaatatattcccttaatataatttattatcgacagggctgacctgaaatcttgtgggtcataggaaaaaaatatttttcgactcttatttaaaaaaaatatagtatttttcaaaattaataaaaaaatgtgtaatttaaaaaaaattgagccactaagttaaataaattctaaatataaatctaactttcgtatatctagaaccgaacctaattattagtactacatatttcagttaaataaataatatcaaaaatcactaactattaataccaatgctcttttaattattaagtgttttttgttattgatcatagtgttaatgattaggtattatattaatattattattcatcaataaaaacttaaacttaggaagatagtgagtgaggagcacatgagttgtcccttcttcatgttcatgataacaattattattattttaatttcaaaagttgaactttggtaaaatcccttctctttattaatatctcttctaaaaaaatcaataataaatttaataattaataattattattttctaaaataaaaaactatacaatagaacagccattttggttcaaacaaatcaattaataattctttcaaaatagtaaccgtcaacctcatattacaatttacaatctcttaataactttctgtactcaattttttttttttaaatttttaaataatttacaatacaaaaaatatatttagagttttttgaacacacatagtaaattagaatattatgaactctatttttgatactattcaaaacttaacatatataatattacaattataacgaataccaatacaagaaaaaaaaaatattctaacacgaaatttctaattttgactaaaaaattataattatcactaatcttaataaaaataaaaataaaaacatttaataattaatagtaaaaagggtccaccgtcactctcaaaaaaataaataataaaaaaaagaaactctctttcgaagaaacttccaaagactatttttctaagctttgcttaagcatagtgcttaactcccccaatttcttatgccggccaaactcatttttcttttctctttcaaatccaaatcaaatttgattcaaaaaataataaagtttcaatctttttggatccaaattaaatctcaacaaaccccattttcagttttgaagaagaagaagaagaagattaatcagtgttgggatcaaatctgaatccaattcagtttctgggtattttcttaatcttcaaaaaaactcaacttggattccattttgatctctaattctcattgggacattctttactttcttccattttcatataaaaaggtaatctttttttctcttctcttaatttgctttttccatttttgcttagcttttctactttttatttatttatatatatttataaaataaaagtcagtgaatagcattttttttttgaaggagtgaatagcatttattaacttgct

SEQ ID NO: 48364 - DNA, 1298 bp, Cannabis sativa
tttttggaagcatttgtatttagatgccaggagcatagacagtgtgtaacatctgacatgtattccatgatagcttgtttcatggtcacatcttagtcagtaactataacatttagcttcttatgtccatgacatttaagaaatttttttaagtagctaggaataggacgccaacttctcgtgtaggaggagagcaaacccaaagatgcatgtgttgaaatggtggttgacaccagaggcttattgtactcatttgtcatgtaggttgtatcaaaccctagtgcatccccaaaagccacatagtccatacgtgagtttccatctgccaaaaataagttagccaatcagttgtcctcgtccacctgatagacaacgaagaaatttagatccttcttcgagaaacaatcaagaaatccaaatgccccttttgagtctgtctctaccttttcttctcgcttggcatcgtcaatcctattgtacacatctcggagttgacatggcactctctcataaccaccactttgcaaagcaacatgagacatgttggcggttttaattcctaccgagttcatagacttaacttgggcgagcaagtcatcaaacacatctcaatatgatctcaagaattgtacctcacttgatgaagccagctcgtgattgtgtattatgttgaactctttgcatttccaagtgttatatgatcttgagagtaaaatacgcaatgctgcttgacatctagttctagttagatcatgaggtcatttttttttctttctctgtctggtgatgtgattttttttaaccttcagaacaacaaacccacctgtgcattacaatgaccccatgagcacatcaaatatcatcttttcttgtgcaaaaacatatcctttttgcgtacatctcgtgaaaaggctttatttttccagtttgtcaagactgttgcctaacacgttagatatttcaatatcattaactggttttgtgatgtttagctctgttgctatgctttcccattcgcaaatttctttatctgttgattcctcattcatgtgttgtattggagagttctcattcatattctatgtcggttataacaatttaaataacacaaattatttttgagtgtacattagagaataaatttggaaataataccttcttggaaaaaaaaatattatctacttcaacacattcgttcaatgattaccgaaaagcaagatgcaccgtgttgatataggtagtatcaatcaatccatttaagctctcttcaactatgtagtccaatacctacacagtct

SEQ ID NO: 48365 - DNA, 715 bp, Cannabis sativa
tattgtttttctaacataccattcattaatacgctgcaaaccagcaatggagaacttgttccaatatgtggcatctttcttgcacatttcaaagaaatcagcaatcttgttgcttgattcatctccattgtttggatcaatgtggaaacccgaaactccatcgacaatgatctcagccggtcctccttgattggtggcgaaagtaggcaatccacagttcattgcttcaatgacagtaagcccaaatgcttcatacaatgcaggctgcacaaatgcaccttttgtgtctgcaatacatctgtagagttcaccatttcggttcctatcggtttgagctgctatccatctgatctggcccttgagttgatacttttctatcagtgaatgcattttccttatctcagccatttcttctctatcttttgattttgtagggtcaaagaagcctccaactataacaaggttgaccaaatttctcagccttgtgtttttcccataccactcagtcaatccagttatgttcttaacagtatcaaatctagccattgagaaaatgataggcttcttcttgtctgcaagatatccactatttgacaacacaaaaggtcaaatgaatcaataaatagaagaaaacaaaggttgagaaagagagacttctatctcttttatcttacatgtgttcattgttgtcctctttagtgaaaagtagctcctc

SEQ ID NO: 48366 - DNA, 1210 bp, Cannabis sativa
aaaaagaaaaaatacgcccgaatttcttctttcacatctctacggacttcacgcaagcttagcccattgagttgcataacatgctaaaacgttagggtggcaaggaccaaagagagaaaaatgtctaagtctaaggcatttgcagacatcactcctggaactcagccttatgagaaaaccaaagcctaaagaggatgcgtgaaatttcaaaatatcttttttcacataaagaggccatctcctggttaattctgaacaagtaaccttctgagtggcgagccaaaaagcatcacctgggaaagaaaatgttaaatcaaaaagcagttcctgaattgatcgagagataattaagactaaaaggaaaaggttgaaacactggttgttggaaccaggtgcttcaatgacacaaccagctcctaaaaagtctaacacaccaaatctccaatattaatatcgagataaatgactattttatattcattgaatctagacaatattaattaggtgatgttctatttcgatattcattacctaatttgatttcctgaattaatcattaaaatattctgacaattaatatgacgcaaatactaatagagtatctcacctataaatatatggactcggtcctcgagctcttcactcatattgtgcaaatagtaaaattccatctaaaaagagttgagagagcgagaaagcctaaattctcatatcgaagctatcgtagggattgaagctcaaacattaattgttggaggtatttcagtccttttatcgcatatacaattttaatatgtctgtagttattccgcattacatatcgttcatatatgctttatttttattttatatattatagtctaacattttctacattttagtttcttcataactataaaattgtaaaaggtaataataaaaaattataaaaggtgttcttaaatttattaaattgtcaataaaaacttgtaatgagacatcttctcaacaataaagttaggggtatttattagaccacatccaatatttttaagtctatccagattcgatccaattatatgttggatgttagattttaccattcgatccgatccaactaatgtcaatcatccaatcaatccaacatctattggatgttggattagatcagtactatatatttattggttcaatttagatttatctaatatttcagacctatttttttttt

SEQ ID NO: 48367 - DNA, 1528 bp, Cannabis sativa
tccaagacacacacccatctatgggaactatctagcatacaaaaccaaatgaggcaaagaggatgtcaatttttttttatttttttttttaaactttaaactattcaatatatataatatacacatatgtgtatatgtgggacatgtttgatggtctttttacatatattgaacttgatatagacacaaaagaagttaacatacaacccattctatttttatttttattttttttaacagacaaaagattaatgaaagtattattaaattagtgatcctctgatgaaaatcagataagaaggtgatcatgtgtattaaaaatagaaaagtttgatcaacagtacacacatatgtttttgtcagataaacttgaagaatttcctctatattttctgttctgtgtcattagttataatttgagaaattatctatttatacacatattatataagtacatattttatggtatatcaaattgcaagtggtggaacaaacaagagacatataattttagagatattaataattaatggtaattaaaattgtaaatgtagtagttaaattaaatcccagtttggatattgaggacaatcaaaacaatgacataacaactatgaaattgtatatagttaaagtgagagatcagacaaattattttataaatcattacattactaaccgataataattatgaaaatctgttaagaactcacctttcttacttaacaaaaaaaattagcattaagtgcataaatagtagtaaatacaaattaaattaaatggattaggcagataattgggtagtttagtggtttttaattatgtagctaataataaaaatgatgatatgtttggaatgtttgagaggagcatgtgacttgagctttactccaaattatttattggtttaaaagtaacatacccacttagtgtgatatttatttaattgggggcatgacttagtttgctttgaaagttgataataaaaacttttacaaactatgataatattattattaattattattgcatacatattaattatatatatatattataatataatataagccatagctttccaacgttgcttctcctttccacttcaaccccacaaataaaacaaatgtgactatttatttaccgaaacaaaaatgtggctataatttggttggaatttatattactttattaaatttcttcgaatcgaagattccaaagttgagaataataataataataataataatattggtttattaatatttttatcctttgaattttaacatgtataaattatgttcctaaacttgtaaagtcgttaaaaatcttccttgaactattaaaattgttaaatttaaatttttttttctaattatagcaaagaaagtctaatatgaatgaaagttcagtgacttgatttggtacatgtcaaagttcgagagacttagtacatgatttggtagataacaaagtccaaataacatgatttagtacataggcaatcacaaaattagtaaaattaaat

SEQ ID NO: 48368 - DNA, 1894 bp, Cannabis sativa
taaaagaaagtggaaaagggaaaagaaggaatctcaaggcaacgtttcttgtagaagtaaaggaaaaaaagaaaaatatatataagaaagttataaatgaagggttgaatattaggtgaaagaaatatttaagtattttatgtggctttttgaatttggtagagctttcaaattaaaagaagtaattctttttcttttcttttttttttttttttttttggtcaaaaacatgcatgtttttaatgatagtgctccaatggtcctttatttcatttctcaaaaagcattttttttttctctaaaaccaaaccaaaactctctatctatgtctctcacacacacaagtgatggacttttgcggcttaagatggccctctcttcatcacatcgtcacctttttttttttggaatattaataaaatgaatatttggagtaaagaacttcaattcatcaagacatgtctccttttctctctctctctctcaaaacttcttgattaaaaaattagtttgtttcctctaaatttgttgacccgtgtcattccattcaaaatgttgtctttttcttttagaattgatatagtgcactttaacgatgtctattactattttgaagaaatccaatcttgagattgggtggacatttggaaaaaaaaaaatactgtttattaaaaaattgtgtggtaatttaaaaaacccattaaaaaaatgtatattttaaaaatgaaaatatttttttgactcctcaattgagtgggtactgaggcagaagttaacattaaggggtcaagaaataaaaaaagaaattaaggggagccaaatacataagtttttttttttaaaaaaaaaaattaatttaaaattgtgttataaattttttttgtccaaaattttgagaggagttggagttaaagtggctccgtccttggttctaggaagagagtctaaactcatgccctgcacgaagtaacaacagactttattaaatataatttaatattagatattatattttttttaataaaaatatcatatattttgatttaataattataaattttttaatatatttatatatagtagtattaagtattaaccattattgatactaataactaatggtaatttattttttcctctataaagaatgtgcataaatattattatatattagctagctagggtacaaatatgtttggattataaatcagtgcgcgcatgtgatcatagtacgtatctaaatattccattcgaaataatttgatgttatacaataagataatttaaattagcgtaagtggagatcataggattaattgtaggaaatgattgatttaaatacccataaaatattaaattaactaatgattaaatattattaatatataatgatcttatgacaaccaagtttttacaaagaaactatatatataattagatttaataaatattgttggttggcctgtctaatcaagggtttttgaaaacattgtaataataaaatgatacatgatctcatatcttttaagctcgtagaaattattaaaaagataatttttttcttcgtttataaacggggaccaagatatatataattataattatagatagtatcttaattactacgaacccgcccctctctacatgaaagtactaatgataagaatatagctaggttaaactcaaatatcatatagactcatatatctatatatataagtatataaatgcatatagctagctaggccaaacaattttttaacctatacttagatgaaatctcaatcaagtggtcctatcatcatcttcataatcaatattgaaacgggagaaaaaaaattgggtgttttttttttttattatttttatactttaaaataggtttttttttttt

SEQ ID NO: 48369 - DNA, 1249 bp, Cannabis sativa
tttttttttttttgaataagaactccccaaggtttgttgcctcacaaacctttattttttccgatatagttctaatatacatatataaatatagtcaatttttatttctacttgattgttatattttcattatataggaataattgtaataataattatatttgtaaatatttactatgtagatatagaattttagtattagaaacacgaaaaggttatgaccttttaattttgatttcataaatattaattaaatgaatattataactaataaatagaaacaactttatagaattgattattatactaattacttattaatattaaacctattgtatgcgtcaaattttttttttacaattttattagttgtttttttttttcagtttacttttattgaaatacttaaataaataagtactccataaatgtacaagtaaataaaaaaaattactgtatcattttatcaattatattaaaactttttcttaatttattacataaatttgtattttttatatttctaaaaaaaattaataatgctttaatttattttattacatgcatttatatatacgtgtgtatttatgtactaatttatttttatatatattttttaacatttacaaagctataaataaatttaattttttattattaatttttatttgtattatttttattatggcttattattttgtattgctaaaaaatattatattagggtgatgacatagcacgctaaaggagttttgtttatcattctttgattttctaatttttctatttttttacaaattattttagttttattaattatggagttacaattttataaacttctggaattgataacttttatattttaattactaatatactaatttcatacactaaatataaatttgagacttttcatatactattggtctttttatattcctattatttgatagatatatatatatatatatatttgctatgccaaagttcacatttcgtcttctttctcatgttatagatattgcattttcttttcttattgaggaaggtaattttattatctctctaattcaaatctaatttctattattttcttctgatttgatactttctatgtatatatacattactttataaaacaataaaataaagaaatatttgcaccaataactattattattaaattatttaagaatttacccttacctattttaatactcacaatttaggcatttcttttttatag

SEQ ID NO: 48370 - DNA, 1548 bp, Cannabis sativa
ttcgtatttaggatgttaaataacatacttgttagtatatctaagatcctggtaaaatattttcaacaccatgctggggccaaaccctctcaaagaagatattgagacaaggttacttttggccaacaataacagaagactcgatggactatgtcaaaagatgtggcaagtgtctgaggttctccaaaatacctagggtttccttgaacgaactcaagagtatgcaaataccctggttattttctatctggagaattgacctcataggctcactacctagggagaaaggccgagttcaatatgcattagtgggggtagattacttcaccaaattggtcgaggtccttagccattatcacgtcaaagaaattccttgattttgtggtcaagaacattatttaccgctttgcactcccacaaatgatagtgtcagacaatggaacacagtttaacagtgatctctaaactgatgtttgcaccagacatggaatcattataagtttattcgcggtttcctgtccacaagaaaatagacaagtggaagcagttaaccaaactcttaaggatacactaaagaaacacctagagcaagctaaagggaattgacctaaagaaatgcccgaagtactatgggtttatcgcataaccaaaaaaacagcaataggtcatactcccttcactctaacatatgggtacgaagccatgatacccttagtgctaacaccaccatcacatcaaagactaacatacgaccagcaagccaaccatcaattgttggacgagtctttggatggaattgaagagatcagagaaaggtctaagcttagaaaggcagtgtatcaacaaagagtcggaatgttctacaactctaaggttaaagataaaaaattaaagcctggagatatggtgtcacaacaagtattcctaaacacgaaagatgcatcagtaagagtacttgggccgaattgggaaggaccatatgtcgtcactgaagcacttaaaccccaaacatacaagttggcacactatgactacaacttgaatccagtaccagtaccaaggtattggaatggggtgcatctatgatggtactaccaataaaagcagctgccgtcaaaatagctcactttacagtaacattcactttaccttgtgtaagtaaatcgatttcccctcaaaatgacggaatgcgacaaatttgtctctgagttaagaggtcaatcgcaaaggtaagactcctaaactaaaaagtcaaacagctaagcttggatgaagaaggaaatctacaacaattattttaaatattcttttttctttcaacttagctcacagtaatgtaattgtatttaacttgatgagtgaaacattgaacaaaattttgttggcaatacattaaaattaatcaattatagctcatagacctgatgacactctctagcgctgagtaaagcttatattggataagtggagagtgctaacacatgtaacaccacccaagagcaatgatcaagaaggcctaggggcattcggtatggcaagtgaccaatg

SEQ ID NO: 48371 - DNA, 1112 bp, Cannabis sativa
atgtgggactaactcttaataattctgtagtgttgaacagaataagaaaaatatcatgttctatcattccaatcttctatattcctttgttcttccaaacacgccaacagaatccctccatcattgaaagaggcaggttagctccaagcacataacactcaagtgttgaagcccattaattcacctcttcaattatatcttcattctgaattttcacttttattctactagaaattcctacatcacctccaatttatccatatacaaaataggacagggatcacagattgtactagacatagcttctgtatctgcaattcctgagactgctttcctttttctgaatcaacgacataatcgtagcaaatttttcctatatctctaacttcttctactcacgaattaaattatgtgctaatcgatctagattttcagcttcttcatctgattctgattcagagatctactccgcttcatattccacaaatttagccatagattttgttattatctgacaaatcaaggcattcctccctccatcctgagccgaaaccttcccagtctttgctgccattctagggtcttcccctccctctcccatggttccaacgtgcgatcatccattcaccgaaatctccccgccctattagagtaaaggagaattttaatagaaaaattggtactataatatattttgtttatttttaattttttttgaacaattaataaacatgtgtttattcaaaataataaatcagtataagtattttatttttgaagttgttgatgaactaacataaataatattagtaaatatgtttatatattttctaaaaattcctattaaattttagtaacataatattagcaatatatcaatatataaatatttatttatgtagttatatatttaattttatgtgtttatttttttagaaaattaattaaaaataatcaacatgttaaaatagtaaatatataagtttatttgtaaatatttataaattgtataaaattatgtaattatattttttttacattttttttttgtatataagtgaaaattgtcctaaatatgtgatttgaaattcttcgtggtactgtgattgtag

SEQ ID NO: 48372 - DNA, 3428 bp, Cannabis sativa
aaaatttataaaaatattttaaaacgactataaaaataattaagctattttttttaaatacataaacaaattaagaatggagaggtaaaatttgtcaaaagtttatagtagaatttttcaaaaaaatattcaaattatagttcaaacaaaggattgacggcatgatattgtgttttttagtttagcgtagtggtcttgcgttggaaccctctccccttctttatatccctcctcacctagcctaactggcttcacggcgtgatattgtttagttttagagcattgctattagtgctgcctagctttttctaggtgatattgtttagttttacaatctcaactactatatatataaatatattgatgaaatgaggactcctatattaatttcaaacgcttgatttagtatacagttaaccacacaaacagtttaatcagcacacttacgatattcatgaaattggtcaaataaaaatccactaaatataaacaaaataaaatcaagaaaatctgagtataatataagcgctaagcaaaataagcaaatagtgcagagatttcgtgacaatggagttgtggactggggaaaaggaccacaccaacacgtggcagaatcagcaccgtcgatgaagttaatagccgcgaacaatctctgagcacttatttttgatccaacggatgcttttcctcagagaagctttgaccttaccttcaaccgtgtaaaccttatacttgtagatcctcttcttcctcttcgcctccggatcaccgaagctccacggtttcaaatcggcccgactcgctctcgacgttcgcgctgggaccggacccggatcgggcgagtgaacacgagtcgttccgtgatggacctgactcattgttccgtagctcttgccgctcacaatgtcgtgcctgcggtctccacctccgccatagtgcgtagcgcccgacccggatccgaacccgtccattagagatgtttggagaagtgagaaacgatgaagtagggtttttaaaatggggattcagagaacgttttggagcaccaggggcagaatcgtaaactcgaaatgcgggaaaactgggctttgaacttggcttatctcatccctttgtattaattttcgaacttgctctcttatctctgaactcagctgtacataaaatattatttaatatataaaaatacaatatatttaatttacattaattttaaatttaataaatcgttgtctttggtttcagttgggacaacctcggttttaccgatctcttctcttttattgtaaggaatttaattttataaatttagtttttggttaaaaattataattttatgtttttttagttcttactttgacgtaagtaataattaaagtataaagaataataatacaataattatcagtttcacatgccattctctgctctaataaattatcaaatcgaatctataaaaatgacagatccaaataattaatacaaaagaaagaaaaaaattaagaaaaatacgacgtggaagttctaaagttttcgacataatttatgcacgaatagggtggaatcccaagtgatgataaaaaaaattacaaaatattatttaattaatggagcataattaaattattaattgttttttttaatgtaattattctcatttaattaattaactggaaagagaaagtttaaggtgaagatcaacatgaccaacttctggattgggcgtactagtagtagcactagcagtattactactggttgaaaacgactgttctctaggcctcaacgacatcaaacagtactgcgtattatcaggaagccgatgatgatgggaatacgaaggcggcgccaccgcatgctgcgacggttgtgaccggtgatgatcaaacctgctaatggtggtacaacaagtaggaatagtagctgtactagtattatcattattaaagcctgtgaatcttccaggtggataaagtggtgatgatgataatgatcttattgaatgtgggcttagaactgggctgattgggcccgcattgccgagaagtgggccccggccctgatattgggcactgaccctttgacgttctcgcttgtgagcgttttgatggcctcccagagcttgagagttggcgaaaactcgacggcagaattggcacttgaattttctgttgtcgtcccacattgatggtgatgaggtatgataatcttcttttttattatctgatgtgcatgataacacttctccattttctgttatgggaaaaccaaatagctttagcgttgaagaggaagaactacttgtactactcgagttattatgatgataataatgatcggacatgataatgatcaatattattcttgtgctactcttaatatatatatgtatatgtaggttacctttgttgtttttgtagtttgtgaagtggtgaattcatcatatttataggcaactatatatttctattaaacaaaataataataaaattaattgctacatcttttactatattgtggaccttttggcgtttgtccttttacaattagtacagcaaaaagctctcttgatggtgatatcccacaaattaagttgttttcttagatcaaatgatatatattggtgcaacaagtttattttaatgaccctaaagcttaacctttattaaagtgtatattatggccctcaaaaaaaaaatgtttattatgtgtcccacttatttgtttgtttgatttcggagtgaactcaacttgaataaaatttttatcacaatggtggcttccaaagtcaaatattacatttacatgtatatatttttttaatttatgaatttttttaaaaaaattaaataaattgatgggtatgtaaaatcgccaagatggtgggcgtggctgtagactgcatgtagaggttttatttttttatttttttttttattaatactagtatcatacatagaacaacacattctttttttttttcaagaaaaatattggtaggacaacacatattcacatagtcaatacattgctttattctatatttcaacaacaaaaaaaatacattatttattctcaaaatataaaataaaataaatattacctttgttttcattatatgctgctgagatgaattctctctttattagaaataaattaataaataaatattgtgatcatagatatagtctaataatttcacacttctccttccaaagaagagatcctaagttcaaatccccttctcacgattaaaaaaaataataataaataaaaataaaaataaactttccgcaatatcaatcaataaataaatattataaaaaactaaaataattttgaggaaaaaacttatttttgtataaatatagtcaatttacaaattaaattgttgcttgtttgatttggatttgtagaccttaccgtgt

SEQ ID NO: 48373 - DNA, 1422 bp, Cannabis sativa
acgtggcgtccctgttggacagggcgttacaaatcagattgtaaagagtcttatttagggcataaaacctaacaaagagttgtttgttaacctcgcttagttgagtactcttttgttcggtctccttcttggcttcctccaaatcctttttcaatttggtggtggtagttatagctttcaaggctgcaaacttgcctcgagagtatgtatatgccatcttcaggttgagttgcacaatgaagtaaaattatactctgaacggacaaaagtgtgtgaaaaaaaaccataggaaaagtacttactcgagtggattctttcagcaaactgcccatgcgaagcactacaaacatgtcttctcctctggccagctggtcgttcactttgaggagccactcgatcctgataaaatggaagcatctccttccccttcttagtctctgggttcatcgcggtacgagttactgaaggcttggatagtctggcactgttagtgtttccaccattagaaccttttgatggggcagccatggactaagatttcgggttcatcttagctggtgggattacatctgaaactacctctttgaaaaatttagtaggagggacaactgagctcttctcaatagtcatctgaggagtcttgttgcttggaacaatgcttttgggtagtatatcgtccacctgagcgctttgccggagaattctggccagaggcatcacctgacctcttctccagtgtgctcatcatcctctgagacataactatacatgaggaaaacaatgatgtcagaacaagcatgaatcaaacaactgtaaacaaggttaagaacaaaataaagtaccctgcacatgaacatggggaccctcccgaacaagcaaggaaggggcatcttcaacagaagagttttcttctttctgctcaaccactacgacgtttccctttcgtgccacctaggtggaacattgagcaaccttctcaggactgtcttaaatccgattagaccactcaataggtacttggttgccttaaggagccctcctcttcttcttcttgcttgacgcttcctatttagatataacctctccttcctaggctagcataggctctcctactgcctgctcggccccttgtccatgaccaaacgggtagagtttgtacttgataaaattggcttcagtggccaagagagaaataatctgatcatctaagggaacatggagaatatcttaagccctctttctatgtcctagagtgaacggaggtcagcaataagaagggatgtgttgaaaattggtatgcttggtgtccatgtccttaacgatgtaatagttatgcatttagcaccaattttggtcacctcggtatctatggtaccggtcagccacccctcctcgatttgagagaatctgatatacccaaat

SEQ ID NO: 48374 - DNA, 549 bp, Cannabis sativa
tattaatcatatgtacgtatacattttttaagattaattaattaatgtacttaataaatctccatatatattttaaatattatctatatctttcggaaaagtacgtatatagtgatgataaacaacaacaaatgtatgtgtattatatataaggtgatattatataataatttaaataaatgatttaagtgatgaggttatcaacacttttaattgttttatcaagcaattatacatattaattatactaaaaaatattacttgttatattaattatgtatatgtaattatttttagatacatgcaactaactaaataattgatatctgtcaaagatctacattaataatctgaactaaataaaacaaaataatatttataaataattaaagaattatattaattttttgatattgcacatatgattggtgactaaatataaggttaattttcgtgatccccaagaagatatgggatcaatatttgttgctgtgcttttgtccattgattttgatatattggttgaattaatacataaacaaaacaagt

SEQ ID NO: 48375 - DNA, 1642 bp, Cannabis sativa
tagtatttatcttaactatatttccataaatatactttcatcacattcaaaggtagtaattaaattgctaaatatacgtgtgtgtatatatataatctgattttattatatatccaaatatatatatatgtgttcaggtcggtttcatttcgaggaggcgtggtgtgatgatgataaatgtaaggctatagttgaaaatcagtggcgggatgaggacacaagtggttcggctgcttcttttcgtggcaaaaccattcgagcggggcggtacctgagactatggaataggaaaaaacggaatgagagtactagtaatattaagaaggtgaagaagactttgcaggagctcacttcagttcaacaaccgggggtatggactgagattaaaaaaacgaaaaggaagctgaatgtgttgatggaaaaagatgagaagtattggagacagagaagtcgagctttatggttaaaatggggggataaaaatactaagtattttcaccataaagcttcggctcggcagaaaaagaatgagattaaaggaattttggatgctatgggcgtgtggcaaacggataagcttttggtgcaacatacggtggagggatattttcagaacttgtttttggcttcgaatatagattgggaggtgcttgaggacgttctccaagcagttcagccgaaggtttctatgggaatgaatgaggcactgttgcaaccgcttatggaggaggaggtggttcgggctattaaggagatgcatccgacaaaggctccgggtgaggatgggttaccggctctattttatcaaaaattttggagtagtgttaataaggaggtggtgagtgtttgccttaatattcttgatgggggagcggatatgagatgtttaaatgagaccattgttgctttgattccaaaagtagagaagtcgatgagtgttgctgaatatcgacctattagtttatgcaatgttatttataaaattatttctaagtgtttggctaataggttgagagagacgctggatggagttatatcggagtcccaaagtgcttttgttaaaggaaggttaattcatgataatgcgatcgttggctatcagagcttacattgtatgcggaagaataggtttcgtaatgggatgaagttggctttgaaattggacatggcgaaagcttatgatagggtggaatggcggtttcttcaagaggtgatgttgaggttgggctaccatgaacggtgggttgctaaggttatggcgtgtgttacttcggtgactttttcctttctcattaatggagagatacagggtaaggttgtgccacaacgtggaattagacaaggggattcactctccccttttctatttctgttttgtgttgaagtattttcatgtttacttcaacgggaagaggtaggaaatcagcttagtggtgttcggtttggaaggcaaggtctagctgtgtctcatcttttcttcgcggacgatagtatgattttctttgatgcaacatgggaggcttgtcaacggttccatgcattactcagtaagtattcttgtgcatcgggtcagatagttaatttccaaaagtcggaagtctgttttggaaagaatgtggcagcggagaggaagttggaattg

SEQ ID NO: 48376 - DNA, 1723 bp, Cannabis sativa
tcttcttcttcttctttttacaacaaaaagtagagttggttgtcatcatttggtttattgtgagggaaaggcatattttcctcaccaacatgaaaactaccaccaaacaattgagacatgtcaattagtataaccaacatacatctatatatatcaaacttcttccctttttgcctactttcaattacactttattacccattaaacatggagtcattaataaatattatcactattttttcaaaataaatataaaacttttattaatttattaaattaactaaaagacaagattgtattttaataagaacatcagttatattgaacactcaatctaaaaaaaacaagttctttaataagactatgagcaactatgttagtaaattgtttaataaaaacaaaaaaaaaatgttatttaaagatgctagaaatttacaataatcttttataataactccaaaaaaagaaagtagattctgaatagcttgaattgctaccaagcaatctgactccaactccattttttgccatggttgaattttaatccagcttaacgtttcctttgtacaaaatgcgatcagccaaaacaagagcacctataccagcaaaactgttcgccttagccatcactaattctccttgagaatctcgaacgactatattttaatcaaacgctgctcgatcatgaaaaatggtggcattaacagctaccttgattgaccaatagaaaaattgacacacggaactcttaaagtgagtactaatagaattttgaaagttaaaatcttaagtattttcactactatttttaaattttagatactaacaaattgtgtatttatgttgcaaattctcataaacaataatcaattatcatagacttactaacaacaataataatcaacgcattgggtaagtaagtgggataaaataatcaacaataatactaattataatgaagatattttattatgcaaatacttttttattttgtaaaacttttggaagggataattaattatgtcttagtacttctcattgctaattgatttattaagtttattatctttaatattatcattagaatcaagctaattgaatttaaaaaccatatgtacattcaaatgcatataataattaattggtgttatattatatatttagtaacgcgtgcaatgttcaaaagaatgtgccactaaaatcaaaagaccaacttattatgtcttatattataatgttcatacaattcatgagaccaattaattaattttcaaactataaaaaaaaagtgtatatatatgtataatacaacaagtgcttttccaaagacagtttgtcgtcccatgccagtaaaggatcaaatatcaatacaaacaaaagtttttctcatatccaaaaatttgaccttctaaacaaagcaaaatagatctaccaacatatataactttgaattgtttcttttgagtatattatatatacatacctacaatgaatagttttcaatcattaagtttatcaagtttatattaaactttaatctaaatacatgtattgtattattgcatcaaaataaatctggagaaaatattaatattgtggatggtgtatcaaacaaaattaatatgaggctgatatataactaattattgattctcgatcacttgcatgcatttttgcaacatattgattatatatgagggcgtggtgttttctagttttaatt

SEQ ID NO: 48377 - DNA, 943 bp, Cannabis sativa
cgcattcctgcaagtagtgtttgggttttgaggagctctactgtccaatcaattgtatgaatttttgcaatcacggctgaagtaactagccttgcgtgcctgtataacttctcctcactcaaatgtggatattccttctacaataatgatattgattatgtaagaataattaatattaattaaggataaaaagtaaaactaattacatactgaaataataatacaatatttattaacaaatctaaagatgaaatattatgaaaccaaattatattttttttttatttatattgggcacacaatagtgcaaattatcttatgcactaccatatatggtcgtagtgaacatcctgcatttttattttaaatttcttaggatataaaaaataagcttctactttcataaaaaagtaaaaaataaataaaagataaggttctacttatatactaccaccatggtggtatgcttaatattttttgggacactatttttttaatttcatatatgtaattatcatttcatattcaagcacatcttgcattttaaaatatagtgtaattactaaactgtgcaattatcttacctacctagtaattacacagttacttttaaacacactgaatattattcattcttctaaacatattttattattaatttttagtgttttaatttttctttccatacggagatatgagtaaaattttagtatatttgaaataaataaaatatattaaaatttattataaaaaatataattttaataatgtattgtaaagaaattaatgtatgtaaaaatttgaagtaaaataaaaaacaaataatagtggtttggtgatgtatttgaaaggatggaaaaattgaaagagaatgatgtgatatggtatgtattatttatagatttattagataatacattacataccttgagagcatcacaaa

SEQ ID NO: 48378 - DNA, 4342 bp, Cannabis sativa
atttgtagatagctagagtttgatggaatgtttatggtggagccgagaggtaggagtgggggtgtagcaatattttggtgtgaggaagattagaaaaatttaattggtttttctccaaaccaaattgatgttattacaaaggtcgattgtatggaggcttggagagcacaacgtgagaaaacttgggatttacttcggactttggtgcataattatagcttgccttggtgtgtgattggtgacttgaataatgtggtagatcaggtagataagtgaggcggggtaccgtatcctgggtggctagtggatgggtttaataaagctcttgaagatgtggggttgagagacatggaaccggttggccatcagtttacttgggagcgtagtaggggttcttcgaagtttatggaaattcgtattgattgggctttagttacgttagcttggctttctttattagatatggcaagactttataatttggaagactcatcttcagatcatagtcccgttttgttagagccgaaaagatcttcattggcagtaaatgagaggtgatttaaatttgagaatgcttggttggtagacccaatgtgttttcagctagtcaaggagagttgggaaggaagttctttgatgaatattcagcagaagctattggtgtgtagttataagctacgagtttgggggaaggatattacaacaaagtttgggaaaatgataaaagtatgtaaagttgaacataaaaagcttcgcaataagaatgatttgattttgagctagcaattccaattaattcagaagaaactatttactattcttgattagaaggagatttatcagcatcagcgatcaaagaagttgtggctgcaatccggagatcaaaatagcaaagtttttcatgcaaaagcaagttcacagcatcgtaccaatcatactcataagctgaaaaatgatcaaggtgattgggtggagtgggacaatagcatgtagaaattggtggtaaattatttttctagcttattttcgacttctaatgctaactggcaggaggtggatcagtgtgtgtcgaatactgtttcggctgctcagtatttggagttgttcaagcttatgttggaagaaaaagtgaagcatgctctgttccaaatgcacccagacaagagcctaggaccggatggtatgaatcctacttttttccaaaaacatcaggagatagttggtcatgatatggtgagaatggttcaagatttttttgattgtggtgttctctcgaagggtcttaatgaaactagtgtggttctcattcccaagaagaagaacctttatgtgattggggatttacaacctatctctttgtgtaatgtgttggtcaaagtaattactaaggtgattgctaatagaatgaaagggttgttggatattgttgtgtctgatactcaaagtgcgtttattccgggtcatcaaatttctaataatatcatggtctcttttaaagtcatgcactacttgaaaagaaaaagaagaggtcgagagggtagtatggctcttaagttggatatgagtaaggcctatgacagcgtggaatagggttatcttcgtgaaattttgctcaaatgggattcacaaagagatgggtggatttgattcttagttgtgtcacttcagtgtcttatactattgtacacggtggtagagagatggggcatatctttccaactcgtggtatcagacaaggagatttattgtctccatatttatttataatatctgtcgagggtcttttctcattgattcgattttatgaatcttggaagtggattagaggaatcaaagtttgcaggccagctcttgttatctctcatatatttttttgttgatcatagttatatctattgcaaagcttcccatgaagatggtacaagatttttagagttgcttcataagtttgaggaggcatctcagcaagttaatttggcaaaatcaaatgtcttttttaagtgccaatgtggcagggccaagttaattggatctttgtaatgttctacaaatggcagaagcttctaaacacaatttttatttgggtttgcctaatatcttgggtcattctaagtctatgattctgagcttcttgaaggatagggtttggaaaagggttcaaaattgggatgggaagcttctttcttatgctgggaaagagggtctgattaaaatggttgctcaatcattgcctacatatgtcatgagtgtttttttgctcccattcgttgtttctaaagatttggagagagttatgagtaagttttggtggtattcaacttcttctcatggtggcaatattcattgatgagttgagaaagaatgagtagacataaaactataggtggaatgggctttattttcccaggggtgattttctttcagcatccctaaggaataatccaagttttgtgtggaagagtgtctttgaattgcatgagcttctcaagtctagggttcttcaggaaataggttctggtgtgaaggttgatattttgcatcagccatggcttctgggtgatgtgtgtccttttgttacttcagatgcccaatgtttggtgggccataaggtgaactcattgatgtgtacggataagagggaataggatttagatatcactaaagatctttttaatgagcaagatcaacaacatactttggcaattctattgagtctgatgtagctaatgatcattttttctggtctaaggagcatcatggtttctactcagtgtgtagtgcatacaagtggatacaagcttagaaaggaaattggattgtagttgattcttctgagttttggcgcaagctttggcatttgaaagtaccaccgaaagctctcaatttggtaagagagtctcagttcaaatcatgtgtctagtttgtcaaaaaggtgagaaagctatttgtttatgtgcttatttcctatttaatcgttgctcaatgttggcagaggcttttggctggggtaaggtcgattgttgctattgatttttgcagctggtttgatcaaattttgcaaaggtgcagtaaggacaagtatggggaggctgttatgttgtgatgggagttatggaaggctcgaaataagttggtttagaaccaaaagtatgcaacggtggatggtgttcttatctcatctatgagttgtcttgtgcaatggaagtcagcccaaatagagtttcaaaggcttcttttccagtgtttaaagctggtgatggagctgaatttcgggttaagccgcaggagaatacaatcaagacaactgttgatgtcgtcatttccatgatcgagcagcgtttggttatggcatagtcgctcgaaaatctaatgtgcatgacaataaaaaaaaaagttagtttctaagtttaagaatctatatatatcttaaactatttcccttaatttcataagtttactactacttaattttagttcattcttcttttttaatgatggaatattcttttctcacagacttaaatactcatatatacactgggaatataaaagttagagtttgtagaatgtagaactctctcaatacgaagaagaatggagaattcataagtctccatatgatttttattgatgagtaggtaaattttttttagtcattttttttctctattaattttttttttatgaatttattaattattaaatagtcaatgtgtcttttatttatcctgcaagaaatctaatgcataagacaatacgaaaaaatttagtttctaagtttaagaagttatttagtgaaatatttttgtactacgtaaaatttaaaaattgtggcaaccataggtgaatatagaccactttcaaatgactataaaatttattttttattacaactttagtggagagactagaagaagaaatagtgaacattccaatcaataagtttcaatgtattagatatttaattaaagatataagagggtgacattgtactctacaatcactctaaataatattatttgttctcttttttttttttaaattttttattaggattataaatatttatttattttttcattttgttctatttttttatcattttactattaattaactatattaattaataactttgttgtaacatttatatgataaaaaatttaatttaaggtcctaagttgcaactcgtggctggtatgtttcaaattttataattttaatttgaaaatagaaaaaaaaaaaaaaaaaaacataatatctaaaatatctatcaacctatttattttctcatatttaaatgaaaatatttgtataatttttttcagaaaagaaatatata

SEQ ID NO: 48379 - DNA, 1016 bp, Cannabis sativa
aaaaaaaaaaaaaaaattacacaacacacttaaaaatgaaaaaaaaaaaaacacattttacggccgattttttttacagattttcacttgtttttttttctcaaagaaaaatattactttcatgttactttctcgtagcaataacatcaaaataatattattttagaacaacagaaaaataacactttgtattattgtaaaaataaatcacagtactttcctgtaatagtaacgtcaaagcaatattttttcgaaaataataaaaaaacaacactacatttttatatataaaaaaccgtaaaaatattaaaatttgtaaaatgtaaaaatttggttatttttatatatttaagaaataatccaaaaaaaaaaatggcacaaggggtgttttggtcatttgaaactagaatctctaacggtgatgttatgggctttgtttttgcttacgttagccgtttagtccattgtaactaatattctcttttattaaatatataaatgtaacggccgttgggtttggtgttaggcaccaaccacaacctaaaaccttcaaaaataaaatggcacacaattctcatacaagccaataaacccaaaaatttaaaaataaaaccttaattctctctcaattcccaaacacctcaatcactagagagagagctctttcctccatcaaccaccattgccggaatcgggccggtcaatttttcggggagagccattttaagatctccctagctaggtagctagcttctacattatttatcactaaggtacttattgaatatgtattaattgttacaaaaaagtttgaatgaattaataacaatgtatttgtttgtttgtttgtatttttaataatgaatttgatttgtataaagatgggagagatgaaaagctttcaattgggtgttattggtgccctattcctttctgtggcttcttctgtttctattgtcatttgcaacaaagctttgatgagcaatcttggcttcccatttggtaatactaatatt

SEQ ID NO: 48380 - DNA, 1437 bp, Cannabis sativa
aggcgctcgaaggcctagaagccagaggaaaagaaaaatatttgcctaaagtctttcacatttttctaaaatttatacaggactttcctatcaataatgtttgaatgggtttacaaagaataaaacctttctttaaatttgtcccccttttttgggtatagaaacaagttcataaaaatacaagatttcatcaggagtgggaatctcccaccccctgtctttataaaacataaacaaattggctaagaaccagtagtcttactaaatcaattgaaagggagttagtccaacaaaaaccaagaagttgatgaaataattttgaagcaaaaggtttgccctgaccatcagatgcacttggctctacacaccaaagccctcataattatgatttggggtttccttgtcccgagggagtcagtgaaaaactcctttagcaaggcaaggaacgatcccattctccaccacgtcctcctaagttggtgaacacatcacagggaggaatttagttcattaccttcccagctggttcacgggaaacatagtggggaagagggactggcccttgtagcaccacgtccaacggaagaaccggagggagggagttgctggccttctgaggaaggtttttcttatctcctaaacgcaccatgtcattgtttctctctaagtacagagagcttaaatctcccattaaatgcataaaatttgtgtgcttaaagatcttgtaaagtgttattcatttgaagacatgaagaaacctagcagttagtacccccacaccaattctacaattacatacaagctaggggtccttagactggtaggaagaggccccctctggatactacatcctaactctccccaaggcagggtatcgggtgccaaatacaatgcacttgcatgaagaacaacaaaagaagaaaaaaaggatggaaaacaagaaggggaagtaaatacccccacaatggaaaaagagaataaaggacctcaacctaagaagatttagccctctgtcagctacagaaaagaaatggtccattgacaaaacaaaatgccacctaggccaaacaactaaatatctaggttcttgtaataaagtgaaaataagcagacaaagactctcctccactttcaatgcaataactcattcaaaataatgataaaaatgaagaaaaaaaatatctacaatcaaaatcaagtgtgagactgaatagttatgaagcttagtcgatctctgaagtgagtgaactaagaagcacaatggtaataagaagtctaacaacgcctgaggaagaggaggaagaaatctagcttgcttggaaaattcttccagtttgaaggttttttagatatatgaagccaagtttaaagtgtgaaatgtgaagatgattgtgactatctataacccaaaatcacaatctaaggcatcaaatgatt

SEQ ID NO: 48381 - DNA, 696 bp, Cannabis sativa
  modified_base (26)..(37): a, c, t, g, unknown or other
aagtgaaaacagttttatagaacatnnnnnnnnnnnntattttcactttttcaattttaaaaacagaaaacggattgaaaaagtgttaccaaacgccaccatgatctaaatgaaatattttaataccttaaaataaataatccaaatattttttctattacataacaacaaataatctaaactaaatatttttcaaaataactaaattaaaaagtaaataattaaatctaaacaaaatagtttttaatacctaatctaaaactaattaaataatttatctaaatatctattaattaaacaaataggtataaatatatatactgtataatcatatatatattaaatatataaattaattatatatacggtagatatacgtataatatgaatataaatatatatataattaatattaataaagaaaatatatatgtatataccttaggaggaaggccatcaacggtggcccgtggaggaagaggaggtggttgttaatggggacgcgagagagagcaacaaacgaagcaagatgagagagagaaggagagagggcgtcggagagtgagtttcttaggtgggtggaggcgagacgagagagagggagatcgagacgagaaagagattaagagagagagggagatggctacattgcacgggttttgtgggtgggtggaggcgagagagagagagagagag

SEQ ID NO: 48382 - DNA, 1477 bp, Cannabis sativa
aaaaaatctgatacatctaccatctaattaactaattagtatttccatttagtttggatggataattagattttatataataatatgtataaactgtatgtatatatgaaaattaatattaaaattttcatatatacatatatatttagttaggtcgtccaatacatacttgaccaaaaaatatttgatggatcccatctaatccaaaatatactaaatttaaaatattatattaaattaataaatatatatgaaatatatccaatagataaaaccgatccagttggatcgattggattactgaaattaattatatcagatcagatgctaaaatttaacatctaatatatatttggataagatttaaataggtctaaaaatattgaatgtgttccaatgaacaccaacattgtaagtataaatgacgtgctttgcattgctcgttaattgggttctaaagcgaatgagatataagggagtacattgttccaaatgaaaagaaaaagaatttcaactgtaaaagtgatatttacaataaaattatgaactatcatacaaaatatttgaactaatttttttcttttttgtcaggaccactttacataatcagaaaaagaaagcaccgaaacaaaacaagaggatgcatctctttcatctaataaaacttattatgtatcttaaaagtattcttagccaatttatgagccacaacaataaaattacacctaacatgagagagatgccctaaaaaaattagataataaagttttaatatctaaaaatgaaacaccttgagtccatcttaatcctaccaataaattaagtattttagcttgaaaagaaacctacaccaaaaaaccaccaaagagataaatttggtaatttcttttttctttgagagaaaatagaaatattcattaataggaaaataatacaaactcaattacatgaaaatataattcaaagagtaaaaatatagcttcaatacactttttgtttggcatacgttataattttaggatcgattgtaacttggtatcgagttatgatttaactatattctttttttgaataatgatttaactatattttatacaaatcttatgatcattttagaatatttcaactttattttttctaaattatctctactcatagcttttgatcatatattagttgtgcatacattgattagataaaaaaatttccttattaaaaggttctatgtttattattcaaaataataaaggcaagtaattgatagaaaaatgctaggcaccatttaaatttaaatgtgttatattataatttgtataattaaatattagatctcacatacagatttatgtggtgggatttgacaggccaagctatggagaaagtgacccagatcctaaccgcacagtaaagagtttggctttagatgtagaaaatcttgttgatcagttgggacttggatccaaattttatgtgatgg

SEQ ID NO: 48383 - DNA, 1336 bp, Cannabis sativa
  modified_base (819)..(830): a, c, t, g, unknown or other
  modified_base (1183)..(1190): a, c, t, g, unknown or other
  modified_base (1302)..(1305): a, c, t, g, unknown or other
aaagttcaagggaaaaattactaattagcattctttttattataaggaaagtaataatcaatcttcttttagaaaaacaaataaagtaataatgattttgcatatttaaaacgacgtagtttcggggatgagtttacgggtaagatcttaaaccctaagcccctttctcctcatatctctcttctctttctttttctcgttgtgtctcatagattctccgccgtgactcatcgcctttcgccgcgttttgtcgcctcaccttgacttgggtaagtcttctttattcatttacttagtaatttaagtgtagttttgctctaagtttgatgctttattcttgatttgtcttgaactttttatcagagtttcttggttgtaatatgattatggggttgtgaactagaggtttatttctgtattgggtttgttcaatttgattcaattgttttgggtttattgttttgagttttgaagatttagtttttgattcaacaataataacagttgagtcttttggtagatggaagtagaattaatcctaattatttgggttttaggccttagaatccctttctatacatatatatagaaagttttagttgaataggtttctcccatctaatatttgttatacacatttacctcgaaaactgatcagcacgaaaatatgcaatgaactcgtaatttacgagataattgcataaaacattattttttcaaattttttttttacatttttacatttaaatattttttctatatttttacagtgttatataaaaattaaacaaaaataacatataaataacaaaaaatcannnnnnnnnnnncaagagtacaacataaaattatatcaaaaaactgtatttttttttgtaaataaaatcataaaaatcgcaaaaatatttaaaattggtatttttgtaatttttgtaattatttttatgtatttgtgaaataattcctaaaattattgtgcgaaaaagtcatgggtttataaaaataccaacccatttaaataggttcagaattgggctatactattaatgggctttagacaccaagcccaggcccctagtccactcatcttccccaaaaacctaaggaaaatttacatggtatattaacttttgtcatttttttacaaaaatactgccagacagtattttttacttttttactnnnnnnnnttataagtttcatactgcagtatcctgtgttatatttttactggtgttctactggtgttttactggtgttcaactgttattttgagctgttctgctttgtgttttactagtnnnntataaaaacacagtatttttgtaaagatttc

SEQ ID NO: 48384 - DNA, 1622 bp, Cannabis sativa
tcttttaaccccatacaacttggtaacagacttattacaaatattaactaattaaaatcatagtcatctcaatatttacaaccctaaattagtggaggcttgcgactcatcactaatcatgttacactatgaaatagagtaaaggcttattagtaatttacaaaccatgtgaaagagcctataaatacgtaaatatgtaactattattggatatgaaatgagaaaatagaatttcgattttaattcgaagatttgtcttgtctcgaaaatgattgcgctactctatcattagtgctctcattaagaaaaattacagtgagagattcactgtaagaattctcaaccatgaaaaacgaagagattatttaactcttcaaatctattgagtcttttttcaggtaaacttttggattctcaatttgagaagatgatcgtatattgatgaacttctggctgaaatgtgtgagcactactgttccgacaacaacattccatagggtgtgtccatcatcgctaatattatataaaaatcctttgcatttgaactatagtgcggtcccattaattcacactgaatttcacaataatataaccatgaataatgaaccaaattcacatatcaacatttattcatacacaaacggagtcaacaaagagtaccacagttaccaactccaactatattccataacaatggccagtactatatttcatatattgcacacaaactagtagtaactcataactaggtactaaatctcatgagaggccttttttttttgacaataaagcgttcattgaaaacggaaaattagacctcccggtcattaggataatgttaggtatagaggagggatatactatacctgagatattcagtggaaaagcccacctgaccacattatgggtcgcaaaattacaacatctggaactaaacgagaaattataagataaaaaaatgattagagagttgattacaaaaagaaatataattatcaatattccaaatggagtgaattaaccattcagcgctttaataaccttctctaaatcactctcaaccaggacaaagtcgtgcttcatcgaagcattagtttccaacgctaaccgacacgcagccgcctcgctaataagaggattcgtgaaattgagtatgttggaagctaccaacaaaactgtcctcgagtgatctctagccaaaacaactatgcacatggactcgctaccaaccttaacatcgcagttgattttgatccaatcttctagaggaggaaaccatgaaagagacaccatatccaccgccaggggaaagtacaagcaagtagcataatctgtataacaattagagatagagtctatggaaatttaatgttactcggagagttattgtgcactttatcattttgggttttccagatagtatccacaacgatcgaggcataaaggaacaacttgtctgcatcatccccctttcgcctttaagttcaaaagaaatgttacccaatcccaaactcggccccctgaatgaagaactggaaagactccccaaggggacgcagactccccaaggggatgcttgccaaagatggtacgcaaaattacaatagaggaagaggtgctcc

SEQ ID NO: 48385 - DNA, 1681 bp, Cannabis sativa
ttttttatttaaatatctatcttttttagtaatattttattttatatataagaatttatgtttaatatcaatctgtttctttattctacgaaattagtgttaattattttttttacacgtagttttttttttattattattttatttggttgctttattttgtagttttactgttgttttagtaattgtttatgttattattccaggattgaaattttaaatacttacgttctcactaaaagaatagttgttttcaaactgttctggtgttggtttggtagttcggtctgtaggtgttgaagatggaggcttcgtatgtgttttgggggtgtgtatagtatcaaagaaaagaattaaggtgtggacagtattttggtaaaactgcccctaaaattcagtatttttgtaaaattaacagaaggagcacatttctacaactgtataatattgaagaatatttttaacaagtcgtatattataggagacatcatttagaagtgtcataaatttataggtaaaaatgttactattttttttttaaaaaaaatatatttctaatttaaaatatgtaattcgatatttaatattgatatatttttgtgtttttagatctttaataattataatatgagttttttatcatatatattattgttattgaaatattatatatttatataatttttaaaaacttataaataatttatagtgtcagactcaccaatagtttataactaatttatgaaattttgtaaaagctcaaaccaacatcatgccgcttgtatttgataaagcaggtttttttctttttttttttaaaagaaaaaatcagctataaaagagtacaccaatatcaaatatacaatatcttttctttattgttaatggtccatttaattttcctatactatgaggtaaagttaaaggagagtacattagatttatcctatataaatatatcatgttataaatcgaaaagtgatagatttgtgtctccccttagccttccatcacaaaagtgtttaaagaagataatcaaacttgtgacatgttgtagctgatttgctttaataaaactactatttttcaaaaaaaatatatatagatatattatctaattataatgtatattaagggtcccataatttatattcttttggctcccattttcctaattacggccctatctatgttttcttttaactgaagttttgtttgtattttcaaaataaaataatgcaacagcttgctatacaattcactaataaacagagaatattcacttcataattatgttagttgattcgactatttgatctgtttgaaattttatttaattcattagtagatctataactactataaaaaggagaatagttctccttcggccattcatagttaaattacaaaaatagtcttcatttattatttatttatttgaacaaataggtttttattatgtgtaaaaaaaaaaccttttatttattcatataattcatgtacatgatatttttttggtgtcgaaaattttagtcctccaacaattaatttacaaaaaagtccctcaataatttttagggagttaatgtatttctctctcattatatattaaagattttttttctaaataatctatttataaaaaatataaaacatatttatttattttttaacaacataa

SEQ ID NO: 48386 - DNA, 826 bp, Cannabis sativa
attctttcaaaggttcttatgacctttgctttattttaaccaattcctccaattgggaaggtatctatctgaacgatgacaactatggccaacataaaatgccactgttgtgtagtgtcaaacaaggttgctggaaaaatcctccagcagacatcgtctaacactgcttaaagatccatctagatgtcaaagtattttatatgggccaaaggatcctctttcctagtataaattttccaagttagcatcttgaacttggttggtataggcaacacattaattcgtgcagagaaaggtgaccattgagtcctatccagttctaggttggaaagatttagactggaccagccttgtacaaggctcttaagttgatctaattatgcttgcatgacaggatcaactctagccatcctttgcccggctagctccactcatgggttgataggaggttggacgtaagggtcaacagaatttggcctaccctgtgcctttggtgggttgttttggtgcaacatgtattcgtctcggttgttacatcttcgatttaagttattccaaagatcttttcctacagagaggcccactctatcaaacacaaaatccttgggactagggttaggacgtgtttgagcattccagggatgaacgtcggtgttacgcccgatattattatgagttctctggttagtgcgctcaccaatagggtggctagtggcaccatccacgtttgagtaagattccccatggtgagatctacttcggccttccctgggtgggacatcttcctcccttccttcattcatgggaaggtcttggaacttgttgg

SEQ ID NO: 48387 - DNA, 2114 bp, Cannabis sativa
aaatctattggatgtgatccaataaacaccctaattttagtgttacaatttgtgctttttctaagtacatgcaagcattagagactccaaatttaaagcatggggcgtaattttttttttatatatatatatatatatttatataaaaggtaagaaagtcaaaaatagacttaaaaaaaataaagtattagatttaaatctttgacctcttatatatacatataatttactttaattattacactaaacttactattatatctaaaaatataattttttattataaatatatattataactaactaaaatatatatatatatatattttttttttcttaaatttttttcaaagaagatgactacaccctctcgctacaatatgagttcgtccctgcatgcaagtatctatataagtctctacttttgataataataataaaaataaaactatgaaattaatttttaattatttctcatattacatcttaaattcactatgacattttcttaaactaattaatgaatttttatttgagtataatttaattaatattttgtatatttattttgtttatttgggtgtataaaactaattgatattatatatgattaatatttgaaaattaatacaataattaatttattatttttttcttataaaatataattcttttgtttgtctttcatttgtctctttttaaaattttacaattaaataaataataatattattgcttttctaagttcattttttaaaatatcattaaatatataaaaattattattttataacatgtaattttaaatgaattccacaaatatttatttgaatattgtattgttaatatttttatactaaaaagtattatttccataacataaatatttttaataagttttttcttagaaaatattcatatataatgattacaaaaaattattattgtgtttttcttaatatgtaatacatgtatcattgcaaaatatgtaatgcatgtatggtatagcctagataaatttgtgctatataaaagataatttatttacactaaatatatttttatcaaaaaattaaaatgataataacaagatagaaataagaatttttattttttgtgataagatagaaataattattgaaaataagtttttttttttcattaattagtaaacatctcacgcttcatgatggatgtttaattttttttaattatatattaaaataaattatgtatattaattaatgataattacttaataaaattgtattactatttagagaattgtcatgtatactacatttcttttttttataatcagttatttttatttttataaatgaataaaaagttaattataaaagtataaataaaaaagccccttacggcgagcaacagttagaaaagaacttggaaaacttaaagaatgtcttgagggtatgtgtgacagcaatgagaattttttattctttattattttcttttctatctatagtggatgtctttttctaaaattgagaatgaatttggtttactagaatttttttgattctttattttctattatatatatacattcacttatgtaaaattaagaaaaatgaagaaaccaaatggtatgttcgttgtttcctcttatttatcgtctgtagaagtttttatttgtaaattgactataatatatatgttaattgattttttttccctttcagatctcaaggcacgcacatccgtatacatatttctttttcactctcactctcatattatatatctctttatatatgaatattttgtgattttgagagtacaataattaagtgtgtagctacttggagatagctcaagtggttaggtgtgagtgtgtgagagatgtataacgggatgggttgaaattcctattataacatttgaataacaatgtgtatattcaaatttactttcataaaacatatcgtttataaaataatttacaattagttacggaattcttaaacaaaattcactagaacttaaataaaactaatatttacgtggcttgccacgtaactttcatctagtaaataaaaaagccccttaaaattttaaccaactaattttaatataacttttat

SEQ ID NO: 48388 - DNA, 1397 bp, Cannabis sativa
  modified_base (607)..(619): a, c, t, g, unknown or other
  modified_base (704)..(705): a, c, t, g, unknown or other
ccaattgacacttttagtgagtatgtacaataaaatcctctatattcccattgatgagccaaaattaaaatataaagccgctagaaaaggggttttcacaatatatattaaaaaaaattattgtaggacagaattttttaaaaataatactatgtattgtattaagttttcactgttgttccactgttatttttaattgttctattttgttatttcacggttgttttataaaaagacagtatttttgtaaaaattgctgtgtagtagtaaaattgtaaacttttgtccaaaatctaatatttttataaaaacaccaataaaaaattaagtaaaatgataccaatatatatttataataatgcatatattcataatattttttttccaaaaatacaatatacaaaaatatcaaatgtaaagttagttaggatagccttgtaattgtgttgcagtgcacaatacaaattaatccaaaaaaaaataattaccactacaaaaaattttactttattgtgactaaaagtaaaaaaattgtgactaatcataaattattattcttacattatgactaaaaagtctgtagctaaaaatattagtcacaaaaatnnnnnnnnnnnnngactaaatatatttttagtcacgatacgtgttgtgactaaaactaaattagtgacaacttacttgtatttaaatactatgttttnntcacaagtaactttttgttgtgaccaaaagtcacatttagtaacaaaaaatttatgttgtgattaaaaagttgtcactaaaaatgatcttttcttgtggtgtacaatagttaaaaatgtatattaaaattagttattaatgttaaataatatcattaattataaataaaaaaatatatagttaatgatgtgttaaattcaacacaatactactttttatgttaaatttgatttaatactacattatcatcgaagaaatattttttttgtaaaatatacaagttttttttttttatctgaaaaatatagaatatatagacatatagggttaaatacaatttcggactaaaaataaaaattatcaaaccctctattttgttccataataatttaaaacttatcttttttaaaatgatacataataatatattgagcttataaatttttataaattatttttaacataatcaaacttaagttaatttctagtataaataggtgtaaaaagatgtaacacctagtcataacacttatgagtcgagttgttattatattttattttgataaaatattaaactcaatttactattttgtattataaaacatatattatttatcatttaacaaaagcaaatattttacatcttttacatataaatagtatttactttatataaatttggcactccatgt

SEQ ID NO: 48389 - DNA, 3650 bp, Cannabis sativa
tgatcaactttttttaaaccaaggtgttttgtttgagctaaaagatctttcaatctatgaaagatcctctctatttcagatttcacagccttttcaaatggattataaaactttttgagaatgtttaaggacttacttgcaatgctttcgagttcatctttctctatcttgagtcgaagagcttcagtaccgatcttgtccatcacgtgatctgcttcgtacaatacttgtttaagctcatcaagccaattcctcacgttattgtctccaagttgtttctcctcggcatcatttagcagcgcatcagccgataacaacacagtctttaactctatgagcagcttttgattgagcttgtcgccaagaaataattgaaggacatctttattagaagcaaccctatcaaagaggacattgatgaaaccagagagaagggcaccaccaaccactaagtcagccatggtttttgatcttgagagggagcgacagtactagccaagatgttgccaaattgccaatcaagtggttatgacatgttaatttgaagagataaacttctaactttgagtagaaaggactaattcaaacaaaataattagatatattatactaattcaaacatgtatatgattattgtaaagtcaactacctttatgagggtcatttatatttaatatttatataaaacactctacaccaacaccacaaaaaatcattactctaaatcatcctcattgactatccaagtttcttaattaattctacaaaaatattacttagactatttgtgtaatcacaaaattaaatatggccaactagcctccttcaaaaaaaaaaaaataataaataaaataaaatatggccaactagccagtgtcatattagatatgtgtacctttgttccaattgtagagtaagaatttacagcttgtaaattaagaacattaactaaagataagtaaaaaaagaagaagagagagtttaatctggttcacactaaatgaggtcctaagctaatatgatttccctagtctcatataggattgaagagcagctcataagatcagattcaaaggtcaaaaattataacttgaaatttgtcaaacttaacaatttaaaatactaaaatttataaaataacctcatttaatttactctttgagtgtaaatataatgatcgtttatggtcgcacagtataattcatagtcgtttcataaaactgtttttacaaaacacatcctttccagattctactcaaattatgttgtggatgaagttcgcttattattaataatttacggtcgtgcagttattttgttaaggtagcatttggtaacactttttttaaaaaaattattcacaaaaataaaagtaaatttttttttcaaattttgattttaaaaacaaaaatgtgtcctataactacttttgttttttaattttaaaaacaaaaaaacaaaagtgtatcatgtaaattttattttcattttcatttgttgattttatttaaattgggttcgtgtatgaagccggatagggggccgagtccgggtttggagtcggggccaaggtccattcgggttataaagtttaggttggagtcatccaaaatgcaaatattcgcacttacgcggattgaattaatgagatgttgtttgacctcaaaaagtaattgatctaacttaattatatatattttaaaaaattataatatataatatatattaattttttagaaatattaataaaaaaaaaaacacaaacatctcatttctaaatttgtaataatatattgagttggaacattttattttttttatttttatttttttttatccaaacattttatttattttatgatggaagacatagataagaattgttcctagcagatacacataatttttattattattatttttatatatactagtttgtttcttttagtattggatattggatacatatatatacttgtgtaaatctaaatatatattgtaacgattgctatattttttttatgagttgagtacatgtatacttgtgtaaatctaaatatatattgtaatgaactggaatattcattgtaattgtataattggaaataattaaaaaaacctaaataattgtagattgatgtaattaaatgtactacctcaataattacacaattacttccaaataacttaaaataataattcatacataattactacttgtatatatgaaacagattattcataaacatcaacatcaaaagaggaatattggcccaataaaaaacgaaatcaatatgcagtcttgatgtatagccctctatacaagataagaatgaagagtggagtagagaaggattctttagagcaaaagacaataaaatgttaaaattgctacatttgataaaaatcaagacacctacaaagacctgaagttaaaaaataccaaatttattggattagaaacaagttaagactatcatatataaaagagtcagtaccattgagagttgagagttcaactctttaagatgattccttttagactctattttctcctcgagttcttcatgatgctctaacgactttgcactcacctctgccatggaaacattctcttcactttgtgcgttttcaatctaaaccataaattcaaaactcatcagtctaaaacatacacattgactttccgagctttcttaattcaacacaaagattaccttagaagaagttaagatctaatcagaagccgagcgagctccatcccctcttcccatatccaaagcttcttcagctttcaaactaatctgtattcacttcagttttctcaatgaaattgttaaatatcatcaattcttccaccagaaattgatcaatttaaaggaactgcctatgcaacacatataatagtctgtaactcagcataattttcaatacaacaatatgaataacatacatatttgaggctgcacatgacctgccatccatattaaaagtaatctttttctatcaacatcaccaaattcgtaatttttgggacatgttttgatagataagaaaaacaaggcttcagataaaggggaagaaatcgatagctcaaccacaaagctacaacaatatcgcaacagtttggtaactcccatacatcactttgtagtacatgtctcggcaagtttcgtaaaagaccagccatcggttttacagctaaaggaaaccttgcacttcttaacaatttcaagaaacttatcaaaatttacattatcgaaagtatgttcttcaaatggaaaccaacatccatcataagacatggttttaaactcataagtttgaacatttgtcttaatcttcaatgtgattgtcacaattatcttactttcttttgcatcagattaaaaagaaattttcaaaaaaaaacccgttcatatttttccttccacaaatcatcaagaacgaaaagaaatttctttgtttctttttccaacgacttttccaaaataatttttgttatcttaataacaacaaaattgtcggatacaatcacccatacttcgaaactttgcttggctgggtttccttttgttctggatgatgtgtggaatgaaaaatacgaatgacgagattttttgaagagctcttttcaatagagttctttt

SEQ ID NO: 48390 - DNA, 1327 bp, Cannabis sativa
ctccatttgttaatttgcttaaaaccagactatatgatataggtttaacttttcaatgcagattggaacgttgaataaagcaaaaatatataaatagaacattgacttaaagttaaaatgatataaaaaagaaaaaagaatgacctcatgatttgatgggggtgtattagcctgatggtttattgaaagtattaatataaagtaatttgttatcaacagtcaactgtaaaaattaatatgtatgtatgaaactgtgctatgtatataatttgaagatggtgggttgacaggtgagatgaaattgattcatttaagtggtaggacagtagagcttgttttcttgcaaaaaaaaaaaaaaaaggtggtaggacagtgaaaatatgttttggtcagttgactgaagtagaagaaaattaatcccatcaaccttttttggtgcttgaattccttcttcagttttttgttactccaaaggtgaaacccttcacgtcaacttctcttggttaatattaattgaattcaccacaccattaaaaaagaatattatgcatttgttgttgttgtgtgaattaagtagtagggactgaagttgacactggttaattcttctttattaaatggccaatttatgatcttttaaaactccatttcactccaatttaatgatatgtaaaggtaaaagtattttcaaagcaaagctcacttattttttttacatcgagtggcgaggccagttacactatgtgcaaaaaaaagatattaacaaaaaaattaagagataaaaatagaaatatataagtataaataaaaataagattacatggaataaaaatgaaaagtattaatcttatgataaaaaataaatacttaaaaacatataacatgtaaaatttaatttatcaaaaattgcgggaggttcttttttccaaaaaaaaaaatgagagaggatgtgacccaccccctccttccacccctaattacatcattttatttctggcaagaatttttttgattttttaaatttgtattcttctgtttgtcacgttatatgggccttaatgggctccatatacttttagagatacgttaggcccgtctctataaaggcccagatcaaaaaacaaaacaaattatacttttaaaaataaaaatatatactttttagagaagaaaaaaaaaacaaattatacaactgtcgaaagaaaaaaattataaggatcatgggatgaatgaatcttgatcgtctaatcttttcaagacttcatcaagggcaagtatgtaatgttagcatattatactttatgttagttttatatttatttaaaac

SEQ ID NO: 48391 - DNA, 1501 bp, Cannabis sativa
atatatagcatcctttctactcccaacattcccataaaccaaaaccttttcttctttaggaaaaagctaaaaagccaaaaactgatccccacacacacaaaaaaaaaaataaactacacgtacaaaccagaactaaaaaagaaagaagagagaagaaaaaaaatgtcagctttacaagcttcaagtttgatactatcttcttcttcttcaagggtaaccattaatggtgcaatccatgtccccaagcttccaaatgtccgtttcacagttccaaaaaaatcatcattaaatttaaccaaacagatggttattgaagaattgaataacttaaagcaaggattcaacacccaaaacgacgacgtttataataacaacaacgctaatacatccacgtcatcaaccgttacagctcagctctacgcgattctcgaggccgttaacgacagagtggagatgcacgataacattggccagcaacgagacaactggaacacccttttgttaaactccatcaatatgatcactctaaccgccacaaccatcgccggagttgctgcggcgacggctgttcccggaacatcttctttggctttgaacgtttcttcgacacttttgttctccgccgccgccgggatggtgctggtgatgaacaaacttcaaccgtctcaactcgccgaggaacaacgcaacgcttcaagattgttcagacaaatcaaaacccaaatagagactgacattgctcttcgttctccaactaagtacgatctcaaaaagtacatggataaggtcttgtctttagataaagcttacccacttcctttgcttggagctatgcttgaaaagtttcctcagaaatacgaggctgctaattggtggccttctaaaaaatcccaaaagggtcaaaacgaatcgtttcaacaagaaaacaataatggttggaacgaaagccttgagaaagaaatgagagaggttgttgaagttgttaagacaaaagatagagtagattacgagagattggggaacttggttttgaaaataaacaaagcattggcaatttcagggcctttgctaactggcattgctgccgttagttctccgtttgttggacatggatcttgggctggtgttctggcagtaactgccggggcattagctacggccgttaatggatttcagcacggtggacaagttgggatggtgtttgaattgtatagaaactgtggtggtgcttttaagcttgtggaagatgagattgaggctacccttgcagaacaagagttcgagaaaagagaaaatggggagttgtttaaaatgaaattagctttgaaattgggaagaagcttgtcgcaattggatgagcttgctgcaaaatctgcttcgtcccgtgctaatggagtggccattgacgaattcgctagcaagcttatctgagtagtccattttttaattaattaaattctttgagattaatcataattctttgtaaaaatataacgtaggt

SEQ ID NO: 48392 - DNA, 985 bp, Cannabis sativa
gtgctggatcgtcatcgcctgctcctggtgctagatcgtcatcgcatcctcccaagactcagagaaacaacgacaatgacattactcgcctatagatcattagatattttatataccaattagaactttacttttttttttatatctgattcgagcatctcttaatattttgtttatatactaatttaagtagaacatagtataattaatgtttgtttatgttttaatgtaaaatatgttggtttttttcttaatataaaatataatataattaattttgagtttataatataaaatataatataattaatttattttaaaaaaagtttcgaggttctagattggcgcaaaatgttttgtcggcgcacttattacgctgacaaaactttttgcgccaatctgagaaatggcgcaaacatttttactggtgcagtcttgcaccgacaaaaagatatcaaagaaggttcagagcggataagggtatcattttacaccggcgattaccttttgccgacgcatttcccctatgcaccgataaaacgttctttaccaaccaaggttcgctgacatattttgctagcgaagtataacgctggcaaaggtttgccggtgcatgtagtgtacttttgttggtgcaaaaaagcgccagcaatgcgtcgacaaaaagaagttttcttgtagtttcttgattttcaaaattttatatctccttcgtttttcgtcggaatcgagttccgtaaaaaccaaaattgcttaattttttcacaaggaatccaaatatattattttcatggaaaaattttgtaattcacatacattcatcaaattacacataaaccaacatgaacacatccacttcaacaaatcatcgtttgatgtccatatttcatgaaagtaaatcattacaatggctctgaagccagttgttgggattaattttaccaggatctagatttactaacatgtatgtttcattaacagccta

SEQ ID NO: 48393 - DNA, 930 bp, Cannabis sativa
gcgtcgatagcgaatttcgcgaaaactgacgctgaaagggcttaaaaactgcctctaaagggagttttttgtagtagtgtatatttgtgtatattgatgaatttgtcacttgggtctttgtatagaagggtaatacttttttattctgtgagttttctttatcattcagagtccatgttgcttgccttgctttacttgtgtgatatgattttcatttttccgaagaaacttgtgtgatgtgatttgttttagacaagaaacgaaaattctattagagtggggaaaaattacgaaagatgataagtttcaatttcatgatatgattatgacatgtcttttttatattttttattttttgaacgatgaaattcatgatatgacatgttattgtagaaagctttctgtcttttttctaggacgtgtttgtgtgctgatatgcatgcacttatccacaatagtccataattatgtgctagtgcagactcaaaagtgcatttagatcagttcttttccacaagccttatttatttattactttccattgtcattgcttcaggaaagtatgaaggtgcatttgatgtgattgtgatggaagctgaagtatcgagagttcagccaagaggtaaatgttgaatcagctttagcttaagtttatgactgcaaatagaattttggaacttgtatgaggagatgtgaatcattttcctatttgctcatatttcttagcctcatatatcatcataagaatattatggcaagttgggtgagaaaataagtgcattattagtttcaatttgttagagagattgcattccctgtatagatctactaactgtaactgtaactatacctaccaacgaaacttacattgccttttattctaactgtaactctataataaggaaacttacactgcctttattttttttt

SEQ ID NO: 48394 - DNA, 1246 bp, Cannabis sativa
tataaactgacaaactattaaatgaaagggatatttgcttctttgctctttttttttacttttttaaatggaaacttcatttaaggataattaaaaagtaagagtcctacaaatctagtggaaaaaccacaatctcacaacaaaaagataattgtcagctaaccacaccgattcgaaaagatcaaaaaactcaaggctcatacaggagcataaagtgggataaaaaaatctaaaaaaagcatacccccaatgccactaaagacaaaaggtgcacatcactgatagagctaacaaagctaaaaaaaacaaaccaaacataaacaaaaagaaaaacgacttcaatggtcaccccttaatgcaaaggaagcaatacgaaagactaaaacaagtccaacaaaagcagaggagcaccaccatcttccgacgagaaaagtccactctcattctcccgaagtggttctgaacggtgaaggtgttgggacaagggatgcacatccctttgggtaaaacttgaattcccccatctacatcaacaacactctgaaagctaactaaaaaccaatgtgcattagaggtaggacgcctgaataaaaacccacgagcacccattgagatctaaaggaaaaaaaaaggaagaaagacacaactccaaagcccaagttcacacctgaaaagggcaacacaaaacgacatctccaaaattgaaaggaagagagctaagataaacccaccaccatcgccaccctgcaacccacgaaacagagccatttgcgacccccaaccagaggtatgaggcctcttaacaaagatgcccgaccactcacctgaaaaaacaagcaccatggatctgaccctaaagaatgaggtttgatgccttcaacacctacaaccgccaagacctgccagaggaacctccctctttgctcaaaaaggatagaaagcaaagctcccggggcccaccagcccagatctgaccggcggcgcccaaaggagtagaagaaccctaaaatagacttaaagataaaagggaaagaaaccctaatctgagagagagaaaaacgagtttggttttgcttcttttctttttaaccagaggataattgcttctaacccacctaatttttaatttaggtaattaataagcgataattacataatacattattttttttaaaaaaaaaaattacattttaatgttcaaatattttttttttatattttttacggttgttgcccctgatttcgc

SEQ ID NO: 48395 - DNA, 1042 bp, Cannabis sativa
catgtactcattcataataagaaattatgtaaggtaattttttttaaaaaaatacctacaaaatttttccgcacgcttttttaaatacaaatacataaaaaagcttttccctccttttctccaaagagtaggatctcgagaagattagccgactgagattcatttgaggtccccagattgattctctgcgttcggctcctctatcttcttcctcgtcacctccgtctctgccgtttctactcagttgttccgccgccgatttcgggaacctcatcttttagattcgtcgaattggacccatagaaggactgttcgtcgtggactgtacctttgcctgaaacctcttttcagcgatattttccggcggcgcatcaactaactcaatggagagaatacacgtggccgttcgtgctcgacctctttcggttgaggatgctaagtccagtccatggcgtatttcttccaacgccattttcattcctaatcactcctccaagtttgaattcggtaattaaactcattaaccctctctttattttatgtctgattgtgaggagtttgtaatttttctttttgttggggattattagatcgaattttctccgaagactgtaagactctggatgtttatgaagcccgaactaaagaaatcgtttccgctgccgttgggggtttcaatggtacgtattcgaagcataaaattgcacttttttttgggtgttttgtattaatctgtaattttcattttttacttttaagaagactaactttaggttcatttggcacatttgtaggaactgtatttgcttatgggcagactaacagtgggaaaacttttaccatgcgaggctcggctatggagccaggtgtgattcctctcgccgtgagggatttgttcaatacaattcatcgggtaattgatttgttatgatgttgtagtcatattcttaaaaattggcaccttatggaagtatgttcgttctttattatactgcaagtacaatgctaacagacaagtaatgttaaaattgctgtcagaaag

SEQ ID NO: 48396 - DNA, 810 bp, Cannabis sativa
  modified_base (626)..(635): a, c, t, g, unknown or other
ctatgtttgatatggtatagtgatataaattttcagaaaaaagaaagaaaaaggtatggtgtaatgtatgggaataacaaagttttacatttttgtcatttttagctgaattattttcaaatatattatgaattattttttgttttaagttgaaaaaattattattattatagatataaaattacatggatgagttatcttaaattctttgaaaatgtagtatctacatattttctcaatgtttacccacttgacgtagcatctccacgtggcccaaagctgaggatacgtgggagacaagtcagcactaaccggctagggcagtgtcgtgcaactccctgatcctaaagatctcaggttgcaagatgagctcaaacaagaagagcatggagacttacaagttccacatcttcaaggttttgaaacaagttcatcctgatatcaaaatctccagcaaagctacggggatcatgaagagtttcatcaataaagacagagatacaaaagtgttgaccctaaaaagtgatcaactgacagcggggtcgacagatctgatatttgccacgtgtatgagaaacgagatttgttatagaggttcgaccctcttgtgatagcgggtaatgacnnnnnnnnnntttagttgtattgatactgagagaatctatagatactatatgtgggatctgctatagtgccctttggattacaatgtatggatcgatgcctagtagactcgagtgttggacaaccaagagtgttgtacaacctatgcttgggcatgtgagaaagtgaggaagagagagagagaga

SEQ ID NO: 48397 - DNA, 1617 bp, Cannabis sativa
  modified_base (1579)..(1585): a, c, t, g, unknown or other
gaaaatatagaaaaaacttcatgtgtgatgccacctcaacctccttaaaaccttcctttatatatatatattgattattattattattatctcagtagttatataatatataattggctttttttcggctcttgtattttctatattccttcagctgcactttctttttgtgatttgatctatcatgggcaaccctcagattttcaaatttcatgcattttttctcatatgaaaccaagaccataatttggaccgtaaatatactgatatttaattaaaactattttaaaaagaaaataataataattatttgaaaagtagcttattactttaatactaattaatttagggagtaaactctctctctcaagggttaatagtgagaaaaattaagattttttgttcctaaattcatagctattggccaggcttgtgggccatccttgggtctagatgtggctaattagtactcaaggttgcattttggtactataattccatttttacttctataattagtcttgtagttttgagtgttttaattttctcagtagtgtgcacataattttttttttttgttttgttttgttgttaattcttctttgttcttcgattcgatgattcgccaagtattctctgcgactaaatgagttgtttagtagtgtactttacgtactttacacaatagttgagtgctcaagtattctactattgtattttctaagcggtggatgaaacagaatataggtattctgaaggttaattgtgatgctaaaatctttttcatgtgatttattttaattttttttttgacaaattaacgatctaaaaattagacgactgattatttaactcgtttttctaattttaattctgattgagtcttcaaggaaaagatatctcgtttagattgcaggatattattttagttgattgtcattaatgaaattctattatttattaaaaaggaaaaataatttaaggagcagatttacttaggccaaagtatgaatatcaaatattcaaacatccttactatattaacaaggtatatgacaagagccaggcatatatgtttgatatgcgcttacaactttgaacatattggcctgacggaaagaaaaaaaaaagctatatattggaataaaatgttatcaaaactgtgaagtatggttttaatttctttttaagagaaaccaaaatatggtttcaaaaaaacatatatatatattgtggttttatttaatttcagtatcaataccatcttattcattgtgctggaaagttattattaagtcagccatttttgtaacaggataaataacttctcttcttaaattgtgtctactctattgagttttgctctcccaacattttatagtaattataacaaatttttctattttgttacattgtatacatttttttaaacggtttgctggtctggtcatggacatattagccagagatataattatagcataggccgtaggagagtaactgcaacgtaaccatttaagcgagcattcttattgggcactaataaataagaacagatatatatatatatctattctannnnnnntgtgcctatataactgaaattcttggtttatg

SEQ ID NO: 48398 - DNA, 1008 bp, Cannabis sativa
tgcaacaagatgatgaagaagttcagcactccggtgacttttggaagaaattttggaagttgaaggtccctcctaaagtattgcacttcggctggagagcaatttctggtagtttaccaacaaagactcaacttcagaccaagcatgttaatgtgaataatgtatgcccagtttgcaattatgcagtagaatcaatattccatgttctcgtctcctgctcttttgctatctcctgctggaacaggtctgccattaatgttaaaccagtgttgattgaggattttaaagactggtttatggatgttacaagggatttaactgctacacattctacagaggtaattatggtggcttggcaaatttggaatgcaaggaatgatgtactttggaacggaagaggtaaaagtgcagctaatgtagttacggaagcaagatcttatcttaaccaatggttgtgtgctcaaaagaatagaatggaacctgttcttggtttaaatgaccaaggatgggatattgagcattggacgaaacctgatatggatacggttaaggttaatgttgacggagctatatttgcagcaaataactcttttggttttggtttcattgctagaggctatgatgggagaattattgaagctgtatcaagcagcagtgttggtaatgtttcccctgaaattgcagaagcatatggaatcaaggaagcccttagctggataaagggtaaagattggcatagagtcttgatcgaaaccgattgcttagttgccttacaaggcattgctagcaatattcaactaccttcagcttttggtagtattgtttgggattgtaagcaactcatctttgagttgggtaatgtctctttaaagtttgtaaagcgttctgctaacaaggccgcgcattatcttgcgcgtagtgcttgttataatccagttcgcattttttctcataatagctcacctctagagctgttaaacattgtaatggcagatttaatttaataaa

SEQ ID NO: 48399 - DNA, 1131 bp, Cannabis sativa
aaaatgtaattttttttacaaaaagtagtgccttgtgtaattactctatttttatttgtcttcaattgtagataattctagatataaagtgggtgatgactttgacaaaatattactctttccatagaaataattttacttgttttttatacaatgtgatgtattatacaaaatagtgtcttgttttttatatatagtatttgtgtaattgaaagtaattatgagactttaattattctcttcaattcctcccatgagaatttagtataatcacactgtgtaattacacattaaaaataattttaattatttaattaatataataattatttaatataattaatcatttattttattttattttattttctcatatatataattttaatttttttttattttataattttttttagtataatttttcttgtattgttataaataaaaaagaaatagaagagaaactaatatatgtatatatgatatatgattttttttatcattatttttttagttatcttttaaattaaatatctaataaatttatttataatttaacataaattttgattgatgactttaatttattttatcattaatgttcaattaacaaaggaatgttaaatacttaaacttctaagactgaaaaaccacacaccatcatagcacaaaatatatggtatgcaagagcaattagatagtcttaatacataaaaaattattttaaatatttgttacaaactgttataaaatttgattttattttttgatgagatttttatttattttaaatattattaatagataaaatttattttaaatatttgttacaaaataataataattatcatattattagataagtgttacgtgctaaatcatatagttaattttattttagtttttagtttttcttttaatatcatatattattttaaaattaataatattcagtacagtaataattattgaaacttgaaagcataatagtgatattaataaaaacaaaaattactattatgctttgtaacagtaatttgaaaaaaaaaattactattttatcttctacaattaatgacaatgtccatcaagttaaactattaaaaaattcaaatttaatttaaaataata

SEQ ID NO: 48400 - DNA, 1377 bp, Cannabis sativa
atatggatatttttatgtaggatttaaattagtgatatataatttgtatacggtgataaatccaattgcatgagcgataatttttaattgagaacaaaaatattgtatatcaattagtcgttgaacgtagttgtagcagtgagctagctaatcaatgacattgagtcatcatcgccacggataagtcagtcacactcatattaacaaaaccttacaagaaacctagaaaatataactatttaatatatagtttaatgaaaacgagaactttgtacacatcgaatatgtattctctttctcttataaccaaaccaaacaccatatttattatctccatccaataatcttagtactgtttgactggcatgaatatcagttgaatttaagacacactgcaaatccaaagagaactcaaatcaatggaaactagttatggtttcaattggtggtggccaagcctcatctctctcttctttttcttccctttcattcttctcaaattcatttccaaaagaaattactcaaaccacccacccgaacctctcactcttccaataatcggtaacctcttatttctccgcaaaactttcttccagcttgagccaatcctccgcaacctccacgccaagtacggccccgttatctctctccgcgtagggtctcgccgaaccgtcatcatcgctgaccgtgtcctcgcccaccaagcccttatccacaatggggccgccttcgccgaccgccctcctgctctccccacaagtagaatcttcaacaataaccagcttaacatcagctccgccaagtacggccccacatggcggctcctccgccgcaacatcacttcggagatcctccatgcttcgcgggtcaagtcttattcccgtgctcgcaaatgggttctcgatattcttatcaaacgccttcaatccgatgatgaccaaggtgttgggcaaataggtagagtgatccgtttgagtagaaaaattaaatattttttgaaatattaaattttggtctcaaaattttgaaagaaaaaaaaagttaaaaattagacctatattatatatactcgacttttgtcaatatagttttttggatttggaatttctagatcttttcttgaaccaacctctcaaactcaaaggagtcatatttattaaaagtggggcaccatttttttttaaataaattacattttactacaatttttttttttaattttttacggttttcataaagacaacaaaaaaaactacataaaaataatatgaaaacaatgtcaaaacaaaaataaaaaatagcatgcaagtaacgaaaaatcaacagcaaattaacaataatacaacataaaaaaatcttattttctataaataaaat

SEQ ID NO: 48401 - DNA, 1778 bp, Cannabis sativa
  modified_base (139)..(141): a, c, t, g, unknown or other
aactttttctaaaagttgggttggagcagctttagcttttagctgtagcttttctaaaaaaatttcaaaaagctgttttttgactgttgccaagcacatttttttcatagctttttcaaaaagcagcttttagcttttnnnaaagctgtgccaaacgggcccaaagtgtggttgcaaggagtagtgcaaaagaagaatataaagctatggctaacatagtatgtgaggttttgtggataaatggtgtgctcaaggagctgaagttacaagtttgtatgcctatgaagttgttttgcgacaacaaggctgccataagtattgcacataatcctgttcaacacgaccggaccaaacatatagaagttgatcgacactttataaaagagaatctagaagcagaagtaatttgtataccgtttataaagtatgaagatcaaactacagacattcttacaaaaggattatttaaacctacttttgatttacttgcatacaagttgggtatgtttgatatttacataccaacttgagggggagtgtgaattaacgtgtaaaatatcaactaggtcagtcataagttgttaacatagagttaggagttagtttctatttttatgggtgtgatattatgtaatttgttactgatgtattttattaaaaagccaattggcacatgagtgaaagataattacttttttttttccctaaaactacaaaaggcaacagaggggatgtttctcgagtacaaaaattggttggggaggttgaaaatgcctctagaaaatggtaaattttttgctaagtcgtcagtattttttagtaacaatacctctgttcaagatagagctcagattgtttctttgatgggaattattgaagctgatgaaaataacaagtatatgtggttgcctaatactctctcaaggaataaaaatatagtatttggatatctcaaggatagagtgaaaaagaaaattcaaagttgggatggtaagcttttatcacgttctggtaaagagatccttattgaagcagttgttcaaactctcccaacttatgccatgaatgtatcctaattgccaaataatatgtgtaaagatattaagaggtgcacgagtaaattttggtggcaccctcaatcttctaaaaaaaaaagattcattaaagttggaagaatttgagtcaacataaagaaaattgtggtatgggatttaaggatctcgtgactttaatttggctttacttggtaagcaagggtggttgctactggctaaagaagacagtttggtggacagaattttcaaagcaagatactttccaagaggttcttttctttctacagatttgggctcaaatccaagcttcattttgaggagtgtgttggccttgcaagagttgattaagtagggcattcgaagaagagtaggatcgggtactagcatttatattctaaaggatccttgacttattcatgagtctaatccttttatttcctcaattgacccatctcttgtaaatgcaaaagtgagctctcttatgaaattagtctcatgagtgggataaggaggtactgacagatgttttgaatgcaagagataataatttggtctggagcatcctattgagtgcaggcattgatcacgattcatggtactagtgtaaagagaaatatgatttttcttctataaaaagcgcgtatcagctcctccaggacaccagattgtaactcaatgttttggcgtgctctttggcgcaattaaaaattccacctaacgtca

SEQ ID NO: 48402 - DNA, 1708 bp, Cannabis sativa
aaaaacaacctaccataagctttgtaaagactcgcaccacacctctctcaccatttcgaatcaccggccccagctaatagctcctccatcccaactaacaacaacgcccttataaagcttaaaacaactcgggtctggcaatttctaaataggagaagaaatggcagcccgagaactacatgtccccccttcttatcaaattcccagagccatcaatagcattatccctccccatcatatactcaaagtgagtaaacttacttgagatggttagatccacccatttgatggcctcctagaacttaaaaaagatggcactctccttctcccgaacaatcaaaggattatcaaccctttccccaaccttttgtttattaccctcgtaccaaattagccacaacatcatcaagtaggccgcacgatctgaggatggaatgttactcatgatgtcaacaatcaccatttcatgatgttctcttcccccaactctccacattagccacccaaggtgtagctgttgggatttaatgtcttaaataaaactcaattatcagtataatcttatttactatcaataaagatcataaattatatcttgactttgtcatatattttgttcaaatctttatgattataagtttaatatatacattttattgaattttgaacatatagttatttacaattatagtgatgtcatcacagtagaaattaattgtgattaatgattcaaattatttagtcttgtaatttattagtgtaccggatttacactaacgtgataatcagtgatgcagtgtacttacatgtggataaataaaatgtcttttctaagaaattaacaagtaaacttgtatcagatgtattagctatccatcgaactaaactgatattgacagtggaaaatatatcataaactaaccgttaaatctcttttaagtcgatatcacttagttgatcttagatcaattgatctcaatcctgatatggttaggttctagtttaattatgctatgcgggttttttaacttgttcattaccagctaacccgtaggactagcccatgcttacatcttaggaattcagtagtgcaattgagtgggagcattaatcatagatatagaatatataacttctataactatgagtgaaatgatcactactacaaagctaggatttcctgactgttttaaatagtcgggtaaagtgtttatgtcaatctttaagattgttgcctattcaatcttcgaaaaaagtgagtagaataggtgatggtggaaaaccatcaggaaaacttttttcacgactgtgcaaaactgttggggatactgtgcaacatcgtcgatagttttgcactgtcaccttagatgattaattctaaattgggaatttcacatgttccccttccaaaaacacaaataacatttaccccccaagcttcaaagaattgagagttgtggaggcttgcaatcttctctctggattgttatggacatgtggagaattcaaaaaaaggagcgacctttttaactttagtattctttggtcgtggacaactagggacttttggctttcagctgctggattacgcatggcactagatccttgattcgtgaacttcacgtgtgttgagaaagcgcgtaatgcttaggatagcatgttgatggtaatcatgtcatcacttgtactgaggtgaacgcaatgattt

SEQ ID NO: 48403 - DNA, 1526 bp, Cannabis sativa
  modified_base (355)..(359): a, c, t, g, unknown or other
cgcctgacagtatttttgtaaaagaatggcaaaagttactataccatgtaaatatcccattatcttcaatcaaatggttgatgtctaaactaaacttctttttgtgttgtgatttaatttcttctccactctttttttttttttttttttaaattaattgtagtagtggcaggctacaaaacttgtactggtatcatctagcttcaacattacaaaaagacttagataatttcataaatacacaaaaacaaacaaaaaaaaaaaaacaaaaaatatgtttcacgaaactttaatcattattacgattttttttattttatttatagaaaatatagtctttttatgttgtactctnnnnnatttattgttgattttttattatttgtatgttattatttgttgttactttgatattgtatttagatattatttttatattacttttatagttttcttgttgtttttatgaaaaatcgtaaaaatttaaaaaaaaaattgtttaaacataaaaatgtaattttttttacaaaaaataatgtcttttataattattatgaggaaattatctctatgtttatacccaaacctagaaagttggtgggcaagcccatggtttttatataaattatcatgtagaagagaagagttttcctaaaaatattataattgaatatcttggaaaaatgtataattggaaaataatgtaccttatccatatacacaatgtttatttgatcattttcatttatttatattaactgaaataaagatagaataagatcacacaactgtaaaatagaaaatatatctaaaaaacatttaattcaaaacaaacttagctattcaatatacgattgatgctagtgaccaaactatatactctctgaaggaccagcttcagaatcagaagcttgcggtgcaagttttgtaaagtaaaatattgatgggaaaggctctctctctatatatgaatcttatttattatatatttatatatatctttcacttgttatttttactctctgaaacaccacaaatttttttttctaaaaaagtttctacgtagtaatatttattttttcttttcattgtctattacttacttattgctataaattaagtgcaacttccagctagttacatataatacaaaaaagattaattgttgcaagtttaacggaagaataattaattaatattatgattttcataatttataattatataagttaatgtattaattattaagatttttttttttttatatcacaacaaaatttcttttttttttttcccacacagctaatttagactatagctacaacaaaatttaattacttcagttcagcatcggcaaaattattttctcattgattaatacagctgcaattttttccatgaatagaattaaaatatagaatcagtgttttttttaatattactactccgtacacactctttgatcaaataaaatggttcaacatattcattgataatatctccctcactttttttttttttttttt

SEQ ID NO: 48404 - DNA, 1661 bp, Cannabis sativa
  modified_base (1128)..(1135): a, c, t, g, unknown or other
aacaaatactgatgcagatatactgaacaaaagcaatatctaatttgccacacaaaacatgacacttacattctctaacaattctgttctcaaataaattttttaaaataagagagtgtatgtgtatgtcaatgtcaatttccttacacttgacttaatttattttatataggtatacatctagagcttagggtttcctaactcaatatgtctcttttcctaactagaattaagtttaaaatataaaacaatattcaaaactaaatatcttcaaaaaatgataagtacttgttgtagatatacttagattagctctgatggcacatgtatagcacgagagtgtctttcacacgtgaactcaagttcacgtgcgtgcctagtacgagagtacctttcacgtgcactcaagtccacaaatgcctatagttgttaggttggcctaatatatggagcactgaatgtcagtttcagtgtggagcactgaagggcggcctgttgtggagcattgagggtcagcctcgtgtggagcattgaaagtcgttggtcatgagtcttcatgaattttgccatgaaaccatatattcccgatgactctgttgatatccggaagaaaaattcatgcacatctacattcgatttttcgaagagaacataaatatcataagaaacaagatacacagaagatgatctattatatagttttttacatatatatgagagtggaggatatcatccatgcatggacaatactctatactcatctaagcattttattgacatttcaagattcattcatgaagaatatgtactattaaaaatggttaccaactacttgtacccaagtgtggggtagatcgactcactctcatatagtatcatattgtggttggccgtgacagattaaaaactaagtagagattattgaaatttcagatcatgaacaactcatcatgccttctttgatccatgaaaaaaatgtaactcttttgagattaatctctctggcactacaaaaaatacatacttttagtgataattttttagttacaacataaattttttataactaaatatgacttttagtcacaacaaaaaaattatttgtgactaaacatagtatttagatannnnnnnncactaatttagttttagtcacaacaaatattgtgactaaaaacatgtttagtcacaacaaattgtgatttttgcacgaatatacctttagccacaatttttttaattataacataagaatgatgatttataattagtcacaactattttacttttaatcataaattttattgtgactaaaagtaaaaaaacttctagtacggactcacttgagtaagtttcgtcaggacatgaagtttttaggttgtttacggtgtgagattgtacatcatattgttagtgatgtaaaaagtagagtatgccgaaaaaagttagtaacaattatttggaatggtaatctatcataacttgtatagaaaaatgagtatattcaggcctttcataggtgttgttaagttttaatgtttgattgattttaataagggaaaaaaacaaaaaaatacaaaaaaggaaaaaaaattacaaaaatactttgggccggcccattaaacatttatacagtccacatacaaatatttataaaaata

SEQ ID NO: 48405 - DNA, 1804 bp, Cannabis sativa
tttttttttttttgaattttgcttaaaagaattgctaattggtattaggtaatgatggtgtttaagactatttgatatatgaaatggtcaatataatttaatttaataattgatataatatttacttactacttgtcaaatatcattttatattttatggtagtattgagcactattacttaataataatatattttttgagaattaagaaattatttctaactaatgaccatgatagttattgataaaaatagttgtaactcacaaaattataaatgaatggatatagaaatataaaactactttttaatgtgttgtttttttggttttagtctcataatataagattcatttttttttttttttttgtattgacttagttttaactagttagtatactttcattgtcacaatcagtattttgtttttttttttgtttttcttcttcttatttctaaaaccttattctaaacaaagtcactctgaagtcattccaattgtcaagttgaaattcctacttctttcaatgagatttcatttcaattgcacaactcatgtatttaactaatatttgtaggtctgttttataatttttttttatatatttttttcaaaaaaataattgcagagaacaccaccgatgagcaaaaagccaagagctaaaatatatcattaaaaatggtatcgccaaaataaagtttttgataaaaaaaaagatattcagaccatctaactgttttataatttcggtatataaataagttacaactatattttcttcttttacatatatattttttgtatgatagtgttaaatgttgttgaaatagatcttacataaaatttaacctgtctttgaaaatacatgctgaaatatatttttttcatagtggtgaatttaaatagaatttaatccctttttatttatttatttattactattctatttcgttatggttacaacatcattgctataaaatgttgaaaaattctaaataattcactgtatttaaattaggattctttatattttaatttatcactcgtgttcaaaatacttgtaagtataacgaagattgatatgattttttttagataaaaaaatatttcaaaatgtgttttttgacgcgaaagttgagaatgagattattatagaagattgtaattagcactcattcataacttatcatacacacatataaatattgaaataagcactcactacaaccagtttaaatcttgatttcaacatcttaaattatttgaattttactaaaaatatccccaataagaccatctctaataaaaaatttaaaatttgtgctatattgtgatgcacgagatataaaataagaaaataattaattaattatattgatggttatttaatattttattgagaatgtataaaaaattattattttttatttttttattattgaaataattgtaatatggtaaataaagaatctaaagtttagtaaaaaacaatgaatcgtaataatgatattatagtaaataagaaaatagtatttattgtaggctagtttggcataatttttagcatttgttaaatttaacatactttttagaacattattagagaagtagtttttcttacgtgtgataaaatatagcaatacactattttttttggcactcaattgaagatgctctaactatacattatatacaccatcatataaaaatttacaattgatcattacatcaaaaatttacaaccgatcattatatcaaaaatttacaattaatcattatccctaatggaggaaagctcagatat

SEQ ID NO: 48406 - DNA, 1084 bp, Cannabis sativa
attttcattaaataaaaaataaaatatggctcggctcacatggacagtgtcctatttacacactcattcttctttcaaaccttttcggccatcatttatacctctcttcatcccaatttctcaacaaatctcagttttccaattcttcattttttttagttctctctctaactaaaaaaaacccctcaaattattttttattcttttagcaatttatacaaattacattgtgtgtgtttacttataaaagcccatataatgatgatgaattattgttcaaaagagtacaataataacatccttaatattggtacgaataaggggtactcggcggtggcgcggtggcggaggaggcggcggaggacgatgtcggcacggcgaggattggttcggatgaaagtgaagaagctacaaagcttaattccaggtggaaaagggttgaagcctgaccttctttttcttagaacagccgattatatcttacgtttgaggttacaagttaattttttgcaagcactttccaaaatttaccataattaattattcactttattatatataaaaaattatttatatatgtattttagcttgaattgtagagctagtagtaaattaattaagtacttctctctcttataatttttctttagttaattttattttggttttctctttctatatatagtattagtatattacgttataattttttttttatgtatagggagaatttatgtgatctctctatatatattggttcaaaatttagttaatctatttatttaattttattatatatatgaacttttgtaatcattttctttgacctacatttacgaacgtgaaagagtttttttttttttttttgggcaattgcagatacagatctgtatataatacatcttttaattctattgatatattaattattaagatcggaacacagtggttaattcggtttaagaattttaatatacagtttaattactgtttcatttttaagaagaaattatatataatataacttcttaataaattaacattaaggataaggacatgtatatatataaatttgtaatgaaaa

SEQ ID NO: 48407 - DNA, 1433 bp, Cannabis sativa
tttctttattgatatttaaaagatagagattacattgaaatagagttttatttatggcataaaacccaacacttcctaccctagtaacaagcctattgttatgcttaacctggcttctcagagcagaaaggcacccaagcctagaggtattggtagccttatttttctgtaagggttggttggctgtgttcatgttgttttttgggaggtaacaagacagttccaagttaaggttcaactaccttttccttccccttatcctttataggagctgaggttcttacatcagtatggtttgctgtttttccctattaatgggctcctctggagcgtcttctttggagtcctcatctatatcaccaagtttggcttgcagccataccatcattttctccatttgtcaagagaaagcttcttgttctgccagctactgttgagtttcagctaactcaccatatacttgggccacctcagggtcttgttcataatagtatctatctttgtagtatccatctctgatttcactatcattttcttcctcctattcttcatcttctaggttttctcaacgaattgtcttgatgttgggttatttcagccactcggtcttcggtctcagacacttttctgtcgctcatatttctttgctaagcgtgccttggaaggagcagattcgcatcgtccatgatgacatcctggcctggaggaggggatttctcgatgacggtcttcttggttgcctccatttttgtagatgcaaggtagctttgattctttctacaactctcaataaaagcaccaaaatgtttgccgaaatttttggaaactaaattaaataagagcttaagaaattaaataagtaattaaataatgagatggagaattttacgtgatttgagtataacaaaatcctagtccatgagtcaatgtattggcctaaaaaggcttattgtattataaatgggtcttacaatttgaagaaccctgattcttgctatattatttttctctctaggtttctcttagaagaagaagaagaaagcttagagggaacttagaagtatttttcctccatcctccaccatgaaggggaaaaggggggggggggttataggcttagagtttgattcgggtatacctatgacccatttaggcaacctgttgcatagtctgaatccacaaagccttcaatttcagcatgcgtatctcttccttcagctccaccatagactagacaccttccaagtgaccctctaatgtaccttagaatatactttagttcctaccaatgagcctttccaagatctgccataaatctactcaccaaactgactgcatatgttatatcaggccgagtacataccattggatacatcaaggagccaactacattttcatatgttatactctccatgtacttctattcatcatga

SEQ ID NO: 48408 - DNA, 3104 bp, Cannabis sativa
  modified_base (47)..(60): a, c, t, g, unknown or other
ttttagaagttcatatttagggtggtaatcaacatacttgtgagtannnnnnnnnnnnnngtaaaataatttccaacatctaaagcattccaagactgttttggaacaggctttccatacttggagagaggcccaaccgatgcgtagaaggaggcttcggcgtaaggagttgggtccatgtcaagatgggggcacacttgcccctgaggtgctactttgctaaattttgtgtattagctagagtagctcctttccagtttatcccctaattatattgtcttctggtgggatggtatgttttttttttgtggtgttaaacaaggcaaacctgtgccaaactccgaagaaagagattctatatttttactagatcaaatcgcaattgatgaggggtcacaaggacaaggtgagcttctaccaattgtagagataccgtacaagtgtaccttgcccaactagccatacaaagtacacttaagacttctaggactattacttcttcacctttggcttcccattgaggagggttcccaccctcagtttagacttcagtcttgcaagtaagtcttgtttcctgttttggctcacaaagttctattttttctttgtactcattgtattctgattcaccactattttttgtatgttacactaccttcctcaatccaccttgaatctggagcttgaagagagagtcaatttttacaaatccttctcgcccaaggagttgtcggtgaagagtttggtaaccatggaaaatctttgggaagtgggtctcattgccccacaccaggatataacacctatctgtgaaggagtcattctaggagggactcgaaagatgttagagaagccattgtggtcatgactgccaaggaggctttaaaggcagtgaaggtcgatgaacaatggctagaagacttgagaagacaattcccagcaagcttgagtgaggttgaagaactttccgtccatttcaaggatgtgatgcccaatgaaggtgcttcaggagcgagcacttctagtagtggtgagaagccttttcgtataattaaggctccctctgtgtctgattttgatatggtcaatcagtgtggatttgatcaataagtattcttttagtagatacgtagatagggtagactgcattgtctatagtcctaaccactttatctctcctatgtaccatcatgtccaagtggatccacttagaaaaatcacttccctagattctcccaatacaaaaccaatttaggttgagcagacatcgctctgtttactaggggaaacatctattatgctaggattaatggtttggaccatcctgaagtcttgcatgcttacatattgtaaaattaatgccttttgatgtaatttcttttaatgactgctctatgtgctttatgacaatcaactaacccctctccaaatatggcttctaaataagctttcggcagtgttcaggctcgatttgacgaaattagggagatcactcaaagcggtaatgatggcagaaagagccaggcctctggaagcagatgttagaagttagcacccccaataccaaatttagaagttgttcctaaggctctgagtatggaagcgacgtctactgtcattgtggacctgacagattccactttgtttgaggaacctctaaatcaagttcccctagagaattttggagaagatagttatgattgtgatgggctcatcatgcccaaaaagaagtgtgcaagctcgtctgatggtggtgttagcaagaaggctagggtaaaaaccaaagagaaagtcctgcaacaggcagcttcgaggaggcaggccacaaactctcgatcctggaagggaacctcctcttttgatgatggaaggccacctagacgaagcactcgtttgtgagggacaagcaagaccttccactaccacccccaacacctaaagtggttcctaccacctcaatcttattgtccaggcagaggaccgagttgcctccgttgcctccagcacctttcatacttctcgtcagctcggtacagttgacagaagtgagactggaagcggtggataaattttaccaccaaagggcaactgtgaggttgaggaaatgagtaaattatctaccagaatctcttccagccacaacactgagttcattaattatgacaagtggaacgaggatgctcctcctatcataaacagggttatactgggagagagagtccgtccatgcgttgggactgacttgtcaccattcttggtagatctgttggagtagagcgctgccacaagctgtaggcttagctgatagatttgtcgtgatgtatagcagggagccgatatatgttacttatcttttgaggacttaagccaatgctgtaagttcaacactcctctgacctaaataagattctagtgtttccacattgtttcaacttacgtatgttcccttttttgaagatcagtttgatggcggagaagagctgctccctggtcacctagttggcctacaacttggaggtattgaaggccaaacatgccaatgctgaacaaaacagagaaaaggtagagagggccttagccgaagccgatgcaaatatggaggttgccataaagcagatggtctctaaatctctggaaaagtctttatcctgatagaagagggtcgccaaggtagagagggaatgtagagacaaatataaggacttacattccaaggccctcttctgcgtcaaagaatcggaagctgaagtgcagtaggctaaggaggatgtgcggcaggcctaacatgaggttgatgagaaggaaaagaagttcactactttgtctcaggagtacgataagcaagccaagataattgaggacaagttcatcaatgaatctactatggagaagaaagtgaagcttcatctcgaattgcaacagaaggcagaagcagttaaaacagaagtcatgaacagagccttagaggcagagaacaaactggctgtggaggctaaggctcgcgaagaataccaacagagaatcaccaacctagagggggaaaactccacttttatggggcgtcttcaagagaaggaggctcaacatgtcaaggctttggagca

SEQ ID NO: 48409 - DNA, 1070 bp, Cannabis sativa
ttttagtgcataatttgggtgcaaatactcgtcaagtaccttttgacatgatagaaaagacgggagaatacatttttaccttccccaaaagtcccaacgaggttggtaggtttcgtgaatgggagtgtcaggaaaagagcaggagtaacaatcggttcccgttccatttgtgaggtacaaattagcataagaaacatcgccgaccaataaaataagatcgggatggttacttgtcaagtgttcaatggttgatgtggtgttgtatgtaagcccgaggtctccgaccactgctatcctactagggtaactcttcgggccactctttggcatggtcttgaagtaataaaggttagtacttattccttcttcaacatctccacattggtattgatataatgtgtttggttttagtcctataaatgttcatacatttatcataattaaatgataaaaaaaaactaaacaatacctaacactatcacgaaatgttatattgatattattaagtatcgagtcttataataattattgtatagaactatatcaaccaactaaattatgccactgttactaatgtctaataacaatacttttaaataaagagttctagttgaattggttcatagcaataagtaatatgatatggcattctaggtttagttaagacaagaacattagtcaactttgtaaaattagagctaattactttataaaattaatctttttcccaaaaaaaaaatataattcttctctctcctcattattttacatttgaactaaataaattcaattttcaaataaattttcgttctaataatgtattttaaagaataaagtaagagtattaataataccggtgaggcgaacatggtgtataattccagaagaatagttttgtaggccttgaaaagggtagagttgattgtagacaagagaatagcctcttgctttcttagtaagtggttttccataaacaccatacaaaacaatgctatcaactctatcaccatccaatgcctttatatcctcaccaatttcatattcccctacataataaacaatgaccaatt

SEQ ID NO: 48410 - DNA, 4008 bp, Cannabis sativa
aatattatttataaattatattttttttgtaagggcccaaattttaaattagaacagtgcctccaaaatgtttaagacggtcctggtgcaatcacgcatcaaccacgtagtaactatcttgcaaccatcgtctaattgtgtaagtgtcactgtaatattttgataattaaaatcatataagagatataaatattgtctttgaaattatttttgtaaataaagtgaatttatattttgtatgtaataattattatataaaatgaggtaacgaaaataataacatggcacatcaatcattgattctaggcatccacttcccataaaatttacttgcttaaaggaaggaatgtccacttattattgttttctatcaaaaacaatttattatatgaaatagtaatataataataattaaaaaacaaacaatcaacaacatacgagtttaaacaaaacaagaagacgactagtcgttggatgagctgagacgctacgtgctgtttttcacacactcaagcgcgtgtagttcaaacagataaacgtcaaaagcagagtacgtggagacagatcagcaccaatgagccgttggattagatcagcttaggcttcttcttaggcaagacgaaagtaacaacaaatacagagaaacttgtccattcagagctctctctctgccatttttaattttttattttagagattgaaaaaaaaaaaatgaaaatggtgtcaaattcgcgctatagtaccttctgtaggactataaatacgaacccattttttcactttcccatattcaaatcctcaattgcatactttccccataatcgtctttcgaaaccatcgtcaacttttggtactatttctttgttgtctgttggtttctacgaaaatctggaagtaaatatcgttttctaacgagattttttgtttatttgttcatgttttggaaattccagatttaattcacgtcgagcattgtctgtttctgcttcggaggttagtacagattagtaaatcattgagccctgtgctttttttttttttcctttccaatttttgtgctattttttacggaataattgtttggattccaggaaaaagatctaacatttaccacagcacccaaaagaaagttcttcaggaaagaaaaagtaaaagaagttaaaaaaatgacgatcaaaccggcagttcggatcgtcgacgggaacttgatcgtgaagaaccggacaatcttgactggagtaccggataatgtgatatcaacgtccggttcggattctggtccggtcgagggtgtctttgtaggagccgtattcggttcagagaacagtagacaagtaattccattgggtactttacgagaggtccgattcatggcttgtttccggttcaagctatggtggatggctcagaagatgggtgacaaaggtagcgagattccacttgagacccaattcttattggtcgaaaccaaagaagggtctcatctagaaccggacggcagcgacggcgatggcgagaaccagatcgtctacaccgttttcctacccttagtcgaaggacccttcagggcttgtttacaaggcaaccaacaggaccaactcgagctctgtttagagagcggtgacgtggagaccaaagcggcttcgtttacacactcgctcttcatccatgccggaactgacccctttgccgccgtcagcgaagccgttaaggcagtcaaaattcacctcaagactttccgacaacggcacgagaagaaaatccccggaatcgttgactatttcggatggtgtacttgggatgctttctaccaagaagtgacccaagaaggtgtcgaagctgggattaagtctctatccgaaggtgggacacctccgaaatttgtgataatcgatgatgggtggcagtcggtcgccgaggacgtgaaaaacgagaatgaaaatgggtcaaacgacgtggaggagttgcctcgtttaactggaatcaaagaaaactccaaatttcagaacaaggatgatcccagtactgggatcaaggacatagttgaaatagctaagaagaaacatggggttaagtacgtttatgtatggcacgccattaccggttactggggtggcgttaagcctggtgtgaaggagatggaagggtatgattcagtcatgaagtacccaatggtgtcaaaaggggtcgtggagaatgaacccgtttggaaaactgataggatggctgttaagggtcttggacttgtgaaccccaaaaatgtttacaggttttataacgaacttcatagctatttagcttcagctggtgttgatggtgttaaggtggatgttcagtgcatattggagacccttggagcaggattgggaggtcgagttgagcttactcgacagtaccatcaagctttggatgcttcggtggctcgaaactttcctgataatggcatcatcgcttgtatgagccacaacacagatgctctgtactggtaagtccaagtccaagtccaaaattgaacttttcccttttgagtttttctttagtttgttgtcattttttgatttgggaatgcatggaaaacagttcgaagcaaacggcaatagtgagagcctcagatgatttctttccacgagacccaatgtctcacaccattcacatagcggctgtgtcctataacagtgtcttcttgggtgagataatgcagcctgattgggacatgttccactcgctacatccagccggagactaccacgcctctgccagagccttaagtggtggccccatttatgttaggtaccataataaaatttgtagtcattatttttcatcatagttccttagtcgtttttttttcatataaaaaacttatcatattgtttgacataatttactacagtgatgcgcctgggaaacacaacttcgagcttttaaggaagcttgttttaccagatggatcaattctcaggccacttttgccaggccggccgaccagggactgcttgttttctgaccctgccagggacggagccaggtactaatattgtgaatttgacactttaactaattcagaggagaaatattttgcttattgggtttgttttgaaccaatttatcttttttgtcttcagcttgttgaaaatatggaacatgaacaagtataccggagtactcggggtttacaattgccaaggtgctgcatggagcagcgccgagagaaagaacgtgttccaccaaacaacatcagacgccatcactggctatgtccgaagccgagatgtccacttcattgctgatgctgcaactgagcctggctggaaaggcgaatgcgccatctattgcttcagctctggcgacctcatcgctcttccttacaatgctgccatgcccgtctctcttaaagtcctcgagcatgacatatttaccatcactcccatcaaagttttagctcctggagttagttttgctcctttgggacttgttaacatgtacaatgctggtggggccatcgaaggattgagatacgaagctaagagtgaggtgcagaatggtgaagaggttgtgggattagctcatattgaggtcaaagggtgtgggaagtttggagcttattcttccgctaagccgaggaggtgttttgtggactctcaggtggttgattttgtctatgattcatcttctggtttggtgactttaagcttagatagtatgccagaggaggatcgtagagttcatgatgttgaggttgagatataagtgattgttgtaatagtaggctggattactatataaggagagggtagtattgtgctaatctgatgtaatttttatatgatgaagatagaatctaataaataaaccttttattcttctcaatctcaaccccaatgttatctatcatgaatttacctaaatgttgaagatgagatataaacttatagagtattgatattatgcaccatatgatgccaatacaatactgatctggtgtattgcgattgattaacagttttt

SEQ ID NO: 48411 - DNA, 1185 bp, Cannabis sativa
aaaaacttctttgagacttttaagtcaatgtgtgctaatttttagtgtttagttaattaattttgaaataaaacttcaggcaccttaatcctaaattctaacactcccccgtctaaaagaaaataacaatataataatgttaataataaaattattaattaatatgtcattatagtggacataatttaattatcgactattttataacacacaaataatcacattattcacataaaaatgaattattaattggaaaataagtgaatagtccatcaatgacatattgatgtaaatagtttaatgcttcaagtatgtattcactttttttaatggaaactttaatttgattattatgtatcacccaatgcaataaaagaatttgaggaaatatatattttattggataaaaaaattattttgactcctttattattttattttatttttgcaaagttttaacttttgtatttaaatatgtgttttatcactattaactatgttttgtttaattatttttgaattttgttatttaatctattaaaaacatatttttaatatttattaaaaacataatgtaacaaaaatatgatacttccagttgttaatcctaaattttagcgatgctaataattttcaaagttagttgactactcctaaagcaattaacgcaagcgcgtttgataagtttacccactcggtatataattcacaacgccactgtcgattctcacaattctcgggatacacccgtgccattcgttatctagtcccttagtgatcaaatgatgagagcatgaacaaaaaaaggagaagttgtgcatgcgaggatagacgcatgggcatggttgtgcaggggagtgttgggacgacggcatgggggctcgcatgtgagtcagaggtgcgtggtgtagagccgtgcgagtgggtgttgtgtgttgtgagtgtgaatcttggtacgggggcatgggggctcgcatgcgaaccgtgagagtgtgtttggtgtggtgagcgttagtcttggggtgatgagagtcggcacggtgggagaagatgagagctgacatggtgcgaagtagcggtggcaaaataggtttcgacacggcacccgacacgaattttacgggttagggtcgggaaaattagatgcgggtcaaaaacgggtctacacgactttacataaaataa

SEQ ID NO: 48412 - DNA, 1683 bp, Cannabis sativa
cattgattgatgttaggctacactttataagagatgttatattagatggaaaggtaaaattggagaaagtctcaacaacagaaaatcctgacatgcttacaaagttcctaccatcaaccaagtttattcattgcctcaagcttctcttagtggacactaatgactactcttcaactactcatgactcataaaattatgaggctcaaggattatggttaaaggtagagaattgttagaaatgagtgactcttaattctttttctttaagcattcagttatgactgttagtgaacttccttctgtctagctagtgtcagttaactgtcaactaactatgtgtaccagttcaagcctataactatatagaagcaatcttgtaaaggtttagaatagctttagacaacattcaatacaagaaatacttttctttttctctgttttatcttgtttatggttgtttattctcgaattggtttctgtgagctttgatcaagctcgaatgattctcaacaataataaacgttttctttttgttgtttcaaccaagattgataagataaatgagagaaactaagaagaaaagaaagaggggagagagtttgaaactgagagagaagggtggggtggcattgttaagactcgtggtaggtgaaggcagcgacaagcaatggcattggggtatgtggaggtaggaaggcgatttcaaattgaagagagaataaatgttaaaaatgggaggagaattttagatacaaacaaaaagaataacataaaattaacataagataataaagtgggactttttgaattttgtagcatttttttcgtagactttgaattttgaattttgtagcattaaactcaaattttcccctcacaaaaactaaaaagaaggttaacatgtacactcaaaaaaaaaaaaaaaaagaagcatgtgaaactcattaaacaaaataaaaaattagaagaaaaattatttttatttttgtttgttaatgaggttaaagaaggctcctttcaaaataataataataataataatgtttctttcctaaaatattttagaggaatctagactttatatcttttttctttttatattgttcttttttatttttattttctttttcaaagtctgtgaatatactcttcatataattatttatgtagtaatatagaaggaggtacgttttatttaaatataaattagaggtaaatttaattaattgataaataaaagaagtatttttcaatatattgtttcctaaatttttaaaaaaaaaaaaaaacaattagacaatggatcaaaaatttaaaaataattgcaaaactacatcaatatagattttctttttttttttttcatttttatgctttgaatttctatttataaaaatatattttcagcaaaaaaaataatctaactattcataattgttcaagttgttttataatttatttatagttatcattagtttgattttttgttaattttttaattaatttcttattttttattaaaaaaatgtatttgtgtaattttaaaactttacctatacatttttgcaaataaaattttatgccgtaatttttttttttttgaatgaaagtagaaaacttcattaagaaagaatagccaaatcggccattacagcattgttgataacatcaggaacattgcta

SEQ ID NO: 48413 - DNA, 966 bp, Cannabis sativa
ttaatgccccaaccacgtaaaaatctcgcgcattaacttctaacagctttcctaaatattattattatattagttgccaaaaatctcggtcaacatatataatttacaaaatatctttaataatatttaattttaactctaaaattctaacaacctatataataatatatacctaaatattgctatattattttaagaaatgccaaaagatattatttggtgtcacactgttattaatatttttctcagtgtcatgctgttattggtataattaagtatcgagtctcatataacttgacaataaattttaaaaatatcactaaccaatcataagacattgtctataaaatgtacaaacaatgctcattttaataaaacttgttagtatcaatttcgcattttgttaaatttttatttattttatgattaaggttttatacaaaaagtagcagtttattcatgcatcatatcaatagaagacaaatcatatgaggctcacctaacactctaattgggttgattgttaaagattaatctcattattctcataaaaattatcctattaaaaggctatatttaattaattgtgttcttttattaatttggcctaggagtgagtcttgcctttaaatagggtctcactctcactgtaaaaagttaaatttttggttcctatgctaaaatgttaccgaaagaaaaagttgtctaccatagttgtgcttgcacaacaccctttaacacctaaactacataaaatttgtgttttttatttgtctaatgttctcttttggttttatttttctacaagttggcaaaaaattaatcacaaataagacaaattaatgaataatttatacgattctactatattatattatatatatttaaaaatttctatagtaaaccccttaaaagatcgtttgggtaaatcttttatctgttttggcattgcgtacgttgtaacta

SEQ ID NO: 48414 - DNA, 2069 bp, Cannabis sativa
attaataatctctttttaaattacaaaaatcatattagcacatatctctctaacaaacttatcttagacttattagttaaagataaagatgagattgacgaagtcggtacaaagaggtgagccattgtatactttaatgttaaaaatcagcattacacattactgagcttgaaacatttataattattatatcaaattcggttggtttctttactgtgggagttgctaacaatagttttccatgattgaattatgtgtttcaggtgacacacgcggactttaagaaggcgaaagagaaggtaatgttcaagaagaaggaaggagtggactttatatgtgataggattgtccaatgttattggagaactatgccaccattggaagatgaattaaaacccaaaactttcgtttattgttattcaaactcataatggattccctttaaaaaaaaaacccatattctactgaattgtaaattcttcttctcccaaaaccatattcttcccaaaaggacaagggcttcgagacagccagcgacagcgagtttgggaatagcgatgacgatgacaatctcactgtctgagaaaatggccggccggtacggattctcgtcatcgtctttttctcaggcgaccatgaaggtcaccaccactccatctccggatctcgctctcaccaatctcgcttacgtctatccctctgatctccaaaacttcgctgtccctagctccaagcttttcctcgcattgatcggaaactcattcgttctttctctttgatattctttattaactcaattatcatcaatttaatccttttgtgttcttcattgttctgattcttgcatttcgaactttacatttcctaatttcttgctatgatgataagaaaacatgtgtttattcaaattatattgttattggatttttcttaactaagaagatactcctcatccaagcatacacaatggagaaatcgctctaaatgcaatccaacttcggcatgcgaaagtttctactggcgatgttgtactggtgatcaggttatcttcacattactattgaaattttgatattatgcattggactatatatgtataaatatgtaattatggctgtattaaatcggtgtgttgtgtgtgtagatttattccacctgatgagtctagcctggcattgctcactttagagttagagtttgtgaaaaagggtactaaaagtgaataggtacgctgtgctgtgctgtgctgtgcttattgagttttacatattcaattggatctaaataagcatcgtgaccatgagtttctggttatgtgtttttaggttgatgctgttctctcggccaatcatcttagaaagaggtttatttaccaggtagattttttaccactttattttattattgatcaaattgtattttagactctggagtgtcatgatcagatgtttttgaactggaattatgattttgatcaatgccaactgtttagtttagagtatagtgtcttgttgaatgctgaactttgatgattaatcaaaatggaatggctttttgtgctatttttggattgctttaaaatttgttataataatatatccattttctctcaattaattggtcatatttttacccacacatttcataatcatgtttttggtttgtgtttattttatttttttgtagtctttcaattatttttgttgatcatattaaatatgtccttagagtgaagaaaatggcatggagatgacaaatttctcagaatttgaaggagttttttgaaagaccaactagacaaatacctaactaaattggagagagtatagctgatggccaacaagttgtttaactaaaatatggccaacaactttaatggtgtaaggtttgtaattcttcagttgatgtggaaaggcatgctattgactttatggaggctgctaaaaagcttcaattccatttaattggcctgcaacgtgaagatgaaccaagcagggctgaaacactgagaaaggttattgcatgattttttgaaagttaaaacggagcttatcaacaaacatgagaag

SEQ ID NO: 48415 - DNA, 1976 bp, Cannabis sativa
acatgcatatatatatgcatgaactttatttttaagttaaaaaatttatcagtttaaataagatatcaaaacattgatattaggatatgacttgtgagagtaatgtatattggtttttgaacctaaatatataaattaaaaaataaaaactttaattactcattagtttaagtgttaagaaattcataaaggtcataacattttgataagactttggatttgaaggctcaatgcagtgatgtagttggcaatagttaaatttgtgatgttcatagtgtttatggtaacactaacaatagtagaaatattttatttttgtgtaatttgatgtgaatattatactccattaataatgtctcatctttattatttttgttcagtggaaatagtattaaaaaaatatgttcaatatttaacaattataagaatatatatgaaatgttcatttatcaaaattacttctaaaataaaaccaaagatcaaaattttataactctcgtagccatgttttgatctaaactggtctaaccattaatggtgagccctatcatatttatacaaataaaacaaaaaaagaatagaaagcctttcaaaaaaattaaaaaaaaaaaaaattgattacccaaactattaatattcaatcaaatataatctagatagttagctacctaatccgtgtatatatatatatgatgtttttgtaatcaattcaaatattacaaaattttaattattaggaaaataagtagataattaatttgtattggtttgtacctatcttctttttaaaaattaaaatacatgctctagttaatgcactggatagctgattaagtaatattgacaactacaattaatttttagcttacactgtttgacaataaagtttgcatatatactcataataatttgaactttgtttctacatctttacatgttcatacaagtcattttgaaatttaaaaattaactattgatcatccgaaatatttcttagcatgtgaatctacatccttgatcatacgtagcaataaactttttaactcttaaactaattgaggtttatgctaattaatctctattattttatacagatcaagcatgaatctttaaattcaattatgaaagaagaagattgctctgtaatgttaaaggaaaaggtggttacttggttaagtaagtcaattaattaaacttcgtttgtttatcgcaatgaataatcaacattaacaaaaagctctttttgaaagaaaaaaaaagatcttataaattaatttgtgcatatatattgtctagtatgtattgcacatatatatatataatttattataaaatatgatttaatcttatcttagtgtaattttttgtttttgtttttgtaatgaacttggagaataataacattgtataaatttaggctacatagtacataattaaaattagtatgtcttgaatttgtgatgacataaaacttttgaaattgtataaatatgtagcagtatatgcttaattactttttaattgtaatgtttttttaatcatgttgtatcatgctggatattataattaaagtaattaatgttccattagagtaaatattttttagtaggtaattaatgtttgaaatatttaatatttgttaaattatttagtatagtgtaatgcattcatacaaatagaatatgaagtgttttttattttaagagagagaactattactgcagatagaatataatatattaataatagtaaaattaattttttccacaagaatctatcgatccatatggttaacaaaacaatacaatccgatttacaacaataatttaaccaattcaaaggtggaaaaggttcatgttttgtgtgcggaaaatttggacagtatgctaaggattgtaagcatagaaaagactttaagagacccaaagtaaatattatcgaggaggatatcattgctactcttagtgaggtgaatt

SEQ ID NO: 48416 - DNA, 1890 bp, Cannabis sativa
gattttcaaaataattaacttcattttatttagtggtgcgtaattaaggcccacgatttcaaggaaatatgattgtgggatttgaatctgattgtaattaactgccaccctatgttactctaaataggggcagaatgtactgaagaaaaaaaaaacccttaagagaaaagaaacctagtttgtatctgaataatttgaataagattgactcgtggactatgtagaattttaactgcaaaactacgtaaaaagctatgtgttatattttcttcttttactttctataatttctgtgcaaaacttatcacgaaaatatgtttattatcgttaatgaaaatctgagttaacaataaatattaattatttatcaaaagtttttttatagttggtaaaaaaaaaaaaatcacctttttttaattattatatatataaatttacgattatataaattaataatgaggtgaattatattttttaattttttaattatatgatgaagataaactaaaaaaaagagttattattttttaaaaaaagtgatgaagaaataaaaatgatttattatttttgaaaaaaaaaatgagaattatggagaagataaataaaaatatttattttatatcaattaatatttatgaaactaataaaaaatttaaaattaaaagaattaataatgttaattaaaaaaaaaaattagagtgtgacgtcaccgccttctatctcttctttatatatagaattattagcttctatgtagtggcgttccatgaatcggtaaccaaattaagttgtatttatttatttaatttttttttaggaaaagaaatattaagatgaacaagagaataaatttctctatatttgtatatgtattatataaacaaaaaataataatgagagaatgtaaaagaagtttaccatagacatgaatgagcatgccatggtcagtcatcatacataggcttaatatacatgaattttgacaatttacgtagtgttgtcagatcaatgggaaaaccaaaagttgaaaagggcataaaagataaaaaaaaaaaaaagaagggaggacttttcttttctctcttcctcgaacacggacatttatttatttgtaaaattattttatgggttttttaattcaaagtcataaataattgatcgccaatcataaagcaatcgattacaaaatgattttctgacctctcacatcacaccctcttttctgattatttctgacaaagaaaagtgctgtaccattctgcctctctttgcatttattactcgcattccgaggatgggcctcagtctatataacaatacaacaatacagcgttacggacttttctcctttcctttctttttctcatacatctgtcaacttcatatttgttccttgtgtcactgttatacttttcattcttctcctttccttattttttttattattatttatttatttatttttctttgatattttcattagatggtttactgcttacaccatacaaatcgtccacaccatatcactctacataaaaatgcatctcaaaatctattagtatgattgcacttcacaattttgaatttaataatatagaagtgtgttaaggaaactctcttttcctctcttaccttaatgtgatgacaaatgtcatatttttagtaaaagttaattttacttaataattagttataatattctaatgttattataattgtgccactactacttctattatacttattttattaattttttgtttataaaagaataaaccacattaaaaataataataataatatatatatacatatattttaaaataaaacaaagtaacaattaatatttatataaaaattgtaagcttttttttctttttaagaaattat

SEQ ID NO: 48417 - DNA, 1859 bp, Cannabis sativa
catgcccaaactttgaatcttcaatcccaaaacacaatagaaaaatttagagcagttaaataaaattaaaacatcaacaaaacttcaaaattctctccaaaacataactcaaagcattcaacttcattctttcaatacaattaaacatagaacatcaaaattacactaatttcaactcacatgcatcatagaatattcaaacacataaacatgctttttcactcatcaatcacagcaacaatttaaattaaaagcagtagaaaaactacctcaaatcctttccaaacccaagcactcaaaacctccaacaatccaagctagcttccaaagtcaattttccaaagttgtgttttgggtttgaagattcaaagtttgggcatgaatttgtgcgatgcttagctcaatgtttggagcctagcttgtatgttgctaatctaagtttatgatgcatattatgttgttgattaagcttgaattggtatttttaattccctactgtgatggatgtaatttgtggttatgaattagtaagtttgggataatttgacctaggttcgaattgggttaaatatgtttttctggatttttaaatctagtggtctcacctattttagtggttgcgacctagcgctcaaccagtgagggttagtcccctgtttgggcttgcaagtcccaaccatcgcaagtctgatcgcgaccatggcattgacagtttattttatttttgggtttttgggtttttgtgtttttgttttcgccataatgccataattttataatttttgactcgggactctgtttgggacgttctttatatcgttggaaatctcgttccgaggtctatgcgattatttagaatttttatgccaattatatacttatgagaaaatggatttagggattaaccttttttgtgaatctcgaaaatttgtgactaggattaccggcactttgtcaggagcacccgagggttcggaatctccattttcacaggacatcaggtaagacagtggttagaacatagaattatgtgtggtggcgcttatgctgaatattaaatttgtgagtattagaaactgggattagggttattaccctaaagtgagcggtttaatagcctagggttactaccctagtaattgttagtgtgaaatactatgccatgctatatatattgagattaaggattatgtctttaaggcataatctggttggactcggtaactaaaatcgagatgaaccgttctaaggccttattgtatttagacgtctgagcgtaacacgtgggtctatgctacatagacataaataggcgtgtgagcgtaacactcatgtctatgccaaatagacaataagtgtactgacatgattataatgtatgtaaaatgtaaaattgtgaatattgttatttatactgtcttactgggcctggctcactggtgctctactgtgcaggaaaggataaatctgtcactgatcagccaggagtgcgaggacttgacgatgcttgtacatgttcgagacacactagaccaagcgggttggggtctatcagtgatgtattgtgtaactctaattttgccgcttacgttggctcgtgtaatatgtaaaaatatttacgggatcccgaaacctgtatcttttggttatttgtaatgttaaagttattacaagttttcattttcattctgttttaaataaagtttaaatttcttgcacttacccttctagtaatcccaatttaggggattaggtcggctcgtgaaaaatacttgtaatattttgtaaaaatatttacgggatctcgaaacctgtatcttttggttatttgtaactctgattttgccgcttaggtcggc

SEQ ID NO: 48418 - DNA, 987 bp, Cannabis sativa
tgcacttaaattttagcaacccgaactttagattagattagaaaatatataggataaatcgcacaaaccgacgtaaagtagcaatgctcttttagtagaagttacttcttgtaaaggacgagatattgatcatacatgggaaattgaattgaaatgagatgagatgatataaacaaaactatttcatattataaagaattttattttgttttatttatttttggtgagaataatgatatgatataaatgttagagagagaatgcataaataaaagtgaaaacaacaagagcaaaagaataaaagacatctcctcttttatgggtttggacttattcttgggcagtgtttttctgctcaactaagtgtcactgcctcaccacttctacctatttctatttggttttctttctttttcttttaaaatgctaaggacaatcaaagaggtgattaacactataatttaattaattcattgaaaaatatcacataataatactacttaattttttttttttaggaaaaagcgagaagcttatcgatattgcaaagggctagtttagtatagttatattgtggggaaaacagtatgaaaaaaaaaaaaaaaaaactatagcaaaactgtgaaaaaaaaaaaattaagctaagtatagtattagtaaattattaattttaaagtgaattgttaaaattttattataataataattatgttataatctagtttattctaatcttaaatataaaaaaaatatatatatatgttatataaaaattttaatttattttatatatatttttaattttttttctaatagtaaatatttatatgcatttaataaaatttataatatttttaatattatatttatatcacttgtaagaaaagttataatttataaaaaactttaagttgtgtggtttgttaataataataataacataaatataaatataaatataaaataatttttaaaacaaaataaaaa

SEQ ID NO: 48419 - DNA, 1810 bp, Cannabis sativa
  modified_base (1201)..(1218): a, c, t, g, unknown or other
  modified_base (1638)..(1654): a, c, t, g, unknown or other
gtaaaataatttccaacatgacaaacatcatgtcaaaagagtttgaccttgaagcaattgatctattggaagagccagtagaagctacgaaattggagggagagtcagctaaggatgttatcctgtaggtcgttccagagaagaaatgatccaagaaggttgccctaccaatggtctataattcttccatatgggagatgggtcaaatacctaataagttctggagctatgatatgctggagagatatcgtggagttagcaatgttctggaaaggactaatttaagtttgtcttactccccgtgatcctttctcctttcgatcttttcaagcaaagtatgagcttaaatttttatgcaacttcagccttccttcctagaagccgaatgttgctacataaaaattcaataagactctcgcttgcacatggttttttaaggaagaaagatcattgggggtgtggcacatcttcgtccctcctttcttagaatgaaaggactgcttgaagtctgtcttactccctgtgatcttttcaagaaaattttgagcttgaatttttatgctacaacaaccttcctttttgaaagccgaagcttgctacaaaaaattcaacaagactctcacatgcacattgtttttcgtgcaagaaagatcattgggggtgtgccacatcttcaaccgttctttcttataatgaaaggactacttgaagtgtgtcttactcctcgtggtgcattctcctatgatctttttatgcgaggtctgagcttgtatttttacacaacttcagcctttcttcctggaagttgaatcctgctacataaatattaaataggactctcatgtgcacgtggtttttcaagcaagaaagatcactgggagtgtgacaagtcttcaaccctcctttcctagaattaaaggactgcttgaattctgtcttaatcaccgtgatcctttctccatttgatattttcaagcaaagtataagcttgaatttttatgcaacttcagccttcgttccaggaagctaaagctcgctacataaaaattcaataggactctcgtgtgcacgtggtttttcaagcaagaaagatcactgggaatgtgacaagtcttcaaccctcctttcctagaattaaaggactgcttgaattctatcttactcactgtgatcctttctccttttgatcttttcaagcaannnnnnnnnnnnnnnnnntatgcaacttcagccttccttcctggacgcaaaagctcgctacataaaaattcaataggactctcgcgtgcatgttatttttcgtgaaagaaagatcactaggggtatggtacgtcttcaaccctccttcccagaatggaaggactgcttgaagtctgtcttactctctgtgatgctttcttcctttgatcttttgaagtggagtctaagcttgactttttatgcaacttcagccttccttcttgaaaccgaagctttctacataaaaattcaacatgaactcttgcgtgcacgatgtttttcgtgcgagaaagatcactgggggtgtggcacgtctttaaccatgcttttccagaataaactgatttaattttttcttactccccgtgatcctttctccttttgatcttttcaagcaannnnnnnnnnnnnnnnnttatgcaacttcagccttccttcgtggaagccaaagctcgctacataaaaattcaataggactctcgcgtgaatgttgtttttcgtgaaagaaagatcactaggggtatggtacgtcttcaaccctccttcctagaatggaaggactgcttgaagt

SEQ ID NO: 48420 - DNA, 1598 bp, Cannabis sativa
aaaccctaaaaaaaaaaaaaaaaaatttaagggcctaatatatattttttaataccttgcaacttttttataatgaacttaactttttcaaagggtaacaatttgtcattgattacttttatcccaatttctaaaaaaaaaaaaacaatcaattattgttatttattattgttttcaaagttttcatattctatttttctattactttttattgtattgtaattaataacaattttaataaaataattagagttttttagtattttgtaaaataataatattttaaaaaaatatcattcataaatagtacttttttttttgcagaggccaattttaaaaattagaacatagtctctaaaatgtttaagacgactctccttagtattctcgtgaaatgttaaaagacacttgtgccaagtattctttttagtgtttgtatcgttattggtacaaataattatcagatctcatataactaaaagtaataatttttataaaatacttataactaattataacacgccaactttgaaaattgttagatgtcactaatacttaataacaatactcataaattaagttacagagaccatggatgtttacctatgcacacttgtgccaaaccatgtcatgtgggagtaaaacattgaaaatatacagtacgcgtccaatgtcaataccatggcatgtaggagtaaaacaatgaaaataggtatctagacaaattatttatttatttatttatttattttttgaaaaaggtatctagacaaattttcttatctaattttatttaagatattattttaattatttataaaattttagagaacttttaataatttaaaatgttagaaaattaggctcaaataaatgtttactatgtttctaaaaagatttacaactaaatttaaataattataacaaaggattataaaaaaaatattaaattaataaactttttgtatgaccaataaatagggaatctagagaaatgtcccattttagaattatccaatcatttaataagaaaactaaataaacaaagatagattacaatttaataattttttatattatttattaaaaattaaaatgggtagaatttaatattaaaatacactttgtcaaaaaaaaatattaaaatacacaaataatgtaaattttttatggtttttttggtcaaacattttaaaaatataaaaaacagcaatagaaaatttagaaacagcgaagaatcaaggatggagagtactcctgaattgatgttttgcccaatggtaatgaaggtgagaaaattaaaactactagacatttttagaagactaaaaagtgcttgtggagtacttaacaagaaaattattaaattagtgaagaatatcttattagtaagagcattattattgggtactaatattgtttattaccttttaaacgttttattttgtgattggttagtgttattttctaaaaattattacattaaactatataaaacttaaaatttaattagaataacgatattaacacttaagagctcctaaacacacacggtaccttttattatttatctattactcaatgtgaataataatttg

SEQ ID NO: 48421 - DNA, 1050 bp, Cannabis sativa
tatcccattttaccaatattccctattttaagtttagggaaaaaattattccttaatgtaagcatagaaattcaaatttcccaaaaaaaaaaccatatatatttaacaattaagccatcttaaataaaataaatttattaagatgaattataaatatatattcttttataaataaattaacaatattcctatgttaatttatagatattattacaattacaaactaataatgtatatataaaaagtgaccaaaggacttcattgcacacatgaatatttagaaaaaaatacatagatcaaaattttaaaaaaaattataaaaatatattaacatatatatttttttatttttacactttaaattttttcatttattacgaaaaataaatcttcaataaaaataacgaactattttttttttgttattttatagtttatttatagttgtcatgatgttattttttggttattttttattattttatagtttattcatagttaatttatagttgtcgtgagattgatttctcgttattttcttattttttttctaaataaattgtgtttttgtaattttaaaattttataagcataagcattttcttatttatacttttataattaacttttcatttatttataaaaataaaaataagtacaataatcttaaaataaaactaacattacttcaaaataaaaataacttttataaaatgtaaacatcataacttcaaaataaaaataacttttataaaaataaaaaaaaatctatgaaaaacttaaaaataaaaaaaaaatacaatataaaacaattactatgtttttttttttttttttttttgaggtgaaattatcatcacaaataattaatagtgtacgaataaagtgagcaaaggggtttcgggttatctattctattccacatccccacttacaagacccaagtgggcatagtgacacatcagcatccaatagtacacgtgtcacactctcatcaaggtcaacttgtcttactcttttcttttgtctgccacctctacttattattta

SEQ ID NO: 48422 - DNA, 1087 bp, Cannabis sativa
ataaaatcacacacgtggcgtccctatagtttagggcgttacaactttttccagcgaacatttgcgctggtgaaagttagacttttaccaacgcaataatgcactggcaaaagtcatttttggcggcgcttttcattttacactggcaaaagtttcaataccaacacagatttgccaacccctttcactagcataaaaatgcgttggcaaaagtaaatcctgttttaccagcataatacctaacttttgccaacgtatttttgtgatggcaaaagtcttgtttcttattgttatactcgaaattcggctgccatctcagtggaggacacgtgtcacgataaggggaatatggatcaacgcaatcgctttatatggaataactaattaattacgtgagtatcagagtatatttgtaacctgtagactataaggtcttaggggaggaatcaatatacaaactggtgcttagcatattagcgagaaaccatatgtcgctgaatgcgaattgcgaggcatcaaggactgaacacattggaagacgaaagcgacacatatcaattgtgaaagcccttagtgtacaaaccaagtgtaatagtcggattggctcgagaccaagtaagcgaggtgcctatctcgctatgggaagacttcatataacttcatcccattaacgtcagctaacgttcaaatgagctttgaaggactcgttgtaaataagaactgcgatcgacacaagacatgcatcgtcgacctcggaatgaaaaatggccccagctcactattgatatcactggaaccaagcttttgtcgagacaactccagatacaataattaaagacgtatttaattcacgatcattttgacccagtaaaagcgagaaaatcacagctatatattttcaaatcataaccgcatttacactacgtgatatgtaattaaatcccatgattttagggatgaatgttgtaaacatattactgtcaatcttataattaattgcccactatgtaattataaatagtggcaaataagatcaaaaaagggacaaacaaactcatacaagagaggccctgaaaaacaatcagaa

SEQ ID NO: 48423 - DNA, 1721 bp, Cannabis sativa
  modified_base (1604)..(1605): a, c, t, g, unknown or other
aaaataatttccaacactcttcactcgtctcgtgctagtgttgataacacggtgccataccatttgaacatcttatactgcaccaataaactctatactacaattgtactagtgttggtaaaaaacttaaaaaaatcccattttaacctcaaatcgacccgaatctttccacaactccccaaaacacctaattaaggtctaataaatacaattcaagcaataagcacaagtataactcatgattctaaaattcaccattgttgagtcaagttgagttcttgaactcaaacctggtcaacacaaaaattagccactaaaataacctcaattaagctctaaatagcccaaaattatcccagaaaatcaacccaagaatagctagggtttagatagaatcatctctagaaaatcacatgttcaaaccaattaaaattttccaaaaaccaaataagagaaatgaggagtacgttggtttacctttgaagaatccctcaattcctactcaaactctagctgaattatctactggatgataaaaaaattggtaagaaaaagattgagtttctttggttctaagagggggcgagagagagagaaagtgaggagagtgagtttcaatttaattttgaatttaccaacgtaattccttagataatatcaacctaataaattcacttattttctagctagaattcccagtaccgaaataagattattaattcttaagcataatttgccaaaatgccctaaattattactccttaagtaacattaggccttagaaaaaaaatgatcaaatactacaacctcgcctaatttcaatatcaaacatatttgccacgctaaaagaaaggtttaaacccaacccatgtgaccctaatggctaaactgtcgtattttcatcgctaccaagcaacaatcatagcaatattatttttcacatatgtcaagtataatacatctagagtttaataaaatatccagaattgataaaaatataatactaatacttatttcttgaaaataggacctacataatcaatcatttacatataataataaaatataattatttaatgctaattgccttactaatccttattctaagtatgaaaaaaatatcaaaaaatggtatatgagataattttcctaaattttaattctatgtattgagagcttggatttcaccggctcatggtccccacggtatctaagataatatctgacaagtgctcgggttgacatggacactagtcatcagcatgcaagttgatgaacacaataatttttatactagtattaataatttttataggctcatggtccccgcatcttacttaataatatattaattgtaataaatcaaagatgatatttatttatatttaattttttatttaattatatacatacagtaactcccataaatttagagtgttaatgaacacaataatttttatactactatatataatatgttgatgttttgtatagaatattgtaattatttttttatacctataattgtaatatattattctagttgtatatgtatatatattagatagatgttacatgctaagttacgtatgttaattttattnnagtttttaattttttttaatatcataagtttaaaattaaaagtattcaatgtaatgataatcattgatgagaatatattcttggcatatctgattctgatatatatatatatatat

SEQ ID NO: 48424 - DNA, 1798 bp, Cannabis sativa
taattataattattaaataaatagttttggtatttataggagattcaattacaacttttactagtgatgacttagttattaactttcctaaagaacacgcagcacatgagaactcgttggataatagaatcttctggttctttaatggatgaccatgtgagttatctattattctacgcatcatgattgaacagggatcacctaattggtcatgctaaacaagaaatgaatttatccttcaatgtcttcaaggagaatcaccaccaagatctctaatcttgagcaaaagcctagagagcacttgcggagctaacccttttgccttttaccacacaaaccctaatgaccccttcaccacacataacacacacatatatatacacatgttattacccttacaagcctaaggggttattaactaatagggcttttggggtcttttatggtatactataatttaatgggccaactatagtattaagggtgctctcatgtgcctctaacacataattaagttgttaaccatcccattatggttagtagcaacaataggcacatagttaataattgtgtattatggaattaaacctatgattgtattagtccattataataattctaatagaatatatatttaagattgtatatttgagtaatattatgtagaaggattcttaaaaaaaaattgtagaatgatatatgtaatttaaaatgagttttttttttttggctaaattgtctgaattatcattccatttgtatttaactctttaagctcaaattttaatgataaactttctaaaatactgaattgttagtaaatttaatgtgtcatcaatttttcacagtaaactactaatatagattgcttatgtatatattcttgtacacgtgatatatttatattggtacatgtactattattatttaaaaaaatataaaaattattttcacatttataatatttattttttttcaatatttatttttatttttgtattttattttattttaaaaataatttttaaataataatattaagtgtatcaatataaacttatcacgtgtgtaacattatacacataagcaatccatggcagaaattaaccgaacaacactttaaatttagtaccaattcactagtttagaaaattttactgtcaaatttaaaattagaaggttaaacataactaaaccaacagccaaaatttcatttaaattttttataaaactattagtcaataactttatggtttaaggcctgttcgctagagtaccaaaattcatggacaatataaaaatcatggaagacaagacataaagtagctggtttaagtgtaaacaacatctttatcatcatcatcatcattattttatcaattcaaaattcatgtgaaaattatcgaaaaaatgaaacattatttaccattttagaatatactaaaaataagtcctaattattttttttaaaaaaaatagtcctaatttattttttctgtatacaaacgcaatccaattggaaacaaaaaaaaaactaaatgatagtgctacacatttttgtaagtataactaaatatataatgttaaatttctatatggtactcgatcgtatgcatgtgaattgattacggtatgaagcattcaggaagaaaaaaaaaataacaattagggcctaaaaaatgtgtactaaataaataagcacataaatattaatttattaatacaaaatatgcacttatgcatcttaatttaattaggaaacaaaattggacagaagaatttacaactcagaaaaaca

SEQ ID NO: 48425 - DNA, 2407 bp, Cannabis sativa
ttcttaacaccacccctcaaacaaaggggtgacactttcatcccgagtttgtcaataagaaacctgaatcgagaatgtgaaagaccttttgttaagcaatcagctatttgatctgaggatggcacatagcagacttcaagtttcttttgcagcactttgtcacgaatgaagtggacatccaattcaatatgcttagttcgggtatggtagacaggatttgaggccaaagcacttgctccttgattatcacaccaggttattggagtacatggcagtttaaaactgatttcttttaacagagactcaacccaagctatctcagaagcaacatgagcaagggctctatactcagattctgtgcttgaccttgagacaacagcttgtttctttgaggaccaggcaactaatgtttctccaaaataaacacaatacccagcaattgatcgacgatcatctggacaacaagcccagtcagcatcagaatatccaacaattgctaacctgtcacttgggcatatatgaaggccttggtgaatagttccttttaagtatctcaggattcgtttggctccactccaatgacttgtggttgggcattgcagaaactgactaagcttgttaacagcaaacgcaatatcgggtctagtgtgacacagatattgaagggctccaatcatacttctgtagatggttggattttgaagtggttcaccatcagcttttgataaaggtttgccagataccattggagtagggcaaggtttaacattagtcatgttgaatttttccaaaagatctgtaacatactttccctgagaaagatatatgcctgttgtgtcacggtgcacttctatgcctaagaaaaagtgtagcaatccctgatctttaagagcaaaattcctgttcagatcagtaataaactgtttcagctgactagtgtcattacctgtgacaataatgtcatcaacataaataagtacaaagatggcagcttgttcagtcagtttaaaaaacaaggatgtgtcggccatagaattagtgaacttccagctaagcagagtttgtttcagcctatcaaaccaagctcgaggagcttgttttaggccgtataacgccttgtttaatttgcatacatagtcaggtttgctgctgtcttcaaaaccttgtggctgcaccatatacacgtcttcttcaagcgttccatttaggaaggcgttgtttatatccagctgtcttacttcccaattcttgctcacagcaatagtaagaatgacacggattgttgaggacttgatcactggactaaacgtttcactgaaatcaacaccaggcctttgatgatagccttttgccacaaggcgagctttcaacttctctacagacccatcagcgtttctttttatcctatatacccatttattacccaccaggttgtagtgaggcaatctagggacaaggatgtaagttttcttggcttttagtgcacccatttcagtttgcatggcacgattccagaccttagactttaaggcttgctcaactgttcttggctcttcttccattggattccaatctgtgtgtccaacataaactttaggcttaaaaatcccagcctttgaacgggtgatcataggatgagattgaacttgaatcggttgttgttgttcctgctgctgaatttcacactcaatgttctgctgcatatctccctattccacatcagtattgccaacaatattagtgtgctcaacaacttcaaaaatgtgatcactaacctcatgtgaatggtcagaaagtgctggtccaggggatgtatatgttgcagcagtactgctggttttttctggtgtagtaactgtgtttgacatggtgttttggttgtgaaggttaggtagttgagaccattgggaggtttgtataacagcttgtttttctggtgagtagttatttagaaagccatttttgaaaggaaattctttttcattaaaaatgacattcctagagatgtagactctaccattagagcttagacatttataacctttatgatgatcactataccctaagttgacacattttaaggagtggaattgaaacttatgtgtttggtagggtctaatgcatggaaaacaagctgaaccaaaaacctttaaaaaagcataatcaggttttcttttaaataatgcttcaaaaggtgttttaaggttcaagataggtgtgggtaacctatttataagatacacagctgtttgaaaagcatcaacccaaaattttagaggcatattagcttgagcaaggagagttaatcccatttcaactatatgcctatgttttctttcagctctcccattttgagctgaagtgtgagggcaagaatgttgaaaatcaattccattttcaacaatca

SEQ ID NO: 48426 - DNA, 1415 bp, Cannabis sativa
aacggtttgcacatcaagatctcagagaagcacaacaagtgatgataaaccgtgcgtcatcatagtatccacaccaactggaaaaatgtgctctttattttttcaaactaggtgaattttaaagtcatcatcattaatttgtcaagtgtatgtaatatatatgtttgtctgagagcataaataagttcattaattacatatatatatatataatatgtgaatttgaatatcagcagagtaaaagttgtgaatattatgtttttgtgtttcaaagaacatgcatggataaagttcagtagttcaccctaaaaaataaaatgcataaataccattatcagatttacaaatttcattaatatgtaatgtaacctaaaataacaatttcataaatatccgtactaatcaggcagattccagtttcagcaatattactctgtaacaaaaaacaggttttataaataccaacatgaggtataaaaatttcaaaagaattaattccatgtttataaaagtactacggactaataaaatataaaatgttgttaaaaagataaaaggaaatgttcatttgtgagggttgtagctggagatgagtcgaagaaagaagacgaagaagaaaaaaaaaagaaaaaatagttttatgatattttaaaataatttttttttgtttttttttttctatattattatttttctataaaatttatgatttggatcaaaaaaaattgaaaggtggcatgttattagtatttagcagattagtaagaaatacagactatgtgatcgacctcaggtattttttttagtatttaataaaaatttactaagaaaagactgcaataatatggcaagacgctcaatttattcttttcatttttatatatgtgctcaatttttcttaccaagacattttgaagaaaaaatataattaatcaataataactagggtaatatttatacagttaacaagaggctcaaccaaaatgttaagtcatatggcaaaataatggtggggttaacttgattaatcctgtgctttgcttgattgtaagtaacatatctttcatatgatgtcatgttgattttttccgaccttgatagttggtagatgcactatttactatagccaaacacaaatctcaaatctttgtaatcaaatcatttttttttttatctttttttatgacattgtcggcaaaaagtagatcaagctaaaagaagtatatttgtgactatgaatccaaaagagtaattataatttaattataataagaaagtactatgtaacaaaaaaaaaattaaaagttttataaataccaatatgaggtataaaaatttcaaaagaattaatgccatatttataaaagtatgacaaactaataaaatataaaatattgttaattggtatctattgt

SEQ ID NO: 48427 - DNA, 1896 bp, Cannabis sativa
cctcaccgatgccctgatatgtttctctgacggcaactaatatgcacactaaacatgtatccatatatgcaactattatactagtcttaccttgatttcgaatgcaagtatgttggtaactctaagtgtaaactgctggttgatgatttaaggccctaagtcacaatttacgtataattggtaagtgacatgctaaatcattttcggggacttaaacttgaaactaaaagttttcctatcgataaacaacatgtcacccaaatatcgataaaatgtgaaaaaactaagccttggaaatctaaaaaatttggtgaaacgaatccccaagtggtctactattttctgggattctgccagaaaaatcggttcaccgtttttgaggaaatggtgaaccgtttttccctgcagaaaatttccaacttcaaaaacctgttcaaaactcccctaaatccaaccaaactttctaggacacttaatgaaggcataaatgatcaaatccaaccaaaaatagcatcataaaaactcagaattcgatttcaccattgttgagctaagtttgagctttaaaactcaaacatagctcaaactcaactacagcaataaaaaccacaccataacagtccaaacaaactctaaactacctcaaaaaatactttctaaaagtgccaaactcgaatagaagttaaaacccaaaattacatatttaaatgtagcttttctaaccaaaatccaaagaaagcaaaggttagagcttaccttaagttctcctccctaattgctacaaatttgctactgaattacacttgattttgctctgaaatcattgaagaatttgcttctccttagggttccacagggttgaaagatgaggaagaagaaatgaagaggttcattttgtttttagtgtattaaatctatcctaatcaccttcctattattcagctcagaggttatcaaaattaaccctaggatttcactagaaaaaatccactatcatccaaaaaggcaaaagactatattgtcatttactcactaagaggtaacctaataacttaagggtaaaatggtccaaaattataatcccaattaaactcgatatttcaaatgtctaattatcttgtttcgctaattccaagagacctaatcataataaagttactgggcataaaacatgcaattcataaaaaattcacatataacatatataatgcacctaatattcaaatatatctccgtaattgaaaatgtacttttaaaggcctatttctgacaataagctctaatttttactaagagacacataatcataaattaatatttaaatctttaataatctactaatttccataatttaattatgcggtcattacaatcattcaatccaataatgggcttggtgaagaactcacaccagatcttccagatcagtctcaacactcaggataagagtgaacttatagacttaatatgaagaatacattatttgatcacagtgtgtcctcaactcatgagatactataatggagattgggaaaaataccaactccccttgtagagagagaggcgtgaggtagaagagagagatgcgtgtgtgtgtgtgtgagagagagagagattaaatttcagtttcaactctgttctgtttcttagttgttgtattgtactctcatactatatatcatatatatatttaacttattttaaattataaaatattataatatttaaaacccattttaatcattttaaaataaaaagataatgttataattttaatttgaaactaaaataataagggattttttctattttaacctaaaattactaaaaataaacatttatactactacaataaaaaataaacatttataagatttaatgtttactaaaatacta

SEQ ID NO: 48428 - DNA, 924 bp, Cannabis sativa
ttatctcggtctgggtccagatctaggttcgatagattcgaatcctaggtcccggtctaggtcgaagtttaggtttgggtttggatcccgagtttgggtccaagtctaggtctcaagactggttaatgtttgagtcttgctccaggtgccagtttgagtccaagtccccgttcgagtctaagttagggttccgatttgggtcccagtcaaggtctaggacccggaccagtttttggtttgggtttgggtccgggttcaggtcctaggtttgggtctacgttttggtctggatcagggtctgggtctaggtcttgggtttcgatctcggtatgggtatgggtctgtgctcgtgtccatgttagtgtttagggtttaagattttgggtttagtgtttacggattgagggtttagggtttagggcttagggtttaggggtacgtgtatagaacttacgatttagggttaatgtttagggtttagggtttaagggtccgcttcaagttctagtccaaatttttggtcacagggtacgatttaaggttcgggtgttggtctgcgttcgagtcctggtctggtacgggttcaggttcgggtacgggtccgggttctagtctgagtttgggaccgagaccggggtcgagtcttgggttctagtcccattcctggatcccaattctggttcttattttgagtttgggtcccgaatcaaggtctagcaccagggtctcggtctcagtcttcaatcccggtctaggtcctacgttcgagtctgggtccaagtccgtgtgtagttttgttttcatgtcccgagtctcgatccgagttttgattcgggtgcgcgtgctggtctgggtatgggtctgggtcctagtcagattccaattcctagactcaaacctagactcgaacacggacatagatct

SEQ ID NO: 48429 - DNA, 893 bp, Cannabis sativa
  modified_base (53)..(72): a, c, t, g, unknown or other
ttttcgtattattttttagaaaactgtaaaaatgtaaaaaaaaaacattcttnnnnnnnnnnnnnnnnnnnnttttacaaaaaatggtgtcttacgtaattaatcctaaaattattatattttattaaaatttattcacttttgtgaatgggttgcataataaacttttcctttttatttaagtgtagcacatgatattcattaacataaggagtataataggaatatcatctataaaagtaagtatatcataaagaatatagaaataaagataaaaattaacatagacaaagtaaaataggtatactagacaattttctctaaaaattgttagagacttttatattatttattaaattaaaatatgtgagatctaatattaaattataccaataataatatactattttttataataccccttagctttattctaaatattaagtggttagattaggtataaactaaacaaaacggctattcttgaaattaagagaagatgtagagatatgatatatggttggttcatccgtacacttctttgttagccaagccaagcaaagccatccaaatccaaaatcaaatcatttcactaatattattgctactgcttcaattaaatacatttattcctatttatttatgctatgctaagagggatacacaaggctagtggtggggtccatgagttttcttttcaggactttgttcccataaatttaagaattttaaatataaccagtatgaatttttaacttttatttagggtgcatttttagtgggtaatacttataaattataaattggtattattagaaattttaaatttttataattaatttactatttaattaaaataaatcttttattttcgtattatatggttgtggtgg

SEQ ID NO: 48430 - DNA, 3267 bp, Cannabis sativa
gaaaataggctcataatcgttaataaaaatctgcgttaacagtttggtgctgtcattgagagcctacgtgataaaagctcaaaaaaatccctcctaaccaaagaaagaaaagtttttctccatggatgatcacgaggaaaacgacaacagttgccctcagtagactaaccaacgtcctggaaaagagtcaatgggttcacagaggccacccacttcaagaactacgcgttcaacacgatcaacacgttcagaagaagccaacgtgataatgatcagaacctagaaactaggaatgaggaagccaacactaatgttggtggaccggtacctatgagtgaaggggcctatgatcccactagatatgtactgctagtagagttggagaatcgccaacttcggcaacgtttaattgaggcaaatcaacgaaatgctgagttggaaaaggaggcagctgcagctagggcgactcaagaaaacaacacacaaaaccaacctaatcctggagtgagaaggccataaggtagaccttggggctcaagaaccaggaggtaggagacagctcaagaaaacccccagaacactcaggaggagcaacctgggaaaaatggggatattccagaaggtgaacaactaagcaacaatacacctcgacgagaggtacctcggagatcccagagattcaacactcaagagaatggaaacaacaacatttcagaatcatctcgtagaaatgagagtgtaaggcaacataggacaagggaccaggagatccctcgtggaaacaagagaaatcctaggactcaacctaggacaagtggcttaccaccgagacaccgtcaacgtccttctcgcagtgatagggaggaggcgtatacacaccctagctaaggacatgtatcaaacctttcccaaaggaaaaggcttgtacgtgatgaggtaagttctagctcgggacgttcaagatcccaggatcacaatcaatctacgtgaggaggagataggcctcgacgtagtaatgatcaagaaagtatgagtcatataaggagtagtcaatctgagagttactcagatactacgaggtccatgagcaaccatgaacgaagacaaccagatcttcgtgaacatttaaatcggaggcagcctgatttgtgcgagtgcttaaatcagaatgcacctaatttacaccactcaataccaatcgaaagcaagaggatccaatctaattgcgaatcagtgagttaaaaaacaaattcaagaaataccaagatgagaatctgtttgattacgactcaaatgaagagcttaaaccttttcatccaatcattatcaactctgaatttccccaaggattttaaaaccctcacgtctcgccgtatgatgggattacggattcagtcgctcacctcaacaattttaataccattatacgagccagcaatgttacgactaatttatgttgcattttattccccacctcgctgactgggccagcgagtagctggttcaataaattcacccatcactcgattacttcttgggaacaattttctaaggacttcaagaaacaatttcaagtagtgagagacaggcgacctgaagcgtcttcccttactaacgtaaaacagcaaccgggcgagtcatttaaaacctacttaagtcgtttcagtatagccgctgctagtgttatcctcacatgatattactgaaactaccatagcttattaccctacattaattcttcacaatgtcactactaacccttctctgcaggatgaacatactcaagcagatatcgatattgaacagtctccttctctgcaactccattcacctcctactcaacctgttctagtttccccaagaagaagtagaagaaccaccaaaaccccaagctaccttagagattttgaatgctattctgctatacaggaccaatcttccactcctcattctctcacaaaatttctttcttattctaaactatctaactctcacaaagctttcattcccactgtaacagctgctatagagcctaaaaattacaaacaggcaatacaatacaagcaatggaagtaaaaatcatagctctcataaaaacaagacttgtattgtagtaccacttctaccaaccaaaagagtcattggttgtcattgggcttataaaataaaatacaacactggtggaagtgtagaaagatttaaagcttgattagttgcccaaggctataccaaacaagaaggactcaatttttttgacacctttttttcgttgccaagatggtcacttttaaactacttatttccatatccactatcaaacaatggcacacattacaactagatataaataatgtctttttaaacaatgatctagatggagaattttatatgaaattaccccaaggtctaaccattcattcttcttgtacatgcactaatcttgtttgtgaactacacaaatccatctatggccttcgacaatcttcaagataatggtacaagaaaatgacaaatgctctacttcgggaaggacttactcagtcacaggaagactacactctattcataagaggttcagttgacacttttgtagcacttttggtatacgctgatgacatcataatcactggttcctttctctggctaaataaaatggttactgattatggtttttcacatgattccttggttcttttttgtgatagtagaaatgctactaacatttctaaaacccagtccaacactttcgtacaaaacatatttacatacagtaatcgttttattagacatatggtagaatctaaactcttaactattactcatgtatctataggtgctcaatttactgatctgttcacaaaggtattagatgctcacatattagctcatctctgaaattcaattggagtgtgtaccatctgatcttaagaaagttgcatcttaccatcttcacaactgtctttatgtcttagggttgtttttcaataattgttggttcttttgataaatagatcacatatatgttgtcattaaaatttctgagtttagagatgaaccatgtgttacccaagttaaaaaggctaccttccaaggatgcaattggaagagctacccttgtaccattgtgtaactggaaaagtttgctccttttcatattactctttgagaaaaatccataaggtgacagctacatctccatggaagtgtgcaagccgcaattggttagcaagagtcgttgtgcgttaagatttaaaaaaaaaaaaaaaa

SEQ ID NO: 48431 - DNA, 758 bp, Cannabis sativa
ttatataaataaagcttttgatttataaacaaagtttatatataattagatgaatagttattgatattatgtagtaactaattatgaaatagtaaatattattttggattttgtgttttgcaaaaattattaattgaacttttctgttttttgttaaattgaccaatagatcttgtatttttcaaaatggtaaacgagacaatcgaactagtaacaaacttaactaatacgtaggctacgtacaccattcacaaaacgcgaaatggcacaatcattatgtctaattctattattacgtcttgttgtattttttttttcgttagtactgtatctgtaaaaattctttgcttccataatgctacatgatcataaatgataaagttttaaatttttatgatccctattacatacatgtctcaacaattatgcttagaaatgtattgtctaatgaactataaatttaacatttgtgtaacagttgcctatacttttaattaatgtcttgatgatcacctagggcaatataagaatagaaagaaaatatatatatatatatatatataagttgtttatattaaaatatatttcatcatttaaatagtcctttctgttgagaagaagaacaaaaaaatcaaacaactaaatggtaaactatattttctctgattgagatgagggtttttccctaattgatacacggtgttgtatttctcgatttctttgcttttggtgtgttattatggctgagataggagaag

SEQ ID NO: 48432 - DNA, 1314 bp, Cannabis sativa
attgaaaatttgagcacctttttggttggactccactgtcaaaatgccaaaaatgactgctgaggttttaatgtaataaataatgtgaagtagttgagttgagtactaaccaataatctttgaaggtcaggggagctaactagcctaaaaattaaattacataataattgctatttaatcttatgaaattgcagggctattaaagcagtggcaattgattaaaaaacatgaaaatgaacaatattgttctcccccaaagaattaaacaacgttacatcatagtacttgtacttgctagctaatttaaaaggtcaaaccaaattaaattccatgtacctacctcaccaagtctaaattgtgtttcattgcattataacttgattaaatatatattattcatcttgtctcctgattttcaattatatagagaaataactttgttttttattaatattttataaaactatgtttggccaaagaggtaataggttgaatgaagaggtgtgacagaaaaatagtagttgaagatgaaaaaaaaaaaaatagaaatgagaagtgtacaactaaaaacaaatatagtaagagaaatattctagtgcgtactactgtttttattaggtaacacaattagttagaaggtaattaggttgttattggttgttttgtatctacatcttatataaatacttctgtaatcattttctttattgtataagattgaataatcattctctctcaaaaatgcttttctctcattaaaccttacacggtatcagagcttttatcatgctgagaagttacttgagaagggattcaaacctgaactaccatgctgttagaggaaggatactggcaagaagaatcaagcttcttctaattcagtttaaaaaaactatttaattaaactgatcccatgaaacaacggttttcatagtttgattcttgaggactattcgaacttttttaatattattatgtgtagttgtgtgatttcaccacttatttgttcagcataggaaacgcttattcgtataaaatttataagtgattttaaatctttattttagttgttttttctttcaacagaagttaagctgattgttaaaccaactctaaaaaaatctatatgaaaagagtaacaccaatgagtaatgaataatgaattgagtattagcactcatattcttttaactatctatctttgactagtaggagaaaaaaaaaacaaagaaagggatgtagtgtttttcaggccaatttagcagccttcaattaaggccacatccacaccataaaggtctcctaactttcaca

SEQ ID NO: 48433 - DNA, 1720 bp, Cannabis sativa
ttctatttttgtggttaacacaattatatatagaataatggtaatataacatgattaatcaaaaagcaattaaaaaaattattacaataaataaataaaaaaaaactaatatagaactggttatctaaagcaattaaattaaaaatcaatatacaaaaattaattaccaaaaataactgaataaaaaactaaaacataaaacttagagttctattacataaaataataaaattaacaattaaatatgaaaaccaattacttaatacaactaactaaaaaattagaataaaaatataaaaaaaaacctaaaacatttaaaagataaaatgaacccaaaaaccagttactaaaaaaataagacaaaccatagagagatttttaacaaatgacttttaaaattaagttatagaaaccaattacattaaacaaaccaattaaaaatttgacacagaaaaaaaaggtacatgtgaaccaaccaaattaaaaactaacatacgaaaattagttacttaaaataaccaaatcaaaaactgaatgtaatttcctctttatataacataaaatttgtatcacaatacactttttattttattttatttactcttatattattttttattataacattacatcacaataattattttacttttatattatttttttaattttattatcatatgtaaagagtattagataatagatttttataataaaatattaaggagcattaattaaatattaaatgttgtatcaagttttacaaatgtccattaaaggacaatactaaaaaaataataaaatgatgcaaatagataataagcttttttttttctctatgacaatttatacagcttctattaaatattgaatgacactaacactaataataggtaaatagtgatatgtaaatttaaagttttgaatttataagcgacataaatctaatgatatgttagccgcataattacttagtgtttgtaaaactttaatttttatctaattttatcagttcaaactttgttagtgtcttaaacatgacacatataaatccagattttaaactattgagtttggataaaaattatgtagtatcaattatttttaaattttcttttaataaattgaaaatagaatttgtactgacaaaaatggacaaaaattacaactttttaaatattaaatatttatatcgctactaaaaaaattattaaatttatactacttacaaactcaaaattttacgtagttatgacacaattatccaaataataatattgtgtattaagaccagctccaaggagactgcatttgttaaatatgctgcttcttaatgatccaatgacgctctatataacacactattttgctgtgtgtgctacagttcgtgcactgtagcacacacgacatctcttttttttttttttaattattctattatatatgatatgtattatttttttataattatttaaaaaaatggtatatcgatacacttctatctctttcggcattcggaaaaataattaattttttttacggttgtgtatattgtagttatttaagacattttgtaaaattttgagaaatttaaaaaaataatacgccaaaaacatagttcgaacagtcttttgtacacataaatcttttatacgcgtggctaataaattatttaaatagtatttttatattgtattttattaaaaataatatgataata

SEQ ID NO: 48434 - DNA, 738 bp, Cannabis sativa
tctttccttgctcctatctccactcacatctgttctacgctcgggctttttgtgcatcagttcctctcctgtctctccctcagcagtcacattcttattcgactctattatcttgtcactggatactgatggaggagccttggagacagtatcaccatcaactggtgggctactctttggaacaacctataaaagagaaaggaaaacacatgttattttttgtaaatttaagacacaaacttatagatgaaacagcacgatgagagaatatttaattacacagtggtcaccatcaaatcatgccactgcagtttaggaacagattgtctaatgaagcaatatattgagaatcaacataccgagaaagttaaagagaattaccttcggaagaggctgagaatgagaatcccatgacttgttagaaaatgtaaatgaatcaccatccttgcacactggtaagtactgtgccttgggaaggctgtagaggtgagcaagaaccttgcaaacttcatcaatccctgatttttctgcatcaaatgccttccaccatggtggattctcaggaagggacacttgaaacctacgagcagccgcatatactaccccacaagctactacctcgctcttaaatcgaacgcataaggtagtacgtaagctgccattaaaaagtgagatgagctattgtcatgatagagagtgtaatagtaaaacgccacaaaccataggagcatcaaaata

SEQ ID NO: 48435 - DNA, 1335 bp, Cannabis sativa
gctacatgtagcgaaggaatacatttgaggtataattattttaatcattttatgtcaatctctcttatttattaaatatttgtgtatttattttttggcttttattatttcctttatgttatttaattactcaaaatgttttagattatttaaatgatataaagaaaaatatgaagaatttgatagatggtgtaatgtaaaagtgaggttgttgattttgtttttagctaacgatagagagttttaattagagtgattgataaataaataaataaataatagaaagtaaattgcataaagtaaagaaaacactagatttatagaggttcagtcctttataattggtaatagcctactcttctttaattgtattgacttgtgagcaagaatgaactattctctctccaaagttcttaccatgatctttgagcaatttactcttagatcaagatttcactcttgagtggttttcaatctgaataatttcttgttcctgaatagtgagatgagatcactatttataggaattaattacatcacattagtttccctaaatcaacaagaaaaaaaataagaaactagtttatttccataattacaatgaagaaaatggagaatttaggttggttgtttttattcttttaagatacgaatttatttcacaaatgtatggatttttctgtgactgccaagcatatatctcataaattgataattcgcacctcctgattagtgcatgcgagttacctactttagtagagttggtcagatgtctattcatgagctgctcggacatcctactatctatgtatgacgttgaacatcatagccgtttggacgacctattaagagtagaatcatctatccagactataaaatatgttacacgtgtcacttagacagatgccacgtatagtgtagaaattaagaaaatataaaagtgagttttgatgagttattttaaaaaataaacaaggagtattttttagcaaaattaaaaatgacgatgatggataatatatttatatataatgtataacctatgtacttttcttaactgggttctttttatttatttttatttatgcctcatttacattccattatcaaatgatgtgaattcgtacatacatagattagtgttggcagaatgacttgtttgataagggaaatttgaaaaaatatgcataaaataccataatattttatgcctaagctaatatttttcaaattgaaaacatatgaccactttttcaaaactccaaaaataccctattcaaaaacctaaaccctttctctctccttccctcaaactctctctgcctcttccccttc

SEQ ID NO: 48436 - DNA, 658 bp, Cannabis sativa
aacaaaaataaaaatgcctttcattgatttctatatgaattaatttaaacagtttacatattgtttgaccaagatagtaatatatagctcatttgtctctctctcatgtgtctcattgaattttggaaggtctatttactaccaacatgcatgtaatacattgtttggccaaaaatggtaatagcattttttatgtatctaaatgtattttattcatttgtcattaccaacaaaaaaaaaatgtattttatttgttaagcaacaaattaaaagtattttattttggaatgatttatttaatgcaaacatatattattctctgcaaagctctaatctctagaaaaggagtggaagaataaagaagatattaaaaacatgattttttttttagttttaacccccaaaaaaaaaatatattacaaaaatattttcagttagtcaaataaacaaatatacagtctaaataaaaaaaaaattacataaatacctcttacacacattgaaatcttcatctgatgcaacattctcaacacaaccgaaacaaaatccaaccaaaaaaagaaccactattaaaaaaacgaccggaatcaatcaaaacaggattgtttctaattcatgaaaaaaaaaagtgcagaaaaactaatatgaaactaaaatt

SEQ ID NO: 48437 - DNA, 1356 bp, Cannabis sativa
ttttttttttgaacaaaagaagattttattcaaaagaaccaacaaaatacaaacaccaatcaccaactccaaggcttgccgaaactagcaactactaccaactagctataactttacaaaaatgtgcatcaagcttgtttttgctagttcctacaaagtccaaacacctgtatttgacagctttcttaatatccatgctaatacaagagaccgatttgcatctaagctcaaaaatacaattatttctattaacccagatattatagacaataaccaaacaaacaacattgaacaatttttcctacaagtttttgaggggcttggaaaaccaatcataccagtctctggagttctttggcctgtctaatcttcctaaccacttgctaacatcagtcacaactttcaaagtataaggacaatccatgaagatatgagcatgagtctctttgtcatctaagcacactgtacaaaaaacatctggaatcggcatgatcttgctgatgtggtctcttgccaagagctgattattaatcgcctgctagccaataaatctatgtttcgggatgcacatcttatgccaaattttactagcataatcaactttttgcatgggattagctgatatgtaaaatatgctagttttgaacttaccactcttacaagcattaacaatatctgacctgtcaatagtgcttctcagcctcaaaagtttcttgaaataccagctcgcatcagatttaaattcaacctgccaaaaatctttcccttttaagtaaatagcatttatccacctaacccacaagttatcttgcttgctcgagatggcccagacaaattttgccatcaagcttgtattccatttctcccctcacgaaaggcaacgcctccatacttcttcggaaggcaaactttttcccacgaggacaagtgcatcttgatgcggttacctttggacccccagagaaagtccctacatcatttgtcaattgctgtagtgattttctgaggaaggataaacaagctcatccagaagttcctaattcccaacagaattgagtgaataaattgcgtccttccaataaaagacaggtttctgctagcacagctgtgtaaccttttgtgaatcttatcaataataactccacagtcagaggcacgacacttagttggtctaagttggactcccaaatagttaaggggaaagtttctgctagcccagatgttactgctagggattttagtagggtgatgtcatatgaaaggttctcccccgcccttcgaaagaacaaggatatttataggcacacatggggtaaagggcatgttgggttttatgccctaaatagaactcatttc

SEQ ID NO: 48438 - DNA, 1907 bp, Cannabis sativa
tcacttataattctaaacctatacaatattgatcaacattgtataagtcatcttaattattgttttttatcaatatcatcaacaaatctccatttattctctctctatttctatctcacttataactatatattataaatacataatacagttaagtatgtaaccctccatctgtagcttgatgggcttgtggaacatttagattttgtaatgatgattcgtagtatatactatagcatctttttttaatttgataagttggtcgtcctaaactaattggagactagttatagtgtgtgtaattgaatcaataatatagagtcttgtaattaattaagatttttaactttagcgtaattgaaatagaatatatattttgcaatcttaacatagaggttttagaattatgtatagtgtattactaacacgcatttttatatttagattttctaatttttacaatttgtataatttgaatttaactttaattaattttttaatatatattttaattacttttagttttgacgttggtttttaattagttttttattttcgtattttgttaaattaaatatttatttaaataaataaatgtgagttgtaaatatatttatgaaagtaaaatatcttatttattttaatatttatatatataattaaaaaaattgattcaaacgattttatttatttctttcttctattgattttaataatgttctttgctaatgacatcgatatcaaatgtagtagcaactataagtgagatgtggtactgaaaattgtgactttaaatgtagtgacgactacaagtgaaatattgtgatgataacgattttaaacatagtaacaactacaagtgagatacggcaattacaacggatttgatagtggcaactataagagagatacggtactgatgataatagctttaaatgtagtgacgactacaagtaagataaggtgatgaaaatgattttgaacatagtgacaactataagtgagatacggtaataatgacttaaaacttttttatttttcaatttacatagctaaaatatagttttttaccttatattgtaacaattttaatcaaatgacataaattaattttgtcattaatcaattaaataatttttttttttattttttaaattaatgtatagaaaatacaaattattcgagttaactagatttaatagatattaattaaaaatatttatgatatataatttgaatttcataataaatatatctactaaaaatatttgaaaaatttatatacacttaatataaattaaaatttaaactactaacctattttattttgtattacttatagtataaataattttttaactaattttaaatatttttaataattttcctattttgttattttaaaattatgtttttatttttttcattttaattttcaaaatatattattcattaatattaactcaataaatatgaaataaaattaataaatatttattttttaaaataatataactaatatttaaaactgccgcacgaagggtgactatattatctagttattctaaatttatgaaaaaaaattgttggtatatttttttttttgttagtatatatttctcttttaactgtaaacatataattagcatccatgattactcatttggattcaaaattcagtgcattaattaaagcatgaataacactattttcctaatgttaaaagttctaacagctttttatcacttgtaaagtttataaaacttcaaaatttatgacaagaaatttcagtccctattaaaattttctcatttctacacaatttagtctagaaatttgtgtacacttgtagaaaaaattatctaagaacctaagagatttctagattagattaagtctagaatata

SEQ ID NO: 48439 - DNA, 2090 bp, Cannabis sativa
  modified_base (2023)..(2023): a, c, t, g, unknown or other
atggaatccataagtcaggggaagtcgagcaggggtgggagaaagggacggtggtcggagcagggttggagggaacggttaaaaccagatgggaatttgaaaagatgaagaaggagaaggcagttaagataaagtagttaaaagggaaaaagaaaaaacggctacagacccaaagggcactgaaaatgatatgtttcttgttaatttctataattaaattctttcgtgtggattattaatacatagactcagatcatatatatatataataatattcgattgatgaaaaaatatattccgattaatattattcaaagaaaatattatgtattccacacaaatatataaatttttatatataaaaaatcatatttattcatgaacgtactaaatttagttaaaattaaattttcattatttaattataatctggtatatatataactgtaacacacacattaaaacattagtatttattcgatgaatttttttttgtagcaatttattccatgatttttatttcttaagcgtaggggcatatttttttcttattaaattacaaataaaaattcctttttttcaaaaaaaaaaaaaaattacaaataaaaataaaaattaatattcttgtatatgatcatgagtcatataataatttaacaaatataaatcatgcttttgttggtggacggtgcagaatggcatctactttgatatgatgtataaatatagacaaaaatatataaattataacattatataaaataaaatagtagagttatatacatcaacaccttttacacgtactatgtttcatcttgtttaatttgtttatttatttttatataaatattcattactttattcaaaaaattatgataattagtctacataatattaattatttaaatattataaaaataattaaaaattaaaaatattacaaaaatttcttcttccaacaagctccatgcttctctttctacaaaattcctaagtttgaaaactcaaaaacaaacgcaaaaacctttgatcatgagatttcaccttataccactcttttagaaaattgatcaaatctaatttcgaaagattccaaacctcaatcaacaaaaacatgatcggattccgtctaagaaattatataaaaaaaacaaatgaagcagtgagatcttgaagagaaaattgataattagatgcttatttcagtggaattgccacgggctctccaaaccggacggaccttgagttaaaatgagtcataggaaaacaaatatttttgggcccttaatataaaaataaatagtatttttaaaaattactaaaaagatcgatatgtatattttttgggacccctaaaatgagtgagttctaggcgcgagtctaacctgcctatagctagggtcgactctgtctctaaagatgatcttatattgagaccatctacctatatgcatcaatagtacttagtataatctaagtaatatattataaatatagttataaatgatattttttaatagagaaatgttaaagggcaccagtagtgcctagcactttcctatgtgttaatattgctattggtctaactaattattgggtcccatataatttaatataatagcttttaaggagtatcgctaactaatcgtaacgcgacatgtcgcaaaagtattaggttccactgatagctaataataatactcttcttaatagttacttgatatttaattatactaattataggacacttcacatttagtatataggtagggaactagtatagggagatgtgtaggatgtggaaaagcattaattcttgagtgcagacttggtcgacatgctctgccgacctaactatttggtttagaaattaagtagttatagttgacttgatgatcaataagagaaatgctaaaatatactattgttacataatattcttctatatatgtacgtattaatactgttattagtataattaaatattaagtaaaaaaaaaattaaatattaaattttatatantttaatataataatttttaaaaagtattattaaaataacacatctaaatattactggtgctcaataa

SEQ ID NO: 48440 - DNA, 1041 bp, Cannabis sativa
ttaaaaatatacagggccggccctgctcttgtcgtagatcttaaactttgaaccatatgtaagacttgatacctaattggatgaattacaatcaaagtagttttgggcacttggtgtcttcctcccctataatataaacattattataattgataattataatttatgtactaatgtaatgataaaaaaccagtgtgggaagcttaggagttggaacaacccctagcacggtggaacatgtgcatgttaaaaattgcacatttaagggaactttaaatggtgctcgaatcaaaacatggaatgtaagtattatataaaaggaatagtaaatgttatgtgatactactttatatgttgaatacgtataagtatgactcgatatttaattacactaatatcaatatgatatctcattgcatacgtatcattaataacatttggcatttatctgaatttaatacttgttaaacttaataaatttaattcctttcatttgtataggatattgttaactatatggtgtctatagaacaatattcttacaaatattaagcaaaaatgttgatacatattttctaactaatttattttatatcttaagtcgggagttggatatgcaagaaacatcacatttgagcacataacactcctaaattccgaaaatccaatcatcattgatcaagactatgcctacttggaggtaatatttattgctattattattattaatattagttagtgaaattgataattttttggagttatttttcaaaatgatttaatattttgtatattctactaatagagagagtgtattaattgagtatttatctatagtgtgtcaaaaaagttattttataaaaaattattaaactaatactattttgtaagctacaaaaataatatacaaacaacataataggaatataaagtaaaatataaacaacttgaaatcaatatattataatattgttgtgaaaacaaccatgtgtattttgcgaagaaaatatttaaattcgtaaaaatattgaaaaaaaatta

SEQ ID NO: 48441 - DNA, 1330 bp, Cannabis sativa
ataaaataaaatagtcacgcgtgcaatacactgtttgaacgtatttttcggggtgttaaattttttcaaatttcttacaaatttgccagatgtcttaaataactataacgtacatgaccaagagaaaaaatttgactaaaaaattatttcgagtgctaaaatagataagggtggatcaatgtatccattttaagagagtgcatggtcgaatttcccacacttatttatgtttaatggtataatattcttatattttactaaataaataatctacataaataagccttctctaaaatttaaatattgatacttttatgaacttcataaatgtttatagacaaaatttgctagtgtcgttcggcataaaatttaaaaattataaataaataataataatgggagagactgaagaacgtgggagatgatattgaataataataagtgataaaattttaatttattattaaaaagacaatcaatgctagctgcatgtggggaataatgtttggaagatgattagtttttttaaaagaaaataaataaataaataaataaattagtttgagatttaaaaataattttatgtttttgaaaacttaaaataatatttggaatattgttattcgacactaatatagtattataataagcaccaataacatcttgtaaatagttagtgatattccgtaatagtcataaaattaaattacgtaggattcgatacttaattataccaatagtaatatgacactttaggtggtgctagacaccacgggtatatcttttgacattgtaaggcattaacagtaacggtggtgtctagcaccacttaaagatgacgtcttacgattagttagcaatatgccataaaaataaatatgtatattggttagcatttctcttatatgttttgtaaataatatttgcttgtcttttagtttatcatcttagtttttgtatatataaaaaaaaaaggttctttctttcaactctctctctctcttctataaatagagatagttgtttatgtgattgattatcatatacatcaaattataattattggtcctttcaagtttcaatactacatataaaatggcaagtagtagtattataggaaagcttgatgctgaaattgaatgcaaatctaatgcagataagatttggccatcaattagagatttcatcaaagtttacaatgatgcctttcctcctggtacttacacaagtgttcaagctttggaaggtgatggtgttcatccaggttctgttagactcattcaatatggaccaggtatttgatctgtttgtttttgtatttgatacatat

SEQ ID NO: 48442 - DNA, 1482 bp, Cannabis sativa
ggtgtctattgacccttgaatgataattgtctcactcaggggcatcatctctctagcaacttcacagttaactttgcctatcattatttggctccatgtctgttttaggttccccctcttcttcttcacgggactgttttaaaaattggtggaagaaagtttgaacaatccaaatccctcctaaaatcaaacattttatttggaaagcttttaacccgttaggagaggaattattgctagtcctcactgttctttctgtgataatagagaggagactgttactcatgcccttataggatgctctagctaaatctgtatggaagacttcttcctttcatctattttatgttaaaaataggtattgtgacaacgaagaatttcttcttaggggttttgatactcttatgttagatgattttagtctttttcttaccatcatttggctaacctggtctagaaggaatgactacattctttaaaaaagaccatatttctaattgatatagatttactgctaacaaccttttgcaggattataagaacgctcaatcagcactcgtaagacaaagtttgccaactagcaacaatgttgagtcaggctcgagaagtgcctcaacaacaaaacactacaagcaccccaacccttccaggacaatatagattaaatgtggatgctgccttagatagccaaagacaatctacagggctaggagcaattgttactgattggaacagaaacacgatagcaggtttctcatctgccatgatgggttctgcatcacctctttatgttgaagcccaggccttgctcaacactctcagatggtgctccacaataacgataccaatcacacacattgagacaaattgtctcgagctagcattaaagattaatcacaaataaaaagatcgttcaatgacttgaaaattcatctcgaagattatagatttttttatcaacttttcctaatatatctctgtaccatgtttgtagaactctcaatatttcagctcataaaattgcaagagatgcattaagataagataaagagttagtttggagagcttaactcccttttctctattataattgtaactttgtattcgttattcctgctttctagttacaattacttctaaaaaaaaacatatcatagtactgttttgaaaacaacgtgaaaaataataatttgtaattttgtgaaaaaaaattaaatctgtaaaaaatatagtggatcttatttaatagtaattttaattttttatgaaaatatcccaatatttaattacatctcgtatctcatatgctgtcaagtataaattagtgatacaatatttcttctaacaaagagaagatcaattaataaggttcagtaattctctttgccctaattatgtcaaaaatattttatagcatacacataaaaaaaattaaacatacgtacaatctatgaacttgttttcaaataacaaatatgtata

SEQ ID NO: 48443 - DNA, 4467 bp, Cannabis sativa
  modified_base (955)..(958): a, c, t, g, unknown or other
tattgttcgtccaggccccttctttgatttaggccagtcctgaggtcatgtgcggcacccaacctatcgaatactgatgtaccaggtggccttggtgtctgacttgtttggccggcaggttggccaaaaatttcagttggggtgaagttgatgtgtgtaactccacccaagggacggttcagtaagatctggtcgtctactgtttagcccacaggttggacatgtgggtgtggattggatgactgaccattgtgagtttgtgcggtatgcccagctacatacccatctgaactgcccaaaggaatactggacgcagtatccagttgttgattggtgacttagtaggcctttattatcagtacagtggcctgcctcgtgcgatcatcaatggctacttgccgagccctcagagttttcatctcgctgtccctccattctataaattgacatctttgctcgtcaaatgcaaggtttatagctgcacggagatcctcttaatcatggtgcaaagcgttattatgaccttgcatgagcccaagggctgctaggaggttttggatttcagtatcatcttcaactggcctctaaacattagtggtagatgggacctcagtattgggagtggattgatcggctgctgaactggtgttcccagtcttttgcacgcctggtatgatcccagcctgaggggaagtcactccatggcccacagtaggtggttgtgtattaacctgctcgggatttgtccctagtgctcctttcgtgtttctaggagtctgcacgttgggatctatcaccatcgggtcaccttgatcagtaaggcctctacgagtttgtacaacaatcttgtatgcctgtcaaaacttaagacaaaaaacttgtgtttttgctctcaatgaaagcactaaaatgttgatttcgcttttagccaacaatagtgagtcaaataataagnnnntgaataatataattaaaagagaacgaaatcgataaagtaaaaagaacaccagattttaaagaggttcgaccttgtgagcatggtaatagcctactcccctaggattgtattaacttaagagaaggaacaaagtattcttcctctttgaaagctcttacaattgatctctaagtaattctcttagatcactattttttctctgaagcaattctttcgatccctttcatagtgaggctaagttactatttataggggcttaatgcatgagacatggtttccctttttcttataatgcttaaaataggaaattacaatgattacataattacaatacacgaaataggaaactagaataggttgtcatatttctctgactcaatcccacgtttgtagggattgtcttcatgtctggacataacaagatcattctgaagtaattatattttgtaagtggctcgacataatagtcttctacctggtcacatgccttctttacaactctgctcaggtaattgacaatcatagatgctgaccaattatgtgtaggctgctagggacatttacctccacccaggtatcagaaatgtgagacacgtgtccctcggtcgtctcgccacgtcaatgtgcaaaaaactggatagcatgtattttgggtctaaatggtacaatagaaatttgaggataatttgattctaggaattctgggattgtgatttctagaatagattgggacatatttacagacaatatcaccctaatttctggaaaagttaaacacaagttcaacccaaaaaaccaatgaatcaaataacctaaaatttgtcagccctaaaactattcaaacaaacaaaatcaaaattacctataataacaaaataatgcagatagggaatatcaatcaagaaaaaaaattatgagtacaaaaaagaaaaaattagtaagaagaggaagtgtatcacttactgtcttggttgaaatttctggaaaagttagaactacgcgattgaaatctcaaaaattgagaaactgggtcctaaaaatttctgagactggaaatgtaatctgatgttacacgcaggaagtaggtcagagacaatgagggcatgcaagtttagaaggggaagcaatcgtgattttcagaaagcttggaggtttgaaaaaacaaaaatggtgaaatagatgttttgtttcaattttataccaaattaataattaccgttcgatcaaaggaaataagatctaacagatgggaacattggaaaataagaacggtcagagcattaaatgctcaatgatgcgtctcgaagtcttgaactgccaaaactcgaagagtgtaatttttaaaagggtttaatacgattatacccctgtaatcatttaaaaagttcttttttacaaagcactttttagggggtaattgttgtacatgaaattcggctatgtaccagaagctaacacgtgtccaacaaaaagaatttgagccaactcaaatattataataacggcattgcatcattaaatgcactttaaaataactcgttacaattaagtacaagttgatagaaaatgttcaaactcatggactgtttagtcttatgcgagacaagaataacaactattaaactaagattgacaagacgcatgtttacctcgggacagacagagtaataaaatgtacaagacgagacagtcaaggacctcgtgaatcattaaccctctcttgagaagagaagaacttatgacgctcaaccacatcgcgttactcatattgtggaaatcatctcgcatcactaatgcaaataaaagagatacagcgagatgaggtgcttttaacacttaatgtttttcctattaggatggataagaagaactcacgattgatgagatgtaactctcctagttagcataatcttctgaaggataaaaataaggatcggttgggtagctattagttattatcccatgtgcaaataaatgaaacgtggggaatgtccacgtttcattaactgttgtaaatgaatcaatcccaaaaaagaataactaccaacctatattcctataaataggggcgaaatccatgggaaaagggacgataaaattgagagagaaaatcctattatttcaaatattgagattgtattttctatccagaaaatatccctaataataaggactcatggagtatgtagattttaactacaaaatcacgtaaaatatctggagttatttattatcatttatttctgtagtgtatttattgcaaaaaggctatttatttagttaacgaaaatttgcgtaaaagtcattactcgttagccaagggagtcgaacctttataaattgctgtgtctatttatttacttgctttcattgtttacacgtggtgatttcgatcataaataaggctctgctgtcagttgacaaaatatgaggtcaacaaaagtctatttgcatttcaaagtatttaatgtgagataaaggatcttctttgcatgtatataatttttatgttggcattttgaacttaggcggtaaatcgagagcattgatttctggtgagaatggcaatcctttagtccgattaagttctagatctatgagtttgggccggttaggccttgaaaaaggctcttaagatgatccatttatgattgcattaatggatcaacttgacttgcctgttgaccgacctatatcacattaggatctctttgaactggatcagggacatagttgttttgtattatttggttgtacgataggaggaatatcctatttgtctaatcctacaattcaaatcatttttaaggtcgtgcatggtgcccaaccgattaaaaactgacgtgtctagacctttgcgtctgaccattctaagcgaggggttcgcctgatatctctatttgagcatgggtattaaactgatcattccctcccaagggatgtgttggcaaaattttcccgtctaccatttggcccacattttgagcttgtgaccttggattggacgatccattgacttgggtttgttaggtatgttcagccaaacactcttccaacccgttctatggccctatgggaatactagtattagtcattggctattggctggtgatctgaaaggttatcctgattagtacagtggcctgccaaaaacggttgtcaattgtcgcttgctgggctctcatgatctccatctcttgatccctttactcgtcaaattggcatcattgctcatcaaaagtaagatttattactgctcgaatatcttactggcatggtgaagattattattatggtcttgcattaccgctaatgcatctcgcaaattctgcatttcagtgtcgtctctgactttcctttgagaatttttagtggacaagattccagttccaggggtagtctgctcagttgcagtactgttacaaaaattatggttactacgcaagtatacgcatttaagtagtatctcacgcaagtgaggtcgaaccacagggaattggactaagtac

SEQ ID NO: 48444 - DNA, 884 bp, Cannabis sativa
tttttagcttatataaaaaaaaattatttatatataaatctcttgggttaattattttaacaattaaggtaactttaattataatatttgttaaaaaaaattaaaattaattttatataaattaaaattttgtcctaattttttttagaagaacacaccaccttcttttttccaggatgtgttcttgtgatgattgtcttggataatcactggagtaaatccgaacttggcacaacaacacaccctgttttggttcctaaaatgctcaaatttctgtttttgtcctataactaacctctcattcacttcacccgagttctcgccttactcttcctcctcctcgctctctactgtgccactgacccatttaagcacagcgccatctccgatttccccgactttcaatctcacaacataaatatctcctattggtccgaaattccaacccatagagaccgctagaatttgctccaaaagtcaaagattaagtttttgaacctggttcagggccctgagagtgtcacttttgattctcttggccgtggaccttacactggtgtcgccgatggtagaattctcttttggaatggccactcttggactgatttcgcctatatatcgcccaataggtcagattttatatataaatgtatatatgtggggcttcattcttttttgttccaaggatatcgatggtgaggaattttttggaatttcaatggttttgtaatctgttctagtttgtagataagatgtttgtcgttttgtcttggaaattgggtcctgactactgatgtcggagaaggaaagcgaaggtagttcaatttcattagtattcattttccttcttgaatttttatgcttgaatgctagcaataggatct

SEQ ID NO: 48445 - DNA, 903 bp, Cannabis sativa
ttttataagcttttagctatagagtttttttttttataactctagtatttattttcaggttgtaaaccccctacatgaagaattcagtgccttatttataaacaaccatgcttaggggaccgaacgaatttggaccgcactaggatttattataagaaaaaggctattgatagggtaaactacattaattaagcactcctttgagctattacgtcgggttgatgatgcccagttccttaaagcaatatatgtcgtatgatattgtgttgttgatagttacaagtgtggatgtgcaccgtcgttgaaaaaatagagtgttagagtaatgttgcttccccaaaaaaagccgatctctttttcgttgtgtaccttttaaggcttggtcgaggggataggtcaccaaaatttcttgagttcatgttagaggttgccacacgtaggcatcttccgagacaataatctatctgagataccatttaaatttccattcatggacgatccctaagattgcttttgtaaactttgaaattcttgtatatttcaatcaccagctatgtatgtaaccattgtatatgggaagctcatgaaactaaattgtcatatgaaatttgaacgcgaggtccaaacttatctttattaatgaaaaagactctcattcatcttcttgggccaagtgatgggtctaaaacccattaatcttaaataagtacaaccgacacgattataaaaaaaaatatgtactaaaaattctttaaaattaaaaaaatgatgaaatagatatagtgtactaaattgactattttgaggtgtacaaacaatttttcctataacttttatatgggttatttgcggcaaaacccccttaagtggtcatatttttgcaactaacctccaattctaaaa

SEQ ID NO: 48446 - DNA, 1552 bp, Cannabis sativa
gttgttttcgtgttattttttggacaaccgtaaaaatatatataaaaaaaaacattctttgaatataaaaatgtaaatattctacaaaaaatagtgccttaagtaattattccataaaaaaattgctttaaagtataaaaataaaaataaaaaatttatggtttggattgttctggtaattttgatgtaggttattatatggattttatttatgatttaagttgctctgttagttgttatgtcaattttcgtaaaaataccaaaaaaaattgctttaaagtaaaaaaaataaaaaaaaaatcatatacatgtattatatatcaataataattatattaattgctaaaaaaataataattatattaatattaattaatgaagagggaattttggaaaaaggataacgtacaaacagaagagaaaaaaggaaagaaaatgagagttgatggaagtgggtgtgaaagatgtgaagtgatgagaaatatataaacaagttgcatatctatttaggattgtgtggcccattaaacttataattaaatgttttttttttttttttgaataaacttaattaattgttgagataaaagttagtatgggatggtggggtcaactgattccccaaccacaattaccgccggctgatatatatatttttgtatattttgttttcttttatttatatattatttctttagtttttttgtttttttttttatttctttatttttttttttattttaggtatagtagtgctgtaaattcgtgttgggtttcgtatagtgtcgtgtaatatttttaaagagtaaatctaacacgaactatatgctcaatatttttatatcatgctttgctcatactgatccgtttattaaaccaacctattttcatatccagacttaaatttatattttactttttcatacttttttttaaataattaataatttaattactaaaccatatatattttatagtttcaattatatttatataatttttaaaaatattttacagccatttatataaaaaataattaaaattattaaaaagctttttttttttatttatttacatatctcttctcttaatcatatctaccaaaaataatttttttggtggatatgagtatttttgacaaataattataataaaagtaaataaagatcatatctctccactttataattattgtctttttatgaaattctcgtccacctctggcttcacctccacggtgaaattttggagaaggaagaggatgatcgggacgattctccaatcgccgtccccgaccacgacctgatatttttctgtgaagagatagagacagaaagcagttatggaaggaaatcaaagagtgtgagtgaactaagagcttctttatatataaatattttttccttaatagcagagctcatcctgggttgttctctgtcgagaattttaaacctgccggctagggtctgttggaaatttattttaccaggatctggatttactaccacgtatgtttcattaacatcctaatatgaattctaaaacaacgaaa

SEQ ID NO: 48447 - DNA, 1886 bp, Cannabis sativa
aaagcttaaatatattctttttaaacttttaactttttttgaagcaaaaatttttaatttctaaaaaaacaaaaacaacattattattaaacattaacagtgtccaacaccatcactaatgtgacatgacttacaaataattaattgttttttttataataataataattattaaactaaagtacataaaatttgatatttattacactaataaaactatattatctcataatagcattaggttttttttttcattatttctctctttttgatcaattattataatatataagtaaaaattatgtcaaagtacatgacaaaactcgatctagtaaaaaaaaggttcaaattaaaattttcaaatttcaaatttagcaaacaccttagttattattttttttaatcaaaaaagttaaaaatggcaactattttttgtgtcaatttttatgattaatattctatataataacacaagaataataataatattagtaatagtaatttacttacaacacttttcttgtcgtttggattgtcaagattattagacttggtttgataatcttgttctccaccattgttgagacgatcaggaagtctaacactgcaatcaatatcttcaataaccaatatagacctattatcagtagcaagaagcaaccttctaagatcacaatcacgctgtacattaccaagttgtaaatcataaatatcaaacttaagatgattagccatggcagcaaccaagctcgatttaccagtcccaggtggtccatacaacaagtacccacgtttccatgctctcccaactttcttataaaaatcttttctcctaacaaacctatcaagatcttccattatactaatctttttgctctctttcatagccagagtctcaaatgttgctgggtgttcaagattaacagattgccaattcacaccaacacaaggcccattaaacccaatattaagagtgtgcattttcaaaaacctattctcttcttcaatacgtttcgctctttccagaacgaaaggaatgtaaaccattgaaaccttctcctcgtgttttttgttaaagctcagctcgtaaagtcttttctcgtaaccatcaccaccaccgccgccgccattcattgtgtctttatccgaatcagctcggagaacgaatctccattcgagctcgattccctcgaaaaaatcggttactctctctccgtcatctagacggaagatgagaggtttttctttgggacttttgcgaaccctaagccttttggtctcggggcttcgtttgagtgttgtgatgtaaaccctcgcagcgtcgtagatctggtttcgggttccgtattcgcttcccttttcgaatacgaaagttatggtggtgtgtgggtagtgagattggaagaggtgttggagtatggagatgaggtagtttgttacttgttttggtaggatttgattaatcatggattggaagaacattatggaagctgtgatggaagccatggctgtgaaaattgagtatggagatggcatttcattggtggaaaacattgttacatgtaagacgactaatactactactctgttctcttctctgtaatggcttctatgtatatatatataaaaagaattgctgtttaggtacctaccaacaccaccaataatagtaatatggcatcacttatatttgtttatatttgttagtatttcttttttttgttataatttaatatatatttttaaatatattttaatttaggttaattaggattttttgtttccgaactttgacatgtaccaaatcatacccctgaacttttttggccgttaaaaattccccttgaattattgagattgtataaggacttttgtctaatttcgtt

SEQ ID NO: 48448 - DNA, 2343 bp, Cannabis sativa
accgatgtgatactgtcaaatagtacttaagccaacataaattcattgatatcaaatatatttttatatatattaataccgctattctaatgtaatctaacaggcttaataaacatgtacgctaaacatgtaaacacatatacatatcattatactaatcttacctcacttcaaaattcatgtgtgttggccaacctgagtggaatagctactcgatgatttacacgcccctaagtcacattattcgggaaactaatgagtgatccgctaaataactttttgaggacataaaattgaaacttaaagtttccttatcgatggataacatggcaataccctaattattgcaaaaagaggaaaaactagggttcctaaaactgcgcaatcgcggttccatttgaatcgagtgacttgttcaatgcaggaaacactcaaaaccttctacataactcaattcgatcccaaactacacattaacttccagatcacctatttataccataatagacataatccatgtagtaaaacaacacaatatcactagaatcacaatccaccattagagagcaaaacttgagttcataaactcaaaccttgctcaatcaccacaacaacaaagaagaacaacttagaacacctcaaataaaatatgtatatcatcaaaacacaaaatcaaacaactcttaaatcacagaaccgtaattcacaaaacatgcaagaaaagttatcttgaaacttatgaaatcataaaaggatgagctaggaagcttacatacgattggaacctcaacaaagatgttatacttgctccgaattgctaaagaaaaccctaacctcttgcttgtttctagggagctcgagaaagagagagagtttggagagagaaattgtattttcttgatatttttctaattgaataaaatgatttgtttctttgataatatctaactaagataatgaattaaaatttgattgttaaactcaattaatctcactaaaagacaaatattcttaatggcaaaatgactattttgcccttgcacagacaaaaaagagcattatcacctagggataacttggtcatttctaaaacctcgaatatttctgacattcccaatgtctatctaagttgcccaattaaaaatataatactaaaatgtgattctattgatcaaacgtcgcgttccaatattaccgggcacaaaacataaaaaatgtaaattttcatatatggcataaataatacaccctgaatttaattaaatctccataaaactataaatcataattaatgatctagtttcataaataatccctaattatctgctaattccaaattaaaactaagcggactttacaattattgacctcgcttttagccaatgacagtgagtctaatttgtaagcgataaatagtataataagtatgtaatataataaatcaaataaagacacgagaatattatagaggttcacccccgagcagttcagtaatagcctaatcctcttagcttatattgacttaagaacaaggaaaatgatccattttcttagagctcttacaatagtatctctaaatatgaattcttagataagtttttcgaccatttgcccagtgagtatgaatcactatttatagggctataagcttgggagggaagtatttcccttctgattataattgatataagtggaaagattgcatagtaaatacagaatacaataatcaagggattcggatagcttgccaatctctgtgatctgaacccaaagttatagggatttcttcggtgattcacgatgcgatagctgaatttgctaagtgttggcatgctatgcggattgctcactacccgattaagaaggcttcgtccgagcgaatataggtggtgccctattcagcatatttcttgggagtaggtacatagagttgatttcatgtgtcaccatcgtgtgatgccacgtcagagtgtaaaaattgggataacatttgccccccaagtcgatacgggactttcgaagttgtgtgtagacttcatccgagctgacctagtgtttggatgggtgacacatgttaggcgcgtctgttcgtgattcgatgtgaggctgaccaggcgtctattcaatttttcgactaattaatgctctaacacaattaatgcttcgaaactaattttttctcaccacatttgatggatacagttgattatatttgattcccaatatttgctttgggggaaccgatgcgtctaaggcatttgaaatgattacccttcgaaactgagcttcattcacaaattcacttttaccaatttctctattaagcaaacttagagcaaaaaa

SEQ ID NO: 48449 - DNA, 3078 bp, Cannabis sativa
ttttttttttttttatatatttgactttggatatgggatgttgacaagatataaagcaatttttgataatgaatgaaagtcctagaagcaccatcttcattgctaatgctttatcaaagctttacatagcgctgcaggttctccaaagtttaaatgagctctgccaaggcttatccatgcctgaaatatcaaattttagatgtaagcaatgaattgatatatacccttatttactttaatttatatatcttatctattattgcatataatggagaaaatacagtttccaggcttgtattgttattgatgtattgatcaattttataaattaagtataatagttgtgttggaattggattacaagaatatctttgatctatactaaatttggatgcaaaataaagcacctaaaataataagaaaattatatactcataatggcaatttaagagggattagaatattaagacgtgagacctgagaatattgaagttgaggaagttgagtatgtatgttaggttctactgagtcagctttcccaactcatctatctgaagcaagaatgacaatggagacacttttcgtggcgccttttgtctcttcttcagtttggttagaaaagtgggaagagtttttaatgtaagctagaagagataataattgctatgaagttatgaatgaagggctcaatggaaatgaagctagcttaaattgaagaggtgtttcatttggttagaaacttagaatatctgcatggacaaactaaatctaaaaaaatagttactagtacttttgctgctatttcagtttgtgtaaaatcagatttgtgcaaatatagtttgacatacttaaagtttgatgatgtacatataatttttttttagagagagatgatgtacatataaattgattgtgttttgtagtagtgttatctgtaagcaatttattggcccaattggcttatcaatttatttttaagccgttatttcacttatagttgttttcatattacaagaagaaatgcgaaaagatattaatagtgtttagtatttttattggtgttaaactgttattggtgtaattaagtatcgaattccatataacttaaaaaaaataacttttagagaatatcgctagataactggcgtcacctataaaaggtgttaggcaccactagtgcccaataacaatgctcttttaaaaattatagtttccattttgagattaaattatttttacttttcgatgttaaattgtttctattttttaagatatttaatttcaagaaatggctagaagactctatgttcatcctcaccttttctagaccctagctagaaccagagggaatcagctcaattcccttcaattttctgagttacaacaaaggattgaggtgtttccaagtagaggtaaaccctagagctcttacttctttgttgtttaagctttaattgggtttgataatgtatttttgagaattagtggccgtttaggtttactcttgttcttgtaagttctctaagtttattttgaataggaataagttgtttatggctggtttagttgatttgggaggagaatgatcaattttgagtttggaaactcaaacttgattcattaatggcactttttgattctgtgtgtgttactgaattttattatttgggaaatgttatttgaagttggtataggtgttttggaagttttcgtgcagtttgggatcgaattgtagtgttggtggtgtttttgatgtttcctgcactgaactggttgatcggttcaataggacccgtaggaattggaattccgattggtccctaagaaaccccacagacccggtctttcggttggggcagttttagaaaccctagattttcccatcaccgctacaaaaaagcctttttgcttcaattttcagtgacatattgaaaatctgcgtcggattgtgtaaccgacgttataaccgtagatgtaaatactattatttttttcttcatttcttaaccgtagcaaaaggtttgttgcttcatttaatatctgacactaatagtaatcatttttagtgtttttgtcaaagcataactgatgcaaattgttattttgtttcggttatgaaccgacgccacaaaaaaaaaaattaaaaaaaaaaaaaatactagatctgcggtaaataattttgatccagatctgccatattcgtaccactatacttcgaacaacttcaattattccatgatttttcttcaagttaagaagcctcatttttataatattggtatactaaaggctaaaacaagctccacatttcttaaaatagaaacttcgaatggataaagatactttctcttgaattcaacttgtaaattttcattttctattgatttctgatgtggcatttaagaatacatatacaaaatataaataacatagaagcataagggcacaaaagaagataaagaaagttcatttgttatttgttaatataccaaatttgtgattatagcagctcactttgtttatctaagatcaatcatgtccacgaaagaactggtctcagactgggtcattatcttgcgctcctgccaattcaattaacagccaggaactatattaattacatcccactagaacaaacatctcttaataatgagaaaatagagcatgataattgaatcttaatcactaggaaattctccaagtgtccatcctaagtattaaaatttctaatttaaatgtgcttatttcataagttatttgagttgacttgttaagaatacaaattatgagcttttggtaccaaagtcaatataatccatatgactcaagtcaacttttgtaaaaataagattctcctcttaagggatgtgatacaatcatacaaggactcactatggttctttctcatcaatgggattggatcataataaaactcaaaaaaaatctagtacgaacacagaacacaaagccacgataattattttggaaagaataatttaatcattaacaaagtaggaagcaaattgttacattatagaaagaaaacatatatgaaaagaatgaaataccaagatataa

SEQ ID NO: 48450 - DNA, 1329 bp, Cannabis sativa
  modified_base (1276)..(1289): a, c, t, g, unknown or other
attgagttgaattgcaactcattcctgggatagaatcatgttgaaaacagatagcttggtgtgtgtccaagcgattcagagcggtatttttatgccttcacagtttggacgtcttattgttcaagatgtttcaaatttgcttttggctttatcttttgttgatttgtgttttgtaaaatgatctgcaaataagttggttcattgcttggcaagagactcttgtttctctacaggtcgtgtgcttcagttggaggactgttcctctaaagtgcgttctattattttgattgaatttattaattaatagatcttatgatttttattaaaaaaaaataaataaataaataacaacttcaaattgtacatgctcttccagctttgctcatgtatgtactctcacctctcatctactaaaagtggctacatatataacttatatattatcactatatatacaatatcaaatatacatctagtaaagttcaacaatggcacaaggtgatgaagggtggaacataccagctagaacaatttattttattgttgttgctggttttattttgattaattttacatgtcctttaatgagataagagttatatttttttggggcatttcttgatatactttaataatatgatggcattttttatgccaataaacttcttgaaagaagtgttgggatttgttcttttattttgttggaccgctactttattataactcttacattagtatgatattgtttgctttaggcctaagccttcacgattttatttttaggcacattcttaaaaagcctcatactaatatagtaaatgaaacacttatatccaaaacaactcttgcatattcttctaatgtgggaattgagttgatataccgtaacaatcctcccctcaaaccaaagaccacatgctcgtggcctctcctctagtgaaaccccttatgttgctgctaacatcaacggaactcgctgcctaactatcacctttattaggaagactttcaatacaggtcctaacaccgatctcgatcttgtaccgccgtaatcatcaacgggacacgtcacctgacttcctcaatatcaggtagactttcaattcaaggcaccatatagatctctaatcacgatcacattgagggcctctcccacacattgcaaatgcaacccactatcccaatactcctaaacctttggctctgataccacttgttgggacccgttcttccaccttattggaccgctaccagggccgaccctaagttgaaatgnnnnnnnnnnnnnnaaaaaaaaattttggacccttactataaaaataaatggta

SEQ ID NO: 48451 - DNA, 1193 bp, Cannabis sativa
cgcagaattagcctaaatatcgataaaacgtaaaaacttagctgctggaaacaccctaaaaaggtccaccatttttctgggttttgccctagaaaaatggtccactgtttttatagtaccctgtaaaaacagtaagctgtttttcctgcagaaatagcctgcttggagttttacactccaaaccccatcaaaactcctccaaacctaatgaaactttccaaatatgtttataaacatacatccaatataattaaacattcaaaaccaataatttacttaaaatcacaaaatcaccattgttgagtgagttctttaacttaactcactcaactcaaactataacaaccttaaacttaaaaattagaacataattacatttttgggatattacactggtcttgggggtttcgattcagctgaaatagatcttggtgcttggttacaaggtcggttgggtaggagaagtcttgatgaggttgcctgtgttttaatgctttgttaggcgatttggaatgctcagaacgatgtcctttggaaccataagatgccttctgtggagaatgtggatgtctctgtaagagttcgttttaatcaatttataaaagcttagtaaattaattatgttctatctttggggccttggtgctttggagatggtgctaagctttggtctagaccagcataaaatagtattaaaataaatgttaatgtaactatgttctttgaggaggctaagattggtttaggaactgttgttcgaaatcatcatgggaatatggtggttgcttgttcttagataaaatttggtgtaatgcaacctgaaaaaagctatgggtttaaaggaagcacttagctggatcaagaaaatgcagtggcacaggatgattattgagatggatagcttagtggttgttcaagctatgagaagttcaatatctatgtgtattttgtttggtttaattattagtgattgtaaaacttttttctcagaattcttacatatcaatttatgatttattaaacgatctgctaattatgcggcttgttgctagagttagtcgatctatggtgattgtattcttagtgagaatgatatctcagctgaattagcttcactctttttttttggctgatttacggggttaatgaaatttgacaaagttgctttcaaaaaaattaaaatccctagaaaa

SEQ ID NO: 48452 - DNA, 902 bp, Cannabis sativa
acttgccacgtggtatgtcgaaggacttttttgtcatttagtaaatacacggcttcggagtagctgattttaattagccccacgtcgttttataatctttttgaatagtaaaagcaaaaaaaagattgtcgtttacgtgtccaatcagccacagctttcgctgacgtgtccttctctgattgtcgtacggcgacgcttggatgcgagctggttcgcaacagatctttgtccttttttttttcttttacgtaatcaaagatttcttctttttttttttttaatacatgttttgtcttgtattccccgcctgtgacgcacacgtaaccaaacagccctaaccaccaccgtcggatttagaattggtcaacgtttgaaaaagaaaaaatgtataatatttatgagcattgttgtgaggcataattggtgtccagcacctaaagcctacgattaattagtcatatttttttaaaaaaaatacaaaaagacactcatagtacttagtacccttgtaattggtttaacacaatatcagtcctacttattttactttcgtaaatattatcgaaaatcgttaattaattatagagcgacactttatcatagtactagacactatggaccgtacgcagaactggattggattagacaggttaatttgtccaatccagtgtttgggcatgttagaagtctagataactaattcagctaacctcatctgtctgtgattatttatcacatccaacagggtgagataaataatccaatccagtcctgcgtaccaaacaggccctatgagtgccacgcagcaaagcttttttcaaaaaaagtaattttttaagttatattagatttgatatttaattacactaatagcgatataacagcaagaagatactagacaa

SEQ ID NO: 48453 - DNA, 1275 bp, Cannabis sativa
ggtggtgatattggaagctggttgtggcgatgaggacaattcagtgagttcttgaacagtaacacacagatggtaatatgatttctctcaaaatttaatgagcatgaagatcaggttcaatcgttcctccaaagctcaaaacgttgtgatggggttgataggcggttttaggatttagtttatattttagggtttaatttatactttttttaaggttaacctgagagttaatatcaatttaatttaataaaataaaataaataaaacaccaagaattactgttagataaccacttttaatatacaaagatattaactgtaatgtaccttttgtttttaaattaagagttcatcttgaatttaaataataccaattcagctacagaaataaacctaaaccaacatgactttactatggctcttctacaattgcaattatcatttaatgattcttcccttgactttgaggaattatgagaagataccatacctttaccttaagcaagccatctaaattaacttcatatgatatcaaagatgaacaaggttaattttaaatttaaagcttgaagctttggactgaaaaatctggcaaagggaaaaccaagaagatcaataactactcatgcatttcaaaactgattacctaaggttgatactgtagtccatcactttattgtagttttataattagactaacgtttttagggtcgaaaatcctataacgaataatgcaaaccaatcgaaaagtttcatacaaaacattcttatgtatggtgcctgtagtttcattgaagaacttaagtacaaatgatgtccttataaatgataaatcaagacataaatttttccctaaaaagatttctcaaaagcaaatcaaaactcaattctcagaaaactaagcttataagaacccaaaaaaactaccaaaactcataacttgcaattatatactagaacaagattgtatgaatgtatgaatcaaaatctttctgccaatctggcagaaactgctcttagtttcgagtatacctttccggcaggggaaccgagaataagtctgcaaagggaatatctagctaacttaatatttacaaaagaccccaatatgtgaatcttggtatcagcaatcacaattcttgtcttagtagcattctcaattttaaacttcgttgtaccacctttcccagatagtctacctttagtacgagacaagtgctcaccatggagagttttaacatcctttatatcgaaggactcaacatagagctcatcc

SEQ ID NO: 48454 - DNA, 1404 bp, Cannabis sativa
agaaaataaaaattataattgaaaaagtaacaagtgtcctccttctccacctttcgatggatgtatgccacatttgctagtattgaggccccaatgttgatttcatatctcttaaaattatacccttcacatgcaacactttaaaacgaagaatctctacatttaattaataatagcgataataatattttaaacaataacatataataattaaatttgtggtattgatgagttgattaggtggcatttttatgataatatatataatttcttgttctttttctatttgttcctttctttttttttttgggtacgtgcgttttatgatcatgaatagatgtttgttggatttgatattataaatccaaaaagattaaatattttattcagggatcccgtaaaatattttcgatcattacaagtcattagtacacgccgacctaagcggtaaatgcggagatttacaactaatttcactggcagacccaactcttgtagtctagcttggcctgaacatgtacaatgcactgcaaaagccctcgatctcatggccgctcaactaccaacttatcctttcctgcacaagcacccgtgagcctaggcctagaggacagtataaatatcaacatgaataacagtgataatcacttttcatatagcatgcctcagcatacaaaataggtgccactgcactaaatatcgcactctcataagtattgatgccactgcatctatattctatttgacatagatttacgtgttacctcacatgtttgtttataataagaccttagaatggtttaaatcggttctaaataccgagtcttacctagttacgtcttaactgcataactctttatatcaacatatataatacatgatcgccttcatattcacatatattctagagtaataaccctaaatcacataattgctaaacttagagtaataatcctagtctcgatttcccgcatatataccaaataatgagcgccagtgcgctaatctttatgtgctaacccactctcttacttggtaatccaagtatgtagagattctaaatccctaggtgttcctgagcaagtaccggtaatttaagtcacacattctcgagattttacaaatagggataatcctacatatacataatatgaattccaactatagactaacacatagagcccgaaataggatttccaacaatatcaaaaatgtccaaaacagagtttaaagtcaaaagttaggcaaaaatgagaagacaaaaaattgagaaaacaacacggtcctcaccgcggcggcccttagccctcgccgtggcggctccaacccgttggggctcgtcccgtcgagccttgtggcggctgcgataaatgtctcagaacacacaaaaatccaatttttcat

SEQ ID NO: 48455 - DNA, 1492 bp, Cannabis sativa
  modified_base (32)..(59): a, c, t, g, unknown or other
acaacaagtattgtgactaaaaatacaattannnnnnnnnnnnnnnnnnnnnnnnnnnnaatacttttagtcacggactttttagtctcaatatagaaatcataatttataattagtgtcaattttttcacttttaatcacaaattttgtagtgaccaaaagaaaaaaaatttgtagtgtactaccgaatcagtcaaaataaaaactaacggacaaacaaaaatagggagcttgaggattattaccgtaattttttgagattgatgatttatttacatcaaataaactttttggaattttatgccgccatttttcctttcaactaattaccaactttaattatttagatataaaacctcatatatgctgagcaatcacctagctacactaatctccaaaatgcataaaatacaataaaatatttgggaggatatatatcttataaatttaaaaataaaataaaaaaaaattagaaatcatgttaatgaaaattccttttttaaacttgtgtacaattattattaagtaatttgaacacgatcaaattggggaaatgatacaatttgagaccttcttaatgtgtagatcaagtttgtacttagtaggctaaacttgcatataacacttacgagtatggatcatgacccatgtaccaccaaaaccatgtataaaataaataaacaagacaaagaaaattaattatatagtggccactttttctatagcatgcaataacaattttaagttttttcatcttaattcattccttgtcaccttattttacaaatctgactcatgttagcagtttaatttatatgaattcgagtcatgaaacaatatgattagcatctacaacatgaagctttcccgataagctaagagcggtgaggccccaaaggccatcatcacatactaaaaggagtattattattagatcatctcacactaatttcctgtggtatctacaccaatttaatgtaaattcttttattttttggtacaacaactctaataattcacactaaatattctactaattaaataaatatggaagctaatacaataagtattgtacattttacttattgataggtataataatttttagctattgatttaatcaaatggcttaaattaactcttagaaactacaccgtaattaatattttttatttataattaattttaattattaataattagatccaactaacaatactccaaagttaactccaaacctataatttttcttacttatttacattataattttaattaattattttttaattttgaatttatatattaattttattttttactcaacaataattatagctaaaagagtacaaaatattcaagttatttaatcctaaaatgatcaatacaataaataatatactcatagtgtaagtggtaaaattctcttacatcaactataatgtcataagttcaatcatttataaaaacatgctttttattatttttaatt

SEQ ID NO: 48456 - DNA, 2613 bp, Cannabis sativa
aggcaatggagaaccgatcatagaagggccatatatgccattgtaaatttgttccaagaacttatgacaagattcaaagggatgtccaatgattccacattcaaagaggaattcaggtaatctctcatagcgaaattccaaccaaaattcatctcgagagtcctttaatttgaccatgtttcccctgagcaaaggcttggagatattaagagtagcacgaaaatgtagaaagggcccccaaccttcatttagagtcttcagacatcaacataggtaccaaccaaattgccagcccattcagccatggccttctatttacttagaaatggcaatcgatgtaattgtatccaaaatggagtcaaaaacatggcctctggtgcagcaatatatagggcagtaggtgtggttagaacaatgaaattattttggaaatggcaaagctccattaacaagacatttttagatcaccaagagagccgaaggtgattaaaaaaaagtctcgaatggtgatcagcaatggtgacaaggaattgccctttccaaaaggcattcattttaatacgaaaggtttttcgatttatgtctcgagatgaaattactctggcatagagtacatagttcgattgttgaggacctccatggtgagagactgtagggaagagtttgcacctctctttccgagtcagttaagattaaggtttggttcaaatcattaaacaaatgatccatggacgaagaatagcatcagtgtgaaggttgcaaattgagaatgtgcagaaaatggatacgaaaaggatatggcatgatggagggaacgattaatatttgaaaaaaaggaagttatggtataaacagataagagaaggtagagtaatttggtggttgaaaccgttaaaaagaaaaaataaatactaactgccacagaactttttaagggcacactgctcatattttttattgagtcgcgcgattatattatttagttaaatataagataaaataaatatgtataaataattttttattagatttattgtatatatctaattatgaacaattatgtaattaggtagcccactatatatagtcataactattaaatacgatctatcaaaaaaaataactaataaatatgtcctaatccctaattatttatcatatatataatttgtccttgatctatatttaatataccccaacaaatccttacaaaatatacataaatatatatcccaacaaacatatacaaataacttgcgaagaaaaaaaaaataaacatatataaacaaataaaaatataaaaaggatagcaacccagcattattaaataataaagtaaagccattatgccaagcaactaatagtttaatctaaattttcaattagagcaacctttacaatttaataaccatccacgtttcttattcaattttatatatattatctataaactataaggtattcttcgaatgtggattagcttttcttattaattatgcactatgaatgtttctttaattagatcacaagcttttagaaataataaaatatataattaaaaatcaaaataaaagatagagtcacagtttattatatggagttattctataatcaccacttaaaagatgtacatggatgtactctttatttattttggcgggaaaattttttagtttaattaattttatagttgtgtacgttgtagttaaaatgttctgtaaaatttgaaaaatttagaacaatttataatataagaaatagtattcaaagagtctatttcacgtgcatataaaataaaagagtcacgcatgtaacgaaatatttaaaccatattttcagcgtattaaatttttctgagttttctcaaaattttacaaaatattttaaataactgtagtgcacacaacgacgaaaaaaattggactaaaaattcatctaaatgaccaaacaaggaacccttttataagggtgcattatattcttctaatgcctatagatcatgacaaattaataagtttatttatgcaattttatttaaacaaataaataaataagtttatttatgcaagaacattaattattatgctctttctgcaaaacttatatatattatagagtcaagattaggtgcacccttcaaaattgctactaattaagagtaatacacattattttttttactattatataagaaagtaaaataactttctgttggtgtagagcctgtttttaagcaagttattgatacttaatataaaagatacacaatcaataatactggggattggattgataattaattaatatttgtaccaaaattaaaagagatttggttgaacgtgtaatattgtcaaattatagtatattatgtcattaattttgcgagtacacaatagtacaattaaataagaaatttgtaaacagcccaatccaaatgatcaaattcaaggcacgtagctttcagcagcctcaccaccaatcaatctttggctctaattacgcctcaaagattgatcgacccccttacccaataatcttccaaaaatatttcatctctactacattaaacttcgcatctctttttgcatatgtatttataatatatatatatat

SEQ ID NO: 48457 - DNA, 2285 bp, Cannabis sativa
cgatattggtattaatcaccatacctttgcaacttatccaccaatcccttccacagttaatactatgtcaagaggtcctggaactcaacatacaccattgaggcaaattatatccactgatgctgtcataagcacgacaatccagcaaacaatagacaaggaaaacttctcaccaaatagacaaccaaagagacaaactgagagcacattagtcagaaaatttctcaagcggtgcaggggtatacaacacactgaatccaatccaactttgtcaactggacaggaatcaaactagaatatttccaactctgtgacggatcaatctggttttcttgacaaatctgcggtggctgggactcagccccgcaatcaaccatgaaaatcgtcagttggaatgagcggggtctggggaatccgagcgcgttccgtcatcttcgattgcttgtcaaggagcaatcgcctcatgtattatttattatggaaactaaacaaggtcctaatgtaatttctcattttagacaagctttaaattttaataatggacttgaagtccctagagtaggtttaggtgggggtttatttttactttggaaagatgatgtgtttgtaactttgttaaattataatattaatctgtttgactgctatctcgcctttggcaatggtcctactttccgctttactgctttttatggctctcctgaacgaggaaacccttgtcattcttggttaactttaaagaggctgcgagatgttgcacctcttttaccttggcttgtgattggtgattttaatgagatactttccaacaataataagcaaggtggtgctttacgatgtgaatctcaaatggatgatttccgtgacactttagactattgttatttggctgaaataccttacactggcgatcctttcacttggattaaaagcatatataaagaagataccatcaagaagagattggatcggtgcttcgtcaatgataaatggctaacaagtttcgagccgattacaacactccatttggacttttacaggtctgaccaccgtgcaatctcagttacggttcaacaaatcaaccaacaacctgaaaatgtcaagaggaagacacgattcagatttgaaaagatgtggcttaaagaagatacagcagcagaaatcattgcgcagaactggaacatacatagtacaacaacgagtatggatctttttctgaacaatttgcaagcttgtacaacttctctacaacattggcatgctcacaaattaggaaacatgaagcagaaaatcaccaaaatgcataaaggtattgcagcacttaataattctgctacaaggacacaacaaaccatggtagacttaaaaaaatctgaatcaattttggatgatttgctttcacaagaggagctctattagcaacaacgatcaagggtgtgttggatgcaaagtggtgatcaaaatacgaaattctttcatgctcatgccacttcaagaaagcaaaataataccattaaatcactcacaaactcagtaggaattactcagagttccaagaaggaaatgacaactattatcacttcttattttcaagagctttttactgcttccacaattgatacaagctccctccaacacaccattgacaccattccaacaactgttactgctgccatgaactctcagcttacaaagccatttacaccagaagagatttctcaagctttaaaaacaatgagtccggataaaagtccaggtagtgatggaatgtcagccatgttttatcaacaatattgggagatagttgggccttttgttacggatgtgatactgggagttcttaaccatgaacgagatatggatttaatcaataaatccatcataactttaattcctaaaatcacttctccggctggtatgggagactataggccaataagtctttgcaacgttatctacaaactcatctccaaagtgttggtgctcaggtttaaagatgtccttccttccgtcatctccgaaactcaaagtgcattcctttccaactggctcatcacagataatattttgattgcttttgagttcgtccaccatctcaaacataaaacacagggaaggaaaggttactcagctccaagttagatatgagcaaagcttttcattgtgtcgaatggagatatattgaagcagtgatggtcaagatgggatttgatactcactggattgcacttatcatgaaatgtctctcttcaacaagtttttcattctctctaaatggtgaaatt

SEQ ID NO: 48458 - DNA, 966 bp, Cannabis sativa
aaaaattagattaaatttttttttagatgccgaaataagtagagggtgcatcaatacatcccttttaagggagtgcattgtagaatcacccaaaaatttttagggagtaaataaaattttcctaaatttaaaaaatataaaattacaaaactaacctaaaaaattaactaaaaccaaatatgggcttttagaaaagaacgttacaagtatatgggctttcaaaacccataaaataactctaattgaaaaaaaaaaagaaaagccataaaaaaggacacaacctaaatatgtcatatttatgggaaaacaaatttaaaagtgaaaattacacttaatatggttttttaaaattttgttacaaaaatatggcagatttaagtttggtcactttctatggcatattttagcttttaagtttttttatggtatttactatgccatatatatgtaaacttaatttttaaaacccatatttaattttagtgtccttgattttatttcttctcctctattcaacaattctagctacgccaccccatcagtagctctatttacccacatccgttcaccagccagccccaccttctctaaccttcactgtcactcatctccatttaccagctcatacccacctcaaccacacttctttgtcctaaagctttaaacctaaacccacctctagttcacacacaatccagcaattttcgcacaactctgacaacagtgtctccgacattgccttcgacattgtgatcttcatcgtcgagaaaaatcaactgtaaggttagacgaccattgaatcggtgggctcgcaagtacttgtaatgaaagagcctctcctcccttttgaagtaaggtttgatcttctattatgcacagtatatagatttgcatgtgtttatctacacatttattataagcttagttttaccacaagtttacatagatttaatttaatggttctct

SEQ ID NO: 48459 - DNA, 1675 bp, Cannabis sativa
ataagggagttaagtttataaaaatttaaacataagagagttttaccacaaattactctatataatatgatatacatacttggtgcaattgacagaaagactaatgggagaaggagttttgacgttgcatttagagggcaatccagaagcaagatcagatttgattcctttgacacttttataagaatccttcaagcatttgcatatggattgtcggttagatgatgtgtttgcctgagcgtttagcgatttgacaccgttgcaacaattcatcgagacagaaccaccatttctaaggtagtttacacatgaagagaggatgttattaacttgtgaacaagtaatgtctccatttacgactggtgcggctataaccatcaccataattgccacacaaagaaatttcacaccaaaaaaactcttcgccatcgattatataaattaagattagggtttgttctttctttatttcttaatagttattgtagtaagtttttatgatgatatggtagaaatttttctcattttataggtgatgaaatatgttatatgtagtggtggtagttttgtgtgttaagttattaattacttcattagaaatagggttgaatcatcactagtttattgattaattagttaaaacaaactttttaccgaattttggttattaattaattgcaagcctaacttatttggtgtacttactataccaagatttaaaaaaaaaaggttacaaatatttgagactaaaaattataatcatatatatttttgtaatataaaataacctttattttaaatttggtcaaacttgaagtaatgacatttcttttaatacataatactctatttaaatagaaaccatttaataaattaacaataaatataatgtaaatatattattaactatgtttgttataataagtttttatcacattatattaattagacttaattaatgagcataatatttttggtctcaaatacaatttataaataaaaattattttctacattttttttaatcataacaaaatttatgaaaattacactaagattttcttaaaaagtaacttaattaacaaaattctaaaatgaatattaactaagatttacaatatatatatatatctaaaacagtaactaattactatattagtaattaaatggttttttttttaaggaaatagcaaaaaaaacatataattttcacatcttgaaatgttcacattaagagtttattgcaatgatattttttgttagggtcatccaagtaacaacgtgattaaaaattatttttaaagtttgaaagaagagagagaaataagaaagagaaaaatgagagaaagagaatagcttgaaaaaagggaaaaatgggaagaaaaaaaaaatgagagagaaaaaagtataaataaaagtattattatatactcaaataaataaaaaccttattaaaacttgaccaaattattttcgaaaattagattaaaaataaattattttagacaatttttctaaattaattacagttttatagtaatagtagtgctataaattacaagtaattatgttaaacaaatactactttttttaaaaggaaaaagcagcattatatgtatttggtttttaagagatattatattaaaattttcttaattttcacgttttttaattt

SEQ ID NO: 48460 - DNA, 1270 bp, Cannabis sativa
ataatcacaaacttcggttgctgcagcatgaagagagaggaaccagccttcgagttgataaaattccattgcagcagagtccttttgagttgatcataccaagatctcggagcttgtctcagaccatagattaatttcagtaacttgcatacatgatcaggctttgaaacatcttcataccctggtggttgagccatgaaaacgtcttcttcgagtactccatttaagaacgcgttgttgatgtcgatttgtctaatttcccatgactttgcaacagccaatgtcaagacaattctgaccgtagatgccttgataacggggctgaatgtctctccaaaatcgactccgggtctttgatgaaaaccctttgccactagccttgccgtgaacctttgaaagctgccatctacattaaatttttccttaagcacccatttgcagcctactacagagtgtgagtcagtacggggcaccaaaatccaggtgcgatttcgacgaagtgcttccatttcttgatccattgcaccatgccaccccttgtgtttaagtgcatctgctactgaacacggttcttgacacgaagtgtcaatttctgcttgatgaacatacaacttaggtttgaatattcctgcacgagctctagtgatcattggatgctgttgtggtgttgtagcttcgactgaagctgttcgtgatgtctcgtcaggtggctgtattgattcaccagcagcagtagcaattggagagtaaataacaggtgaaccaggagtgatgtcaggaaaactaacctggtgtgaagtctctgaaggtgtcgaagcagctggttctgcattgagtactgaaggagcaggccgaggcacgttattttgttgttgagaagttgtggcaatggggagaacgaaccaagattgataagtgttgagggtgacagttttttctttttgatagttgttcaaaaaacctgatgtgaaagggaactcactctcattaaaaactacatgtctagaaatgtatattctcccatgaggactcaagcatttataccctttaaaggtctcactatatcccaagttcacacatttcatggagtgaaattgaaacttgtgagattgataagttctaagacacggaaaacaagcagccccaaagaccttaagaaatttgtaatctggctgttttgaatgtaggagttcatagggtgattttccagctaaaacagctgtagggagtctattgattagatagaaagctgtgtgaaaagcatcggacc

SEQ ID NO: 48461 - DNA, 2166 bp, Cannabis sativa
aacctctttcatgagaaaagtaaatttgggcaagtgtcctccatacactgcatgaaaacatctctaatttctgcatgtcatgctactagttcaaaatttctaggtttagatgtggcatgggccttcatgtcttgacgagttatcagggaggagggggaggagttctttgccgatagtaggttattggtaaagtccttttcttgggacttcatgatgattcctcgctccaggctcttcaaggtagttcatttcttgctttggaaccaagtgaggtgacatttgggtgattcgtgtgattctcacgaaaagagaagtacgtaaaggcgtgcctagtgtgtgacaagttttatgatggaattttcccatatcaattcatctctaaacatttgtttatggatcaacaactaagcatctctcaaccgcaagaggtcgtatagctgaaaggactaacaatggaatgcatggataggcgctattccaatgttcaaattcccctagactaaaaatattagggctactaagaggtctgctagtcgaactgaaatgaaaaatacttgggcatgtcaatccacaaaatttctagcaaaagattcattaagtctgcttagacaaattaggtgcataatacacattgttcctgtgggaattttatattaaagtcaactaattaatattttgatcttgactttgactgactcaaaaccaatcaactgctatgtcctttttccttgaatttttcatgaggcatcattcatgcactcgtaaaatttagtggattcaagcaaagcctttaaaactcaaaaagtgaagatttttcattgataatatcaaagcagctacaattcgacatgcatttaaatctcaaatcaaacttttagtttagttagtctcactttaaaagttaaattgcggctaaattaactatactttaaaatttggtataatcaacctctagattgaatttttggggctaaatcatctaaacttcaattctactttggttttgacttttttatccactttattatgtaaagtagcaacgtatggtggcgtttggttacaaaataaaaatggaataagaatcagaatggtaataggaataggaataaaatggaatagaatttttattttttttgtttggtaaagactatggaatcaataactgaatatgaattgtaatgattggtatagtatagaatgaaatagaatttttattattttaaccaaaatgtcctttacttttttaaaataatttttgttttataaaattaccattatggtacaaataaaaaaaatgatatagatttatgtattactctcaaattgtattttttttagatctaattatcaaataataaaatataaataaatatataatttaatagtctattttatattaaatatttaagtatcaacataaatattattcatgggatagttcctcctgagaagagagtgccctagggttctcgaatattcttgtgctgtcatcgtcgtctatcggcgttcaagtccatccatgggtttccccttcgagtgacagttcgatctccaaatccctgaagccgtttactgctaacagacggaaatcaccattaaagtcctttgtcttctccctcataagtaaacttctaatatgtaataacttctgggttgatgtcccatctgtgattaaatccccactatatcgatctttactttcctttaagcttgtctataagaaaagcccctttactgattctctactaattagcccccaaccccctgaaccgccttggatcatgattaactctacatttgtagagaacgctagaatttctctaggagccactgtcaatgttgcaggaatcatcattcgattacgtgacatggagaatttatctcttgctgcaatacaatccccaatgatactaactctttgcccagtccactatatagttgaatatcctctgagttttactgcatccagtacttctctttcaagtttccttttttatatctgttctacaaccgtttctcttttatctttttactctagattaccctactgtcttttgaaaatggatgacttatccaacactttcaatgccactctcaatctaactgcactagaaactcaaattcactcttttcctgaagatgatgatcgtgttgggttttgtgccc

SEQ ID NO: 48462 - DNA, 2321 bp, Cannabis sativa
actcaattcatcacccccggtccaatgtggtgtataaataatgtaactaacatagtttcaagacaacagaacagactaccataacaattaattaagtattataagtttcgtaattagttattttgatcgaatcttggaagttggaactatatatgtatattattctactatttgaagagcattgctataagacactagtggtacctagtactttctcgatatgtcgcgttgcgattgactagcaatactccttaaaaattattatattaaattatatgggactcaatacttaatcggacccgtaacgatattgacacataggagggtgctaggcactactggtgcacaataacatttctcttatttgaaatacatttttcaaattatctcatttttataatactataacatatactactaacacttaaaaaaaaatacactactaactttgttctacataactattttaatcttttctattagaataatatcttcaaaattcaacttaagacagaaggaagaccatgaaataatgccatctcctccacaacatgaggctcgaaggtgccaggcaaggaaacacgccaaaaaacaacactatctcattggagtccaaaagcaatcactcctgtacgttcccattttcaaatcctcaacacagagcccaacatcaacaaaaagattaatctcactttgggtgtcttgatacctccacatactaatagcccaagggctaactatattatttgccaagagcttatggtcttgaacagaagtactgcgcctatgccaaataggccaacaaataacaataaattccttcaattcgtatttactcaaaattattaagatttataaaacactgaaaaaatatattaagatttataaaaagagaactcccctagctcatttttcatatttagaaaactactacaatgttagagcttttctctataaattggagcttctgacacttgcctatttctgtaataccatctcatgagaaataaaactcgaagtagacgtagctccattactgtcgcgatacagggagtgaactactataaatttgctgtgtctcttataattacttaacatctatttcattctcgccaatctagcaagcggatgtagcttagaagtctagtccatattttaaagtctaacataaactctctcttagaggttaataataggggaaaaattaagatttcttgttcctaaatctatagctatcgacattatcttttttctttggataggcccgtcgccttccttgggcttgaggtgtggcttggttggggttgtattttgttactgcaatttgatttttgctactgcaattagtcttgtttctgtgacatagtcttgagtgttttagtattgtctatgtgacatagttttgaacatttttgccgtgtctctgtgatacaattttgagtgtttttgtcttgtatgtatgacatgattttattttgttttctttcgttgttggttcttctttgttcttcgatgactcaccatcaaatcgttgttagtggttgggaataacaagttctttgcgactgaaggggttgttagtagtgcaattacgtaccttacacaatagttgagtgcttaagctacaaggttgaatgaacctactgcaataattttttctattatgtcttttgagcggcggatgaaacaaaatataagtgttcttaaggttaattgtgatgttgcaattttttctatctattttttttgtcaaacgatatgataatcaagtagttgattatgtttgtttttctaattttaattctagtcgtatctctaacaaaaagatattccgattgaattgcagactattattttatccattgatcacctttaataaaattttattatttaataataataaaaaaattaacctcaattaacatgtaatagaatttcaaaaaatctcggataaatatttagaataccttaataattaactttaaacaacattatattacttattaatttgtataatagaattactagaaatatcaataggttataatagaaagagaaatgctaaataatattaatattgttcaacatcttcttaagtaggttagttgagcgggttgaaaatagattcaacctgcccaattaaatcgaataacccgaccaacccgtctttcgattttttttttactttttagttttttattatatataacataaatgattaagtctgtaataatataaagttatatacttaatttttaattttaaagtcatatactttggtggaatctaatatttttaatttaactttttaatttttattg

SEQ ID NO: 48463 - DNA, 1905 bp, Cannabis sativa
accttgaatcagccatttacgctgaagctcgacataaacaacttcacgctgtggagaaccatggttgttgcgattgtgcgtggccacagactagatggttatcttaaaggtactcttcctagacctcaagaatacaattctgttactactaacgtcgatggtagtgaaagtgttacagatgaaatcaacccagcttttgagcaatggatcgttaacgatcaattgcttctcggatggctctatggctctatgacaaaggggattgcttcggaagtcatgggatgtgattcttcatctactctttggtctgctcttgaagccctctacggttcacactcaaaagccatagtggattgagtatagaaccaagattcagacggctaggaagggttctctcaccatggctgattaccttcgacaaaaacgatagtgggctgacactcttgctcttgtaagagatccttacctagaaaaactgctggtttcgaatgcattgtctggtttagatctggactatcttccaatcgttttgctcatcgaagcaagaccttcaacatcatggcaagagttgcaagatatgcttctcagtttcgacagcaagatggagaggcttacggctttttcaaccacaaacaaacttggaaataactcaggaaatccaagtaatccatctgcaaaatttggccaacagaaacaacagcaacaacaacaacagtaatcacaacaacagtaacggcagagggtccaactacaatagaggaaattaccctggaaatcgaggtggctcaggaggtagatctagaggaagaggaggaaggaactctggtcccaagcccacttgccaagtgtgtggcaaatatggacattcaacagcctattactacaatagatatgatgaaacctttatgggagcctcacctggtaacaacagcaacaacaacaaaggttcagcaaacctcaagcctttgtagcttcaccagataccttggatgatgaagcatggtacgctgatagtggagcaacaagtcatttcacagctgacccgaataaaatatagcaaaaagatgaatataatggtaaggaaactatcatggttggtgatggaaatcagttaactataaaacatattggcactagtcatttatcaacagattctggtgtggttttatctctcaaagaaatgttgcatgtcccaaatattgcaaaaaatcttgttagcatctcaaaattaaccactcacaataatgtgtttgttgaatttttttctaatttgtgctatgttaaggacaaggtgacaaagcaggtggtgcttcaagggagacttaaagatgggctttatcaacttgaacttccttccacacaacaccaaacccatactgctgcttcttgttttaaatcgagtcatttctctggtctagttacttccaccaaacaaaatgtaaaccaatctaaaactggtagtttatcttcttcaatcaaggatacatggcataagcgattatgccatccatccacacgtggcttagattttgtttaaaagaaattaaatgtaaaagttgtccacatgaatgaaagtttttgtgaagcctgtcaacttggtaaatcccatcgattgcctttcgaactcaatgcttatcgtgctaaagttccacttgaaattgtgcataccgatatatggggacctgcacctgtcctatccaatacaaactttaggttttatatccattttatagacgactacagtcgatatacatggatatatcccttaagaaccaaagttgaagccttaattgcctttactcagttcagggttttagttgagaaccaatttgataggaagatataaaaccttcacactgatgatgaaggtgaataccaggcctttactcggtttgtcactgatca

SEQ ID NO: 48464 - DNA, 2670 bp, Cannabis sativa
cattccaaacgagcccttagtgtcttatttattatggcattggttgtattgaaaacatgtaaagcataaaaattttgatgaacacaagcagtttaaactgagtaatactaaacgcatactcgaaaaactagtaggaacattgcaattataaccctgcctgagtaagaaaaagttggtacctctgcaaattttatatcagcatcactatgatcgttttctcttccagcagcatctccaacataaaaggatctaaaaaagcaaatacagagagacattgttagctagtattctcgagcgataagccttagagcggtaaagaaagaaggatatgtgagcgaatgaaaagttgaataaccgatccatatcaatagaaatgccagagttgaagtgattttccaagagacgccacatccctggttttggtttgcgaaagggatcgtctgcttgaccatcggatttacttactccacaagcaatgaaaacctacaataatagtaattgcagtacaaatctcattcactaacttctcttaaattttctacataaatgtgaaaacaacaaaacgaaacaagaaactcggttttcatcctaatttttcagttaatggtggccactggcaggccaaggaagaactgcaaccgaaatatacagttgaatacagtaatgttctagttcagttcttgaaagaattagaatatatgcatttcattgaaatcaaacttttcgagatagtttggtatctaattttactttctttagcacataaattctcactgatattcttgtaagataggactagcctttatatagactcgaccactaactaactaactaactaactaactaactaacttgtgctcgtatattcgaggcctatatgaataaaaattcaatgcgcgtttacaatttgattctaagttataattacctgaatcgggactttcacagtctcgataaatttgtttaagcgaccaatttttgaatccacggcaacttgtctcttatttttccagcgctcaatgtttgattcgttggtaaagattacctgacaaagattagaaatggaaatcaggtgaacgatgcaaataactagaagcttacgaatcattgatcgtatgtacaatggcaaactaggaataagaaaataaccagtttatagccatcattgtataggctctgtagcttagaaggtattgaaggatacatcagagaccaagcatcggcacctactctgcgacaagtgaagcaactcgagttgttagtgagcgaaatttgtgtaaagcttccaacaaatgaaaatgtctcggtcatcttaactcacaagaaagattttaaaaactatgtattggaatgaaatgtattttacttctatttggtttaatttcttctgctaatttgcacttcaatggaatcagtaccaaaaggatagcatacaaccttctgacagaagtttttgcaaggcatccatcgaaatcaaaagcagcaattttgcttgaatcattaaggccttcatcctgttagaagagcgaaacacataaaatgttaggttcgaaattctcttcacaatatgtaagaaacacaccaatacaacgaactatctcacccgctcaagaaatataacggtttgaaatgccttccattttggtgatagtgttgcatcctgaattagaaaacaatttcggttaaggaaatcatgctaagaaaattgtataatctgttgtggtagagggagaaagaaaaccttagaagggtgtaataagattgaatcagaccttgtacttattcttgacatcagaaaccgaaaatgttacatctacgacttcaccctttgaaatagatagctgcaagcaataatggcaagattacaaaacagaattcgataattgtcaagattcaagaagtggtacactgaacacaggaataattgtgcaaaacaaaagacatcaactggactcgtgttacatagaaatcgaatatcaatgctcacgcatcagatggcactgataatagtatgaactctcacgaaacgaagaaaatacaaattgggaaacaaagaaaaaaggaacgtcacgaataatgaggaaaataaagatagctagcttattttactaaggatttcacaagcaactcatcattgcttaaaatgattcctgaataagcataatgatgatgacatagtaattacaatgtaagtaaatgtcaacatgtagggaaggtaatatagagtccacacacacacatcttaggatgataacatatggaagtaactcagcatcaacatgatcaatgttaaacctttgtgccattagaactagtaaccagaaaccatgaaaggcagagcaaagaagagaaagaagaaagagagaaagaacagagaaagggtggagaaggaaagaagatctcattgaatcaaatgtgatacaagatatttatacaagcagagatgaataacaaactaacagaaaaatataattgcagctaactaactaacaaccccaacaaacacaatcataacagactaactaactctcaacattagtcttaacatcgcccctcaaactcataattgaaaggtcttcaattttgagtttgcttctaaatgttgagaatcgttggctggatatggctttagttagcccatctgctagttgatcaatggcagcaacatgt

SEQ ID NO: 48465 - DNA, 895 bp, Cannabis sativa
tctcttgctggtagagtttacatagccaaatattttccaaatttagattttctttcaactgaacttggtaacaatccaagctttgtttggcgtagcatttggggtgctcaagatgtggttcgtttaggtgcaacatgagttatttgtgatggtacaaacaccagtattctcggttctccttggctgccaacacctaataacaagttcattacttttaatcaccctgggctgcaaaatcaaactataagttccttgttttagttggataatcgcagctgggatgtggatattgtgaatgacctattttctgttcaagaagccaagttaattcttggtattctgttgagtagcactgttggacccgattttcggtcttggacagctgaccacaaaggcgatttctctgtgtgaagtgcatactctctgctgcaacgtcaaaaataagtcacaccagggccaaataattctggtttttggtgcaatctttggcacctaaaggtaccacccaaagtgtccaactttttgtggcatgtcatctccggttccctccccacttgtgtcaatcttgttacaaaacatgtgccaattttagctcaatgcccgatctacaacttacatgttgaaactgcattgcatgctcttctcacttgtgattttgccaaagcttggtggtctgtttttgtgtggccgattacgattgcttcaccatcaacctttggcatttggtttgagcttctgcagaatactagtgatacagaccaggtatttcgggttgcaacactatgttgggcaatatggaaagctcaaaacaaggttgtttggaacaagcgaaaatccaccattaatgatgttgttgaccgaggttttcggcaactattaaaatataattataata

SEQ ID NO: 48466 - DNA, 1194 bp, Cannabis sativa
catacctatttgagttttataacagaccgtttattatataaaatttgtaatttaaatcgaatccacattaaggaaaaggtatagaaactgaactaacaatattgaacaaaggaaaaagttgcagattatcaacatggggtggtggcgcagttggctagcgcgtaggtctcatagcttagagtgatcctgaggtcgagagttcgagcctctctcaccccagtctacttttcatttccttttaatcataatatcatctttcatcacatggcaatgttgttttatctttccacaacttataaacaatccattcataataaaactttttccaaatggatattggatagtgaccaaattagtaataacagccaaaaccaacaaagaaaataaaatctagccagcctttgtgaactatttatgtatgatttactcaaattcaattcactatataaacagctctcattactattaccagacaagagagttggaccagctctcctattatatgtttttttttttcaaaataaaaaaagactggcctttttcttgggattagttgagcttttttcttagagcacaatgggtctaatttatcagcttgaatcttgttgtggtattagtatttatttgttggagaatttgtgtgtttgccatattgttttatttcagtcatccaacggtcttttatgcctggctcaattcaatattatcctatacagtatacacacttttaatcttcgtttacttattgctaatttacaatttgattaattcatattcaagtatctttttgttgagaatcatgaagttccatcttaaaattaattggcaatgagtggagtagtccatgttcttatatatggctggctaaaatgtaattttcttgcttatttttgttcgaatctcaagcgtttttgcactatttagatcgtgtggctggctaaccaaatggatgggtgtggatcgaaagcccgctagagatatattaatgctaccatgttgagaatcatgaagttcaatcttcaaattaattggcaataagatattcttatatataacttaatatttttacctttaatgcacttctccagtacttttcaatcaattattgtgtatatatatatttatttatatatatatatattaatatcttcggtttcaagtcgtccacgcaatgtcctatgtcagtgatgtttt

SEQ ID NO: 48467 - DNA, 1363 bp, Cannabis sativa
tttgtggatttttaattttagggataagggtgattatcgtcttgtttagtctagtcggatcaacaccatcattcaatacactcaaaacagcattagtgaccgattcacccacaatggagcagttttgttgataaaacatcgaggacataccatcaataccagggcttttgtcaggggccatagaatgtagagcattctcaacttcagcaggtagaaaaggtttgatgagttcgtcattcatgtcttgtgtaaccatatttggaattgcatccaaggtttgggaaagagaagcttcatcaatagtatcaacaccaaaaatggaagcaaaataattatgaattgttgcagccatgtcaactttggaatgcacccgaaccctagcttcattaataagtgatttgatcttgttgttggactttcttgctgaagctttagcatgaaaaaatttagtattgcggtcacccgaacttagccaatccacccttgaacgttgttgccaataaatttcttcctgctctaaaagatcatcaagaatagtttcagcccttttcagctcacgcatattgtcattatcccgatgtgtgaggttgttgagttcatttactcgagattgagttgctgtgatgtttttcttcatgctgccatatttacgctgatgccagttttgcaaagaagtagcacaagagtccaaactggacaataaggcctgaaccgggtcaatgttggtggaatgatcccaacacttggtgattaactctttgcattctgggtctgagagccacagcttttcaaaacgaaaccggcttcgtcttttttcttgctaaactgaggtgccgactggtgtaaccatgactgaaatggctcggtgatctaagctaaaatagtccaagtgatgcaccgtaggggtgctgaaagtattgtcccaaagattgttaacaaaacaccaatctaacctttctttgatagtattctaagccaagcgattcttgatccaagtgtaaggttctccctcaaaagaagtttcatgtagtgagcaatgatcaagagctttacggaaggtctccatttgtttttcattacgaaggctaccactagatttattggaattggagataatttcattgaaatctccaattgcgagccaagggagagtcggtgcaacatcagccattcgtttgagcaaagtccaagaagcctctttgttgtgagcatatggagatccatagaatgcagtaaagtggagacaagggtcactgccacttttgaggtagcagtcaaagtaagtattcccaaaatggagaagattgacatctataccatcttgccacagaagaagtagacccccactcattccaacacgagg

SEQ ID NO: 48468 - DNA, 1411 bp, Cannabis sativa
tagaaatgatgatgctgacattgtgtgggtgacttctaagagtctaccttctaaggatcccctcactcgaggggttgatgcttgtatttgtaattttagaaagtgattctgatgttgttgctagtactattaaggggcttttcgttaattagatgagatattaacaattatatcactatctgtaggaatcactcttacttattttttagttgtatttttaatttctaagatttcgagcatctttaattttgttgtccatggccacacaatgttgccaaaagggcattggcaactaatgctactgctttgattgagtttcctcaataccaattgaatgtttgaaatgatatagtttttcaaaacaaaagaaaaattcttaaactttgctaagattttagtgattagataaaattaaaaactacatgtttgatgtgatttagttatggacacacattgtgtcctatagctagggctgaagcaccactcaaaaagaattatcttatttatagtactgagtgtttttaaaataattaaatacacatatattatatgttttgaacttagtaattacatgacactaaatgataaaaaatagcccccacaaatatatataatacatacactaatgtgtatagttcattaattctcgtggaggtctttttggcatgcatgcaaacaattattcttaatttatgaaaattgttactacaaatattggtgatcacaattcacatattaattaattatgctttacgtgttttattcttgttctctttcatttttgtaagtaagccaccttttgaccccccaacaacttgtccttttattattcttaactaattcttttttctccatacctggtgatgatgatgctatacatatatataatattaatttgcatatggtcattaatttattatttttctacttaacttcattaagtatatatatagagatatctttatgtttatagctatataatgttaatgatagtgttcttttttgtaattaagaaagaatattatcacttacgacctaactatatatagaagttagagagtggcttattcaccaaattattaaggtcaatttaaatctgattcacactgtctttataagtttcatggagtgtataattaggattaggttcacaaatatacttcatgattaatacataatataatatgatgattagaaatattaagggacaccaataccgacttaaggatgggatagctgaggcatgggctcaaggcctcttaagggctgtttgactttataacttaaaaatatttttaatttataaaaatagaaatagttttaaaaattaataggggttgtttggccaaattttttaaaaataaaaaacatcagtttttaaaaaactagaaaacaatttacatcaaaatgt

SEQ ID NO: 48469 - DNA, 1588 bp, Cannabis sativa
taacccatttataaatatattttgtttaaatatgtcaactagttgacatattacgtttatggcctatgtccttttaaaaaaccaaaataattttaaatggattattaacgagtcagtttcgtgttagtcctgtcaatctaaacacaacctgaacttatttaaaacaaactcaaatttgttaactctcgtgcagatttcaaatcgtgttatcttatttgaaccgttttgcctctttatggtacgatttttatttaattataatttaaaagtcaagagtggtcacatgggttgatagaaataaatcaagcttggagaccataatatatgtacacttcctaatatagtaaaaactcaaaaaagtaaaaaaaaaaattattacaaccttaatagaaagattctgattttattcagaaaaagttgttttcaaatatttgatttcattattactactcattttcaactctttctctctctctctcttctcttttgtactatacatacttttacattttctcctcttttactagctggtaaaatattttcttagaaaccaaacaaaaagaaaagaaaatattttcttagtgataagaaatggggaggttttcaaagcttaaaagagttgaagtagttgatgataatgatgatgaagattgtcatgagtttttcaaagtgttcatgccaacatttagtactaagaacatggtatgtatcttctaattattactttctctttcatttttttttctttttcaactttatatttcatacaaataaaaaacagatttcttcttcttctttttgtatatttttatatgtataaaagagttctttgttttttttttgtttttgtttacaaaaagtgggtacgaggaatttgtttctcataataatctttgtttttatgtttgaacaagtgggtacgaggtttgtttctcatatttgtttttatgatatattctataatatttattaaatcaaaatagagattattttaaaaatatacaaaaataacaaaaatacaaaaatgcgattgtgcagaagtttaaatatttttacagttttaaagattttatttacataaaatataggttgttgatgtattttttatgttgtactcttatttttttattattgattttttgttatttgtatattgttttttatgttgttttaatgtttttcttctgttatttttgtgttattttataaacaccgtaaaaatataaaaaaaattctttaaacgtaaaacagtaattttttttaccaaaaataattgtttatgtaaatttcttattaaattatgtgtgatcggatacttaattatagcaataacaacagggtcggtcctgagttgaaatgggccttaaaaataaattatacccttattataagaacaaatggtatttttaaaaattattaaaattaaagatattttattatttaggtccttaaaataggttggccctagtcactaacttagccgtcttaacctagggccgaccctaaattacgctatgtcatattaaatggtactaaacactactagtgtattttaatatttatatttcgtaacatatcatttattatt

SEQ ID NO: 48470 - DNA, 1775 bp, Cannabis sativa
taagcgtttatatattacatcagcataacttgggactcgaacccaggacctccaatacacacgcaccccctatggccacttgagctcaagtggttataaatttttttcttcacttattatattagaattcttatattaagttttcttttacagtttttataattaaaatttattttgtaccaaaaaaaattaaatttcgttttttttcctcttaacctaattaacatatattatcaatgtattttttaaatatttattatgatgattattttgaaagaacttatttttgattatgaaataaaaaaattagtggtccttattttattttatttttttgccattttttataattattatattgtaagtataaaataagtttatcaaaataattatagcctttaattatttttatgatttaatatagttttctctaattatatcttttattttcttttaaaaaagagtaattaaataacacaaaaaatagaattagagagaggaggcattcataatttttttcaattaaaccacaatattatgacaaaagggtgggttgtaagggtggagagaatgacagggttgtaagggtggagagaatgacagggtttgagcaagaccaagaccaaggtcaaggtcatgtccacgtaacgtggtatgtccacgtaaacaagaccaaggtcatgtagaatacagcgtgtcagtaggtgagcaaagtcactatgtacaacacatcaattaataagggatccaagcactcgggtaagatcaagttacgagaaaatggccaatcagtagggtctatccagaccacaccctggccggccaatgaagtctatgtgccggccagccccaagcaaaagttaagccggccagcacagataaagagcaccaaaggaagcccgattgaatagtggggtccacaacaatctttctagacaggtcaaaactcaatttcatttacaagacaactccaacaatccacgaaagtagggattcaatcccaaattatctacctatcttttaggaattattaattagttactttgtaacttaagagtagttttccctatttttaacggatatttacttaaaaattgatcttttgtaagccctaaacttatacgaacggcattaggcaaagtgagaggggacctgaattctaagtccatcaagccctagagtactctcactcattatctctctcacgctattccctagtcattagatacttagtctttttttcttctcatcatcttcacttgttcagaatctgtcatacatcagttctaatcattgtaatattcaaagagagccatagctagaaattacaaggtcaaagcatgtaatctatgtggtgttatctctcgaattaatacaataaaaaggagagtaggtcattacccttaaaacatgggagtcaaacctctataaattgttgtgttaactttattttttgcttttataatttacacgtggtgtttgtcaattatgaataaggctccactgttagatgaccaaatatgaggtcaacaagtagtttttgtattttcacaaaatatagatccatgatattttagggacactttgtttgcctatttgagcaaaattcaagacttgttaagttggctcaaagtctatactataaggcaagtccccagagaagagaatgttgactgatgcactcgcctgttttgcaagtatcaccctaaccaacaaggcgaatttgattcccatacagttcttaaaagaatcatcactatttcaaaagaaataga

SEQ ID NO: 48471 - DNA, 1298 bp, Cannabis sativa
gtgcgagcgagttggggtttgttgaaaaaatggttaaaaaccgcagcacccgcaccgcgaacacccataatttgtgtggttaactaacttttacgtacacttaattcgtgtttaacttgtattattaaaaaaatgataatatttttaacaaaacatgtttggaaaatgtgtttttattttttattattttttaaactaagaaaaaaaaaatttgaagaaaaaaaaatactttttaaaatttatttaaacaattttttttaatcacagtatattttgtacatttctttcctatcaatattttcttaatttttctctcaccattttctcccacttcacttttgtttattaatttctctctccttacttaaatacataaaaaaaaaataccaaatacatttttattttttgaaaacaaactttacataatgcacccttattttatttgtttttcaaggaaagtacttcatttaatagaaaagcactagaaaggaatgtgcaaatgcctcaaagacagaagaagaagcaaagaaaacatggttatttcatctctagagctaactttgctaaacgatgagttgatctattaattagtttctataaaaacaaaaccttaatgataaggtttttaatttatgccccaaacaagaccttccaagtcattaaaagcagtattctttcttgtcaagaatcacaagaataggaatagcattaatacaactatcagattctaaagtaatcacattcttaagaaatatcacataccatagtattttagtagaggaatatctttatatacaagagtgtgaatttgtgatgctaattaattggggcagtgtgttttatacttatatatatccactttggcaacgccttccaatcaattttcataaagaaaatattgcatatatgtagggacctaattctgagattaatgacttaattgatacattctataattcagggaccactttattaatctacggcttgccatggtatattaaaaaaattgtggcgaaggcattggcgttgcggttgaaaggtacattatctccactgatctcttcgtttcaaagtgcctttgtgccgggtcgtgctattcatgataatgttatggtggggtttgaattgttgcactctcttttcaagaaaaataatggtgtcagggggtttatggccttgaaattagatatgagtaaggcgtatgatagggtggagtggtcttttttgcgggctattatgtgcaagttcggcttcccggaacgatgggtggatcgtattatggattgtgtcactacggc

SEQ ID NO: 48472 - DNA, 3122 bp, Cannabis sativa
ttctagaactttataatcaaactactgatatatagacaaatagatttcaacacttcgtgcaaattttattgcagaaccattttgaatcatgataacttgataagggagttcttgaaacaaattctttgaaaaactcaatgcttacatatatatatatatatatatatatatttatatgaaagaatttcagcttaatagtaagaatatccagcaccagtcaaaaaaacacatgcacatgggaaaacaaaactgcaggacaattcccacaacattttctttaatagtaacttccccaaaaccatgttctagagaagggaatgcaaatgaacttgatgcgattgaaaaatttcataatggaagttcatctgcttctttaaaactccatgcccggtgaagctaaatggggtcgctacgcctaatctggctccacatgtcatttcttttgacatgttatattatatccgcaggtgctatcttcagttcattgcatcgtagtcatccaacttgtcattgtattcaagcacctttctccgtatcttagatgaatccacccatgtaatgaagtcttccatattccttgtcacaaggaatgctggatcagtgatagtgtctggaccgactcgtatatgcccctgctcaatgtatgtgacggcttccttcaagtgctcagcaaacttcaaccgtaccagaatagtcgaaagccggcgtctacagagagcaaggaaaaagaaaaggaaaagggagaacaaagcagattaagaaactaatgtaacattacaaaatatggcatcctatgcacaaacaatgttgaaaatcagataatcaatgagtcagatgtgctttatcacataaaaaaatttgagaactaaaacttcactactctctttcaaggaaatttggtgcataacagaaggattacctgcagaaagtagagactgttaagcgctcacacaaagccaagctttgcctagatggtatcacaccaatgttgtacctgttaaatgcaaatattctttatgattaactatcaacagccattaaaaagtatacataaacatacatggttatatgaacactccaaattctaagatatgatgattgttgaaacacatgcatgtcacatggataaaccctcaatatttacacattgttctctgcaaatcatatcaattattaacttttacaaaggcctgtagcactgaagagaatgatagaaaggggactcacatcttctccaagagcatatcagtcatctgaatacgaaaagggtcttttccatccatcttcatcaatatgttcaccaatttatgcaccattcgacacaaacccgaatacctgaacaaaaagcattgatatagaaaaatcatatagaccaaaaagcataatggaagaaacaaaaaaaaattaattacttcttataatcgtcacgaccagtaacatgatagcgctgcataacatgagactctctgtggcctccttcgctcttccattccaaaaaactgactttcttcagtaactttttctcgtggaaacttagctttctcatggttttacttacagttgttctttgtcgttgaaaggagcttcaatcacttcagaaactaccaattgtaaatttgaaaccttatcgaagaatcgaagaattggatgatggggctaagagcttaaacgatttggaagatgggtccagtccggtaaaagattttcagtgaagaaattgagtgaaaactgtgagaatagttcaaattggaacaagggtattttagaacgagctaaggttggtgagagagttggaaagcaaagcaatggtggattgaggaataagaaagtgaataggagaagaacaaggtttaggtctgataaattgaattgctccgaagtccgaacagagccttggaaggaggccaagattgcctatactaattttggaagggataattataggtatagtaggagcaagttgaattagggacgggtttcaggttttctggtttgggtgtctagaattaaaaataaaaaaaaaaatataaaattatttgaaaaaaatagaaattaaactaattttggtatgtttacttaaacaaatttaaatttttggaaaaaaaattagactcaaatttatttttgtaaaatttagttttgacaaaaaataaatttttaatacactttttatatttaaatggattttcaagagttgattcttagcattcctctgagtgcttcaatagttgttgatcgctggtattggtctttggaaaatacgggtttttactcagtgaagagtgcatatcagttgttgcaagctcaaaaacaatctactgctcctgcctcattagctgtgggttggagcaagttgtggaagttgggacttccaccaaaaatccatcagttcctgtggaaggcgttatttggctgcctcccgacacggacccagcctaagcagaaacatgtgcctgtcgatattaattgtgtgttttgcaatagtgctgaggaatctatctcctatgtgctggttaactgcccatttgctcggtcttgttggaatctcattgggtggcatctcataatctttgtacatccgagtttgcaagctggtgtgctggtttgttagaaactcaagccgcgattgtcgtggaaagtgctgctgctacggcttgggcagtgtggaagggacggaatgagctgttatggcagtctaaatcgcactccgctgctgctattgttcatatggcgaagtcggtgttgcaacaatggaaatacgcaagggatcgagggatcgtcggttcgatcccctttggatcccgtctacttcagcggctgctggggcgcgctgggctaaactcttactggtttcttaaagataaatgtggatggagcgttgtttgtagctgagaaggcatttggtgggggtggtcttgtccgggatagtgggggtttcttgctcgaaggctttgctttttataagagtggctctcctcaaccagccgttgcctagattatgagcattaaggaagttttaagttgggtggcaatcaagcattgggacaatgttattgtggagacaaatagtttaatttcagtctaggcactctatagaacgggtcaactaccatctccgtttg

SEQ ID NO: 48473 - DNA, 1408 bp, Cannabis sativa
ctaacacatgccagctggcaagactattggtgcaaatgggtataaaattatttttatttattaataggagcgggaaacgaagtattagcagcgaaagtttttgctaattattcaaaatgcgaaatgtgtggaaaaaatcccacttttatttatgatttattattagtggcggacttatatcggtagaactcgctggtaaattatcactattatacttattaccggcagagacactttcaccagcgaactcccgccggtaataagttgatgtatataaaacacatattttcgttttgatttcttttcttctcctccttgctcttgcctctattctccttctagatctctcttgcctcttctctctttctctctcttgatctcttccccttcgacgggcgcacagtggcattttcgaacaagcgaacagtggcttttatactagcgcacaatggcagcttcgtctactccatgtaagttttaatatttatttattatatattgatatttatatatatatatatatatttagtttgatacatagttatatatatattcatgttcaataattttttttttcttttctgttagctaaacacttagagatcaccagctcttacacttattgcataatcatatgataaggttagacatttttcgttttgatatacatatacttattataatttgttaatttttatttttagtttgctttctcaatttatttaatggaatattaattatttttattttaatatttttttattcatatttaaaagaaaacacattaaaggagataattttgtagcttgtatgaaagtaaaaaaaaataaatttttttaaatgttagcatataatatgttatagttgtatttgttttatttttttatataaaaacatttatatagattaatttgtatctatatatataaagttaaattaataataattttggactatataattcagaaaaaaaaaattgaactatccatttatatttcgtgttaaaaaatttaaattataatttgatccgtcattcatgtttcaatctgttaaatttgtgtgtccaataattaacccatcacacaatataatatatatagttattgatatatcttatatttgagagtttttcccttaattatgtttaagtatttcaggaaaaaatttgtagtttatcactgtttcgcgttaatatattttatcataattatcctaaataatttatttgagagtttcttttccttaattatgtttgagtattttagaaaaaaaaaatgtagtatatcactagctatactgcgttaatatatttttaaaaaaccaagtataatattgtaatatattttgaaaacatttagtataattacttttttttttttaatagatttagtataattacttaattaac

SEQ ID NO: 48474 - DNA, 1611 bp, Cannabis sativa
tcggcttggctacccaagccagccgagttaagcaccgcaatggctcttactttcttggttgaccttggcctgactcgaccatcatcgataaaagcctggccaagcacaaatcctttgtaggcatacagaacagagcctgactcgtatttaaaacgaccaaagtttctgttcttgatggtgaattcagcttccaatatcaagttcatcgaaagatttgatgaagagttattattattagtgaaattgctgatttgtgagcttgtgatcatggcttctctgattctgaatttgggtgttttgaatcgaataacgacaagagcatagatcaaaacgacaactattagtaaaacgacaaaggctgcggcggactgtatccgtctccgccgtttcttacggcggagcccttcttccgccgcggctgcgtgtgacacttcttgatcgcttcggatgaagttgtgtggcggagctaaggggaacttgtctgtttccatcattttgtttaatttggtgaagtgataatattattatttggaggttgtttgtaataataaaatgaaaagtggtacgttacgtctatgatgatctattaaatctacgactcatatcatatgatataaataaatatgaaacttaataataaaagtcaagctaattacgtacgtaaaaattgttgggacaaacaatatatgttttgatgagcacttctagttaaaccttttgacatttcgtgttgtctagatgatttttttttttcttaaatgagttatctctagaggaagttttacttgcgaaccaattaatcacaaattaaaatcttatatataccaaaataaaaagagaaaacttcaattgaaatatatttgagggttgttacgagtcaacgtaggttaaccaacggctcttacttcaatatttatagttttgtctaatctcttttattaactgtaaaataaaagttcatatatatttggcttaagaaaaaaagaaaagaaaaagaaaagaaaaggtgctttgccttgtatggtatatattcacacttaattctatgtcaaaattttgtgtctaatttcttctttgccggctgtggacatttacttttgtttagttagtgacgtaattaaaaactgtagctagtttttgaaactctgcgcttacattaattcgatggatgcaaagaatataaataatatatatgtatagttataattctataatttatttatttgaggggaaagtatttttcattcttttataggtgtgttctatattagtctaattagaaaatataattttaagactatatgcactagaaaggtcttcacatacatgcatatgtccatatattaagtgagtctttttttttttccagagaacaaagatgaactcgttggctttcatgcatgaatattcttttttatatatatataaatgtactcttgcttatatcatgtccctagaaaatcgagaaaaaaaattaatatttaaacaaaactgagctgacattcttcttcaaaaaaataaaaataaaaattaaatgaactggccgaatatttgatattttttttttctttagaggaaccaaaaaaagattcttacacacaaaatactgaa

SEQ ID NO: 48475 - DNA, 2661 bp, Cannabis sativa
  modified_base (2283)..(2305): a, c, t, g, unknown or other
taagctctcttcaactgtgtagtcccataccaacaaagtctcagaatcatcacacttgaccttccccaggcgatgtgggattccaccgcttactctgtatttccccttatagctcataggactactgactatcacaggtttaaaaatggcaaaatatttagagaaccttcggaagaacttggaaaagtttgattacttttttattgagcaaatctggcctcgtaacacaaacttgataacttaaacttggtatcggtggaagtgttaagcgagccaagtatatgtgaaaagaaagaagttgagatcattgacgcctcgcgtacatggatcacacccatagttaactatatacttaacatacaactttcagcagacaaaaacgaggcacaaaaactctttcgcaagaaatgatgtttaccctctgttatttcttgtaggaaacacctatagcgactagcaacatcatcttggttggttttattaaatgttctctaatttttgcatcgtttatctccaatttggactagggtttgaaaattctgggtttgtacgagatggccaattcattaggacattctatttctaagtactcaggagaataaacttttgaaccagattaattgggacatttttacaaaaaagaacaatcccaattcctagaagaaatttatcaaactataggcttataaatacgataaagctaaattttttactctatctaaaccataaaggttacccaaaaaattaaatcaaaaccactgaaacccaaaggagccacaaaaatgcaaataattaaatagtgatcataatgcatgaaagtgaaaaagagaaagaggatggaggacttaccgttcgaagttgggatgtcacacgatgaagaactctgaaactgaggatggaatgatcagtgtaatgacctctatggattcctaagattgaacagtatatccgagtagatgcgaaggaaatatatcaatgataattagggcatgcaaggttttgagaaaatcagaatgggttattttgcaaaaagcttgaaattttttgaaaaggcaaaaatggtggaaaaatggctccatttctatttttataccttgagcttaattaccgtaagattaaaggatagagatccaatggataggaataagagagaagtagaaaagatggctcattaatgttaatgatgtgttttgaaaacataaaccgccaaattcaaaagcatgcattttttcaaaatggattatgacgaatataccctcggtaatcatttaaaaaacactttctattgaaaaggactttttaagaggcaattgttatacccaaaattcagttatacttcagaaagtgacacgtgtgattctcgtgaaatatgaacccacagatataatgataattatatcattaaatgcaaaatagaataactcatttaatataaaataaatagagtatattcataactcactgactgtatagtattaagcgagaaaagaatatataaactattgattcatgtattgatgagaaaccatcttgcctcagaaggcatgatcctgagggaactacggacaatgcatagtgagacatctatctcgctacacataagaaagtatcgactaggcaaattggatgttgaagcacttagcgtataacccacgctataataactaagtgtaatagcttgatgacttgaaggacatgattgtccagtctgcaaggccttatggtcatagagcaacttatgccattaaaccaactcattcatctatgtacaaagcgagatgcctctagcgagatgcttctatcccacgtccgtacataccacttcaaagataagagtaaaaaatagttatgcgaacttttagctatacacgtgttaaaatagaacgtggtcaaagcccgtgttttggggaaacagctatgtatttcaaatttcaatgtaaataactgccaacctatattcctataagtaggggcagattatacagaaaaatgtacgaaaaaatctttgagaaaaaagtgatcagcgatcgtaaaaccttaattttgtatccagaaatatcctaataagatagactcgtggactatgcagaattaactgcaaaaccatgtaaaaaacctggtgtcattattgttattattattcttttcaaatttcttatagtttatgtgtttaatttattacgataaggccttattaattcgttaacgaaaatctgcgttaatagtctatttattttaataaatcatttatgaaaaatttacttgatttaagttggtctaaannnnnnnnnnnnnnnnnnnnnnnactttaatctatttttcaaaatttcaaaatatccgcatttaaataaaattcatttcgaaattataaaaaatgattaataaaataaaataaaatatgtttgaaaattattctaatttaagttgttcaaaagttaaaattttaacttaaatataattttctatctaattgaatatcttgaaaagtaactaatatttaagtttctagaataaaatcaacttaaatatttaattttttatttaatttaatgtattaaataagagaaacaaataattaagtgtcttgaataaaataaacttaattattagttctaatttaatatctaagaaaaatattgtaatttaagttggtctaaaatt

SEQ ID NO: 48476 - DNA, 671 bp, Cannabis sativa
tgtatcctggcattccttccagcagtaccactaatcaggtaactcctacagatcccactttgtctcttcctactgctacttttgtcactacaccatgcactaattcatcttttcctaattatgtgcataccactggtgctgagactctgccgtcaacatcccatattgttgctgcatcgggtcctgttacatcagttcagcctttaccttctataccagaaactcaacctacatttccctcacagcctgctgctgttgtccttaataccagtaatttccccaacaatgatcatcccaacaccaccatagcttcacatgatctccctgctactggtgtctctccccacacacaaactccccacccaaccagatcccatcctatgataaccagatccagaaatggcataacaaaaccgaaagcctatttagctactaaacaccctttgcccgaatctctgttgccatctgaacccaggacattacaagcagctttacaagaccccaaatggctcaattccatggaaactgaaatcttagcattgaaaaaagcaggcacctggactcttgtacctaaacaacctgggatgcacatcataagtaacaaatgggtgcacaagattaaacttaatgctgatggatctttggacaggtacaaatcgagattggttgca

SEQ ID NO: 48477 - DNA, 985 bp, Cannabis sativa
  modified_base (551)..(579): a, c, t, g, unknown or other
aggattttagctcgtggggtgaaggtttcgtatggatggggctcgtgtggtttggaacaggtgccacacacacagtaatgtatttctttggtggtgtgcgctaaccatgttctgacataggagacaaaatctaatttggtgggaccaagtgttagagggcagccacatcatccctcaaagggcttccaaaggcgcctcttggagttcccctccgggtgcattccagtgctccttcggaggtcttcgctttttggaaggctagaagtcttccaaatttggaggagcttcgtctttggagacgaggcttttcagcttcagataggctcgggcccatcttctgtctagattgggccttccttcatggaaggactgtgactcaggccattaatcatactttagagataccacgtctcacccttttctggaaacacgaataataaatagtaatattcattaatatatagaataatctatatactatatatataaataaatttaatctgatactatatatatactacaaaagttcttacttttagtcacaataaaannnnnnnnnnnnnnnnnnnnnnnnnnnnntaattataaattatcattcatatgttgtgattaaagatacgtaattaaaattattagtcacaaaaattataatttgttgtcactaaatgtgtttttaatcatatatacttggtgtgactaaaaataaattaatggcaacttataaatagtatgttttagtcacacttacaagtaactttttgttacgactaaaaattatatttagtcacaaaaaatttataccgtgactaaaattatcactaaagttaagtactgttttttgtagtgctttatatattcaattttatgattttttttaggaagattatcataaaattaaaaagcagaaaattaatatttgaatttttcttattaattcttaatattttcccttaaaaaaatcttcacatatttaatccccatgtgt

SEQ ID NO: 48478 - DNA, 1420 bp, Cannabis sativa
tctatcttcaaagatttgctatccgttactaccagagcttacatcgttatgtttttggttgaaaattaaagaaaattgatagaggggataagtgttttattggaacggtagaaggaaggttcgtacgtttatgtttcagttttaaaacatattacatatatatataataataataataataaaaaactttattattgataattatctttttatttcttagccactaaggaatctatatttctagggtattcggtcaactctaagtactccaaaataccctggtatttctaaaatcaacttatctcaataatcccatcaaaatttctaactaaaatctttgtgacatttttagcctcccatcgggtctccaaggtcgcgcgaacatgaaaatatttttattacacaaataactcatattatatccacatatttcaaataaatcttcgtaattaatagattacgcttatttatccactatggggtcttcaaggtcgccgaacctgaaaatgtttttattccacatatagctcatattacattcacacatactatataaatctccataatttataaattactcttatttactcatttatagcaaatttaaatgttatgctgaaatagattagtgggatcataatcccacttattatctgattaactcataatataaatttaaaccctaactatttatcataaggcttatcgggatattacaaaaactatttgtctctttttactctttctcttttaattatttggtctttagttcttatcatttacattctatttccaaaaatcttggtaaacacaaaatttaggggaaaatgttaatttataacgacacgttatttcaaacagaaaaataggatggggcctaatagaatgactaaatttatataaaaataaaatttcatgaagaaatattaacaacttctatattttaatgagcacaatctgatagtttcataagttcaaaaaaaatactaatttttctttttattgacacacaattgatgatggatgtatacataagcatgaacaataaaatgtgtccatcgtgtcatgtcatattagcgtatttaatgtaaaattgaaaaaaattgtagcggaagtcctaatagtactaactattaaaattgatgggacatttttaacaacgctaatactttaatattagatcattttcccctgcacccccacccccacctcctttaattttttagaagatatattagggtaaattgtagcataaatacttaatgtttcagattttataaacttaaatacattatctttattttttgtggaaaaaatacctaatgacacaattctcttacatccgttactaccacttccgtcaactcataaatatagatacgtggagggcctagatgcattatatttatttattttattt

SEQ ID NO: 48479 - DNA, 820 bp, Cannabis sativa
ttttttttttttttgaaacaatctctcatctgttttaaaaaaaaaaacaatctctcatcccttttcttctactacttaaccacattattttctttcaaccaacacttttattcatgaatgatgaccatcaaactcatcttgatgttgataggtggtaatggatgtaacctcatgtcttcatcatcatgtgttagtatttataaaatcaacatatatatatatattctttatttatatttttgttatatgattccttattcatatttttgttatttgatgatattttgataataaaactatgtggaaagaagctacagtttattgtatttatctgagataacattgatccatttatatttactgacatgagtttcttagccaatctatcaattcgatcatcatttggtcttttttttggggctataatttgaatatcaaaaacgtgactttactctatacactaatgcatattttggatttaggaatgaatttactcttaagtgatgatatgattgacatatgtgttatttttctaattgaaatttgttacatttatctattctcttctgttcaattgacatatgtgttattttattagattatttgcatgatatcccctgatcgacaacaaataaaaaagaatggtcttggagcttgatggtgatgtggttgtattttttttctccaatattcttattttctactttttttttatcctgccaagtaaattcttaaaggcattttacaattttatatacattattttaattaattacaaaatatgtgcaaaaaaacttattatcattttctcatacacttt

SEQ ID NO: 48480 - DNA, 2178 bp, Cannabis sativa
agtattgaattggaaaatgtggtactattgaaacaagaataagtggttgaaaaaaaagtggcaaaaatgtagctagagattggtccttttcatagccgcccattaattgaatttttcccaatattatattcttttttaatctatataattcagccctaagccctagtttttttttttttgaaataaaacgttcatagatataaattagacctcacggtcattacataaaatattatttgggatagacaaatcactcaacctaccaaaccggttgttcgtgaaagcccatttggccacaatatgtgccataaagatacaacttctgcttacgaaataaaaattacaactatcaaagagccgagaaagtcttaaacaaaatttagtgtagttctcaattttccaacggaagtccaaatcgttgatcgaattgataaccactctagaatcgctctctataataataaatctctagccttcctctttagccacttccaacaccatacagcaagcagccgcctcgctacaaagcgcattagagaagtctaatctagccgattgaatcccacacatcactcccagatggtttcttgccacaacagctaaacacatactatccaatccaactttaacatcacaatttagttttatcaacccaagagggggaggattccaacaaacttctacacgcggggaaggagttggtaagagagaagctctatagtctgcataagaatagtaaatatagtcaacacactgagacatattgggcagacttctattgtgtaccttgtcgttccgcgtcgtccaaatggtgtcaaccataatcgaagcataaagaaaaacttcatctgtattaatgcccatttttcctagcccccagatgaattttacccagtcccacaaacgactgccagtcagaaataggaaaaatcccccacgaggatgctctccacaaatgagtggcccaattacaagtaagaaataagtgttccaacgtttcctcacagcccccacataatgggcatgacacatcctcaatgtggattcttttagaaagaatagcacgaacagggagagccttagtgagaatgctccaccgtaccacatcatcttatggcattccaaaatgttactattccacagtttattccaaaaagaaggagcaacatcaaaatgtggcatcctttcaaaagcttggataagataagcagatttacacgagaactggccattactctccttcgtccaaatccacctatccgtacccttacacgagggtttgccccttttaggatagccgtaactgtttccttctcaaacatatgatttaatttctgaacatcccaatccccatcattggaaaggaggtcacaaactctactatgcaccgtcgtactaactcctttcgccctagggaagaaatcccgtccatgggatatccacgggtccgcccaaattctcgtattctttccatccccgatcaatttacacgtcctttttctcaaaattgccttggccttaaccacatttttccgaaaccacgaatcaaaatcattgtatttgcaggagaggaaatcttttccttttaggtactttgcttccaagattttgctgcagagaggctgaccccagttaacaggttccacccccactttgccagaaatgccatgttcatttccttagttttttgaaactcgaaccctccatgggatttgggaaggcacaatttgtcccaagcctttagatgcataccgtgattacctttctcagaaccccacccggaatctcaaaccatgccatcaatcttatgcatgagacgattcgagagtttagtataaaaggaacatgatgctctcatctcatccactttgtcaacttgatgccttcaaccaaatcaaacgtagttttctctgtcagacaatagtagatgagagagttccttctatagtgatttcacctttgagctggctgtatctgctgtgtattttgattttgtgtttaaatggttgtcgtatatatttctttagcaaaaccttttataacagggatctccggaacacactttttatgccgttataatgtccgttatttgtaatctattttagtcaagtttttaatattatcacggttttaaataattaattattctactagtattaaactagtttataaaatcac

SEQ ID NO: 48481 - DNA, 880 bp, Cannabis sativa
tttttttttttttttcaataatgagtttaattttattataatataatattttacttttgcttgaattagagatggcaaaataataggtaggagttttaccaaagggagcgtgcataataataatatagtatccttaaagttttaaatatataattatgaaaacatctactttttcagaagaagaataagaataagatgaaaaagaaaatgttagctatagctatagctgtactggatcgaataatttttttttggtcaaaagaaaagtgaacattattattttgtgggaaaaagttgagagagatagaagaaagagagtactgggaatttattatatcataattaaagtcgaatatgtataatatatatttatatatttagagagagaaatgatgtaaagtgataatattgatataattaagtatcggaactcgtataatttaaaaaaataatttttaaagaatatcgctaactaatcatgaagcactacttataaaaaaatgttaagcaccattatagttttctataatagagaatagatgttctttactttttcctaaacttttttgatagtattttaataaaaaatatactataattttttttattattttatacaattaatttatacttaacaaattcaaattataaaatattattaaattaataatcaaataaaataagcaatataattagagcaataactataaaatgactctctattttaactaaaataatttagagatcaccgttagaaatactcttatggaattaatttgaaagataaaaggaaaagaatagggatttttacactacatactgaaatttttaatttttttattttttcactgtagggcagaatttttttaaaaaatattgt

SEQ ID NO: 48482 - DNA, 2168 bp, Cannabis sativa
gagtgtaattattaatttttttttagtaccctagctataacattttctttataattatagttatatagatttctaatcgtttctaagttataacctgttcgatttggaaatatttatacattgtatctgcaaaataaaattatgtagttgtgttagtcaattaacgtatatatatgaaagaacagatcaaatttgagcagaatcaacttcagaaatttttatacagctatcttagaaaaggacgataatataatcgtagtcgcatctatcaggtattatttaataatatatatattagagttaaggtctcatatattttatgtataataataataaagaaaaaaatagagctaatttgttgagtattctttgaaaaattggacagaatacatggaaagaaaatggcggaaataccctttgtaacaactgctaaggactacaggggcagaggaatgatgcggaagctaatggttgcaattgaatctgtaagctctaacttataatcttatgtacaattcttttccatacaaaaatttgaattttttttctctttatgagagaagtatagaatagtattatcactgttgaaatatgtacttttatatatgaagagtattatacatcaagagaataagtcaccaatctgatgtggctttaatagagatgagaaacatttgtgtttgtgcaaatttattgataatattaattgtgtgatgaatctatgatattttgttttgcagactctgtgtgatttggaagtggaaaatgtagtgataccatcttcttcaggagtggaaaagatgtggatcaacaatttctattattcaaaaaagattgacaagtccttggagaaacatattgtactctctaacatgctcatgtttccctatgctatcagactacacaaaccccttttgccaaatacttcacatcttcaaggtccctctttctctctctgtatttatatatatatatatatatataaatgtatatatatgaagctaatcatatatcttgttggttgttgtgaacagagagtagtaattccaaaagagctgctttgctggacttgaactatgaacctcctcaagaggatgaggaatgatatcaatgacaaggagaagcttaatcttataataagactttttcatttattacttcataaaataaataagtattaccaatccatattgagtttgattggaactcaagacttttgtcctctcatatcacattttgggattaaataattgtgtcaaaattgaaactttgctttgacttggtacttttaagacagataccaaaatctttgaatgagaggtttcttattgtgtttttattattgtttttctgttgagtatgtgactttgagttcgatggtttctaattcaactagatcattgctagttaggattttggaagagcttatatgaaagtaggagagttgagtaagtagtggactggagtatgtaaatccacttatgaaattttatttctattatgattagtagttctccttaataatgctattgaagtttgagactagtttatgttggaatatgtaattgtcgttggatttcaacatattttgaaggaggaattgcttgtttgattgggggtagtgaaatacaatggaaaagaaatgaataaattctcataatgattattttgttagattatactttaaaatattaaaatgtaatttcaatgaaacgattttacactaatcgtgtgaaagaactactgttacatctataagtaaaaaaaaaagaccattctagtataataatataaacaaaaaaaatatttatagatattaaatttcatttcattttgttcttattcccacttttcttttcattcattcttttcttactagtaaaatgggtaaactaacattttttttcttcataattacacatttaagaagtattcccaagacatcgatatcttgttaaatttagtcgactctcaatcttaccatgtttttctagttttatttaatatctattaattattaatgatatagcaatagtttctacattataattatagcaaatattcaggaaagggtccggcttcttccctttatttttctctgtagcagttattccttacgattgttaactatgtttgtgtccggcttcgtccggtagaatatcggtggg

SEQ ID NO: 48483 - DNA, 1133 bp, Cannabis sativa
aaaaaaaaaaaaaaacttgactttttgttctaataaaacgtgtgttacccaaactcatttatttcgtgttattttcgagttgtgtggtcttgtcgtaacccatattgcaagccctgaacctaataatttgtataatacttaattaaccggttctgtaacatagtgaataagaaataacacaaaataacttaaattagttataattaaaatagaaccggttccgataacttttccggcaaaacttattattgtttataaatatgggatttccatctttttttacaaaaatatggcataaaaaaacctatataaatataaaaaaaataaaaaaaaaaactcataactccttagctttatttaatatttatgcaataaaaaaataaaatcttaaattttttccattttatagtgtaatttctactttattatatagcttcaaactacttggaattggcccattaaattcacgtacatttgttcataaaataaaatattaattttcaaagcaaataaatcttataattaataagagaattttattttacacctcacaaatttacacaatccaaaattagaaaaagaaaaacttaaattaatttctaaaatatttcttaatattgtttaatttaaattttctcattttacattatttttgtgttaattataataattattttaattttgctttcgtattttatatttataaataaatcattctttttctaatgaaatttcataaaatttttcattttaatttttcttcttcatatttaaaatatatattgttttttattcaaaaaaaatatatattgttttattttatatatgtatgttgtatatgtgaatgtgagaaggaagaaaatacattaaaaaaaataattagtatataaattaaaagtacaaattttatataaattagggtgtctttaattcctctaattaataattgcaaataatttacaagttacaaaatttttaggtctgatcatcttcacaaggaggcaattatggcatgctttgtttaatttaaattttttcgttttacattattataataataagttaaaatttctatttttttttttaaaaaacaaattgttaagattttaaaaagagtcaaataattattaatg

SEQ ID NO: 48484 - DNA, 2499 bp, Cannabis sativa
gttagaatacaacaaaaatactctcgccacccaaatattaaaaataaaaaaatattaaaccattttaatattatatgtttattaaaccattaccttattgaaaaatcattctctatataatgataataacaaaaccctttcgagactcttcttttgctctctctccatgcaaagtataaacatggattcttcttcttctccagtgcgttcacacctttcccccatgatttttcacagagtgaaaccgatgccaagccccagatctgctgatcaaggtggctccaactcctcctccaacgaatcccagagtagctcgactcattcgagccactccagccgcaccagacggactcgactcaaccactccagtcgaatcaacattaactccggcctcctccccaaatcgtcgatccgtacagatattaataagccccttacaggtattcaatttcccttccaatctcccctattcactgtcaaatcggtgtagagaaaagagttttttattgaacaatatagatacaaatttggtatcccaattaaattacagtatgactttcgtactttgaaagggtttttgggtaatgggtatcatttcaaatatgttttcagaaggggtttaattccttttgtcaaaatgggtttaaatgtctcattaatttcaatctgtatgtgtaatctgcctagtactacatacgaatcctttgtgcagcatctctgttctgaattaaatgctatagaagtgatagttaccaaatcggtttgccttagctctcagaggaattttctatttaaaggcaggctgagacgatacccctacatagcaatttctaggtcttactctcttcttagttgtcctttacattaccatctctcatacactaccaaccatacacagcctatagttatccctcgccctacaagtattgttggttttccctggatagtcaccctgtgcacacaccaagtctcgttgctgcctagtaattttagttcttattttccattgcatctcattctgtcttgcttcctgttgtggtactttttagtctttctaattactattattcatctcttgggtcattgttgcatctttagtccactattgcactcactcggtcaaactctttccacctttgcactgcagccgattcattgttgcatctgtagttcactgttgcactcactcagtcaaacacattccatctacgcactgcacccggctcattgttgttcaattcatacacaccctgcagttaaagttcaatcgcatcttggtcaacttttgcttttggttcatctgtggtgtagtattatccaatcttattttatttttctcttcccaaaccatttagctcttactttgtcattagcttatcgttatacacagtcggcccattcaatggatgacttaacaaactccctttctattgctcttaacctcatagaaactgagtgcactattcaaacgctccatgatccttcccccacaaatgctttcgataccgagattcagcccgtcccactctacttggttgttaaagttcatacggttaaatcttttaaccgtaagaactttatagagaaaatgaccaaaaattggaatcacatttctcggagtcccgtgactattactgaccgttctaacggtctcttcctggttgagtttggttgtgatggagataggcgtcgggttttgctgcaacaaccttggacctatctcaaccaagctatcctaatggacatcccaaagtccttggatgttctcaatggtgatagcctactcaaaatccctctttgggttcaagtgtttaacactccgttccttaaacgctcggaagaactagctgtccttgtttcttcctccctcggtcatctcttaaagatttatcgaccatcttttcacgagacttgggggccctatttttgacttacggtcatgtttgaagttgctcagcctcttcctcgaggcataccggtccatttctcgggtataaataaagttgtctggcttgaattgaagaacgagaatcttccaaatatttgctttttctgcagctgaatgggacatagttacaacaaagggtgcatggattacatgaaagcatgtgacgaagccccgttccctccggaactaaggtatgacatcaaaaccatcatgggtaaagttaaagttaccactaatgctttgttgtgccctgaacagctcaactttgccaaccctccggtggcttcctttatgaccactaatccggctagtgcgatgtgtgttgctccccccgacaacatgccaccatttcccacatatggctcccaaggtcattgctctcctcacggccaaacccaacaagtgggtttatacaagtctggcccatcaacctacacacaagaacacccccaaatgacccaagccgaggcccacaccaccacaatcaccccccatcaaccccacaatcccccacccgagaccatcacatcatcctataccgcccttctcaa

SEQ ID NO: 48485 - DNA, 3025 bp, Cannabis sativa
  modified_base (48)..(77): a, c, t, g, unknown or other
tatgtgtttacttataatcgtttaagaagttcatatttaggatgttannnnnnnnnnnnnnnnnnnnnnnnnnnnnnctggtaaaataattccaacagggtgttcaagcccgagatgcctacaatagaattgtatttcaatgtgttcggctgtgttatggacaataaataattttcctgcttatgctctaatgtctggttggagcacaaaagagtacatggcgtgttccacttgcaatgaacacactccttccattgccctaaatagtaagatcgaatacaatggccacaaatattttctcaaaatgaatgatccaaggaggaaaaataaataatacgatgagaagcctgagaagagagcaccacctcctttattgacgagggatggtattttatcataattggagcgaattcaattttattttgctagaaaacacaaaaaatttgggagtgtcaaacggaagcattccgcttaagagctaaattggaaaaaaaaaagagtataatttttgaacttcagtaatggaagagtttgcccttatgacataatctcgatgtaatgcacattaacaaaaatgtgtgtgacagcttactaggtgctcttctaagtatcaatggaagtcaaaggattccgagaaagtaagaatgggtttgcaagaattacaaatacgatatgagttatggttgtatgatgaccgaaatgggaagtagaaaaagtctctagctagttacacacttagtgttcaagaacggattgaatttgcagaatttataaagactgtacaatttcttgatggttttgctacaaacttagataaaaatgtaaacttggataccacaaagatttttcagacccaaatcccatgactgtcatgtgttgttacaacgtttaatacctgccggtatgcgtaagtacttgaaaaaagatatatgggacacaatcattgggttatgtgtgtaattaaaaaaattatgtttaagaacacttttgatgtggaaaacaccgaaacaaatgttctaactaatccgtgcaagtttgaaactattttcccaccagttttctttgacataatggttcatgtagttatgcatcaccctaaagaaaccatactaggtggactggtgcactacatgtggatgtatcccatcgagtggtcaatgtctgtgtacaagaaatatgtcaggaatcgttcctgcctggaaggctctattgctaaatcttttgtggttaatgaggcattaatattttgttcaatgtacttttgggaagcggaaactcgattcaaccatcctaaatggaacaataacatcattccaaacatgacaactcgataattttttatattcaagcatgccagacgaccattgggtaagagaacagttgacaccttaccaatgataagcaagcgtaaggcagagtggtacatgttgaatattgcacagaggttgagctgtatatcaattaagtctaatttccattaaaagtaagcaagaatatttaacttcacctaaaaaatccttaacttaccaagtgtattttgatttggtgagcacaaagagttgcttcatccgagtggtgtaggcaatattgaaaatgtgcaagagattgagtttcctgaatggttcaaaactcgagtaagcattgttacgtctaaatattcataatcttggtcaccctaacacttaaactttccttaataattgtcatttttttttaattgtagattaatgaacaacgattgaacaaccctgctgtagtgtcagatgagttgtatgctattatgaatccaacaaatccaataatttatttttatcgtgagtgcatagtaaacaatattaattttttagttaagaaaagagatgacaaccgcaaaatataaaataacagtgttatggtgcccggtgaagatgaacataatttttatggcacacttgaaaaaattatgtagtttgcttatttaaaggactacaatattttttaatttatttgtaagttgtttcacactaatgggagtagaatagatagtgatggtgttttcactagcgatgattgcttagaattagaaagtgatagtgatgataatattatatatgtaactgatgatgaggatgataaattgtaattgtaacgatgttataataacaataattatcacatattttcttattttatttttttgaataagaaatccactttattaaccaataacttcagccaccaaacaagatatataacaaatcagttggaacatcttccaaactaaaacgacgatcaggaaatattatagcagcctttgcaaagttatgggccactacattagcagatcgtctatcaaaagagacagaaacattaccaatagtatcaagcaaagatttataatcttgtataactaattcaaacaaagaaatcattttaaagaactccgaattcacacatagacaattggactccaaacaaacattctgccgttgcctttctttaatccaactgagagcttcctcgatgcatacgacttcagcaagagaaggatcaaccatgttatgggaaaaggaagttctgcccttaataagcatcccattagaatctcgggccacaaggccaatgccatagctacgaccaccctcaaacaaagttgcatccacattaatcttgatactattatcatttggtggtgtccaatgctctctcccatcaccaatctaatattcagaccatgatgtatccatgttggatttttttgcattcttccattgatcaagatacgatttagcaaacgtaacaatgttacctgggttaaattctttgtcctgccacacgagattaatacgggctccccatatagcccaacaaacagcaggacaagacattttcgctctaaaccaactgcttgaaaagtattgatgcaccagtgaagaaatgatgcaccagatgtaggatttgtgcctattcctacacggttccaacaagcttgaacaactctataagtgaccatacaatggagggttgtttctgttgggttttatgc

SEQ ID NO: 48486 - DNA, 1157 bp, Cannabis sativa
atgttttaattctcaagacataactttattatataaaattttaataattgaataaacattatatttagtatgattttatcaaatatttatatttatttttttataaaaacttttaatactaacttaaatattattttcaacacaaatattattttaaactaatctgtcatgttaattaacattgaatacctacgaatgaattttgataattaaataaatgcgatataatttactaaaaaaaacaactaaataaattcaaataatgacaaattttatgaatttaatactatatatctttgtaaatatatgattttttcttaaaaaaaaaaaaaccaaataaagataactaagtaatcttagcaacatcgtaactatttaccttatatgttttcctcatatttttaattttccataaaataattttttaaaaaaaaaaattatatttttacaaacttataccaaaaaaccatacaaataaaaaatctctttttaatataacttgaatacttttaccacacatatatatcaacaaataattatagatgaggtgattagagtcgaattagaagctgcggttggatcacctccttttcaaagagagctaatacttgttgggtattttggactgtaaatctaaattggagagtataactcctacctaattttgtgtacttggttggttttttcttactcaggtttaaatctttcaccagcttggtaaaaaaaaaaccatatataagaaaataaataagctttctcttttgacaggtaaaacaaataaatatacttgagtcatttaattaattaacttcttcatcaaagacaactattgatcattttagactctgcactttcactattttatttattgacaggtgttatttttaaagcaatatttatttatatttaataagtactcataatgttatagttttatttatatatatgtattatgtaaaataaaaataattatatatttatatatttttgaagtacgaataaaatttcaccaaaaaaaaatattcatctcttaaaatgtacaaatattaaattagaaaaacaaaagaataatttaattaaaatggcaaatatataataaaattataatactatgggtacttattaggtgtaaataagtattatttcaaaaataaata

SEQ ID NO: 48487 - DNA, 1002 bp, Cannabis sativa
aaaaaattgattcatatgaactttgtccatttccacaatacttaaatttatgataataatgaaaagattatcttaagatgtagtcattaaataattaacattacataaaccttaccaaaaaaaagtcttttactacatttttttagttttacaaaataggtaacatgctagtcttttaattctcttttcttagtcccacatcgattagatgagttattttgagtgttcaacatgatataaaccaagcatgttttaatttagctaaatatctataatattttgataataatacataatttcttataatgatgactactattgctagtttttttttgttaaagtttattgtaatgagtgtaaggatgatagttggaactttacaaggaatcatgaggattttactttaagatatacccactttataaatgataagacttaagtaaagagtagggatatattggaatataataaaagaattttttattaatggatataatatgagggtgacttgtggaactgattttttctcgaaacccaattgggtgtcaattcaagggataacaaagtagttatttttttggactgaaaatagaaattgggatcttcagaaattagtttttcaccaagaaataattgttgctatcttaaaaggggtaaactctcgggccaaggtcgtgtcgtgactattgggtctggactaaggagtccaatggtcgattttccaataagtcgacgtatttagtccaagctcttcaaagagtccctccatgtgatctcctttttttttggaataggctatggaatagtagaattcttgaacgtcataagatgctttggtggagtatcctttctaatgctttcctcgttcgttcagtgttgagcaagagaatgtgtatcaatgacactcaatgccatgtctgcagtggtgatgaagaattaatggaacatctctttctacactgcaatttagcatatcatctatggcaatcattgtaacgtccc

SEQ ID NO: 48488 - DNA, 2184 bp, Cannabis sativa
atgtcactcatccatgcttctcaatatttcactcaacatgcatgcaataagaagtcactcggccatgtattagagaagtcactcggtcatgcttctcaacatgtctctcggtcatgcttctcaatatgtcacttggcatgcatgcaatagagaagtcaatcagccatgtattagagaagtcactaggccatgtttctcaatatgtcactccacatgcacatggaaatgtcactcgatcatgtacatagtaatgtcactcggccatgaccattcaagaggccactcgaccaagaatggcttgaggtcactcagccatcaccattcaagaggtcactcggccaagataatcttagagccactcggcctagcaaagaaacatggccagtcagccaaaccctagaatgaaggccactcagctagacacttggtgaagtatcactcgacatgcacattgtgaaagtcactcggtatgcagttagtgaaatgtcactcgccatgcatggagaaatatcactcgaccacgcatggtgaaatgtcacaactcgcgacatgagttacttgacatgctcttctcaacaacataactatacttagtgaaaatttcctaagtattgtagaagaaggcaataggggtatgatcacaaggacaatgcgtgcatgcaatgtgagtacaaccacatctcctgcaagttcagatggaaagaaggtacaagtggtggaggcaccacacctgcaaggtctgacatctcgactaaggatgcacaatagccactacccctacaactcgagatgacctgacaccagacaaaggtacaaggtgcaagaccaccatctacaacttatagcttgcaaactatagatgtcaccatgtcacttgggacgaccaatgtagcctaggccattagagcctataaatacccctttcttagatgtgagaaggggttgaaaaatcattgcaacactcaactccaagaaatccaagcatttctcttcctccattgttgctctgaacatttctttaagtttttgaattttcatatttttgtcttcattctaagtcttgtctttgagtttcaattttctagccttaaattagttgatgagttttcactattaacagtttggcaccatctgtgggaacgaaaagctcatgtcacgtcgtgtccttacttaccactattgcaagacgtctagatgctctgactattttcagggcatcaagattcatcaagataacactcattttatcacatctagaagagagccaccaacacccatggttgaataagttggccaaaatagccaagtaccttagacaagaggaaagggtaactatcatgaagagaatctgcaaaacacgcaccaagatggagtaattgcaaccatcacacctatcggtgtgaatagtttgcaaaggcaaaaagcatcaccagtaaggacccctccaccaccgacatagcgagatcctagtaccccgtgacattgccccagaagagagaagcaagcgcactttgtgagcttaaaatcccaaggtcaccactatgaagatgaaataaacgatctctactagaagaaccaaagcctagaaactacggcggttagcatgaaaaaattgttaagcgacatactcaaaggcgaaacccaagcttcacataatctgcacaaaaaatcacaaacaagagcacgggatcccaaccgcatgtgttggtggagggaactttgtgtcatcaataaataacaccttaaaggatgagagcggaaatggcccatcatgagacaaggaccctataggtcatttaaggaattgtgagtctaacccccatagtaagaccgcaatgatggaaacattccattatcctatgaagggacttcacccaaaaagtctcatgctagggggcaccgcgcctatggtcccccttttgagagcaaagaaaacaaaaggcgtcatccctcaattatggtgggaggccacaggatgggacgagaggaaaactactcacaagccccatgcaaaatgtaaggaaaactaaagttccactcacaaacccttaagaaaggattaacaaaataatgaaggaactagaagtagagatgcaagatctatgtcaaaagatggctaccacatcaagtggaaatttgggggatgatgggttcgatgaagaatcccctttctcaagggaaatt

SEQ ID NO: 48489 - DNA, 1376 bp, Cannabis sativa
ttcgataattgcaatataaatttaggttataatttaaattactttttgtattttcgtataaatgactacaatatttagtaaatgactgtgtgttgcttaggaaaaaagtctaaaacaaaagacaagttaatgactgcaatattttttataatttatatatatacactaattaaacctaattaggctttagtttaataaaatcacaattattatataacaaagagacgaatgacatgaaagcacgcgcacttattcattatttctcataaaaatacaaactgcattgctatttttttaattcttttttatttatagaatgagaattattaaaagacattttaaagtgtctaatattacaacaaaaagtattttattattatgaatgaaatttaatattaagtttcatatatgttaattgaacaattgataatttgatataagaagtcgctaactaattgttaagtgataatattagtgtatggtacttttgagcaccttataatgcttaatagagaaatgctaaaagattgatatcacaagtgtcgatgtgtcataatattataattgatctaatatatttgactttaataattattgtagaataaaatatttgcgacataaatacttaaaaatttgagtttgtaattgcatagacccaatgaatttttttggccgtccaattttgttagtacgtacaaaatttattaacctcttaaacatgaaacatattaagtctgaattttaaattatgaatttggacgactttatcaacatcatcactttcatattgtcgaagtgtagaaggcaatgcaagtattgctagcaaagataaatacatgtgagaaatggaatacatactcaaatgccaaaaaatatgtcaattacatacttagaactttggaaaacttattctacaaatatctatcatttagagtccgtttgacgcgcatgattattgaactaatcagttgtttgatgaactctccttttggattagttgttattgactgtagacacttgtttgattgttaatttgagcgaagtcactttgttttttatttatcgttcaactaaagtcatagtgttggtgaagctattcttgtttttttctagatcaaattttcagtaagaagtgtgttcttgctgagtttatgtctattttgttagaagatttatcttcttaataaagttatattttcatttaaaaatgagaaaacataataaaaaaacaaaaataatgaaaaaaaaagtatgcctagtaatatttaacttaattattttattaatttgataaaaatattacttcattgaaattttgatctaaatatttatagtaatttaaagaaatatatacagtatagtactatattatattt

SEQ ID NO: 48490 - DNA, 2380 bp, Cannabis sativa
aatcgaaggtttccataattatcgtggtcccactcggactctggcttggtgatcacaggcatcatgtcattcaatgtctcgtcgccacttgacctttgagggaggaatactggcattcgattgatggtaacccaaacaagttgttgattgcttcaactgagaatgacatcggtacttcacgcacaatcacttcagtaggccattcttgggacaaaaaattggcgtagaattctttgacaacttccattaccgcctgtccttgctgcttgacaaaaagtccccaattcctcttatgaaccatttcactaacccattcaggtaactcgtcaatgtcctctatatctaccactaatcctcgctccatataaaattcctgattgtccaccttaccataatactttgtctcggctgccttgcaatgaaatttaggaatttccatgaagtaatttctattttttttctgttggcaaccctcttgatattcgacattttctcttcttttgcacttgcacactaaacaaccacagcaaattccccctcttcttttctttttaactgctgcctctcaacacaataataattcttacaatacactacaatgtccacactccaatcttgctcaaaaatcaccactctttctgaaccacaccaactaaaatttaaagcattcacaccaaattctttcaccctcgccagccataacaaaatttccctacttcttttcaattttaaactactcaaacaacaacaacaatgattctaaatttacaccagaaaaagctcacaaccacaccaaaatttgcaatcatacaaactattctcaagtaccactgaaatccaaatttcatcacccgcacaaatcaacaccacacactacttggcatctattgtacattcccactatgtattcttctcaaatcaactccatacactaacaattccacaatcaaatcacactaaagatctctctgtttctttaaacgcaatgtgcaaattcacaaatttagcaagttcaattggattaaacaactacatacggttcattgcaaccacaaggactaaccttgctcttaaatttgtgtttgtgaatggaatggtgaaatggagattcttgctggcttcctcggtttctagcaaaaactgacagtagtggagcttcagcaagtgatatgcggtggctgaatttggttcgtggtttgctcggattgtgcagggaagaatcgaatgtgggttttgggttcgagcttggatgagtggttgaacggatttggtgtgattgttgtttctcgtgttggtgatgggctgagctgaatgtggcgcgggttgaagatggtaaggacgaactggtggttctggtgtgggttagtagttgggttgctgtgtgagtgaacggagatggtgttgctggttcgggttggtgagtgacttcaggtggaggtcgactgggcagtggctcagagatggtgaaccgtgagtgatggagggtgttgaattctcgctggtatgatctgggcgaagtggtgatgcggttttaggtgggttcaaattttctgggtgcaatttggtgaatgagggttgctggtgaaatcgtgggtggctgaagctgatgcgggcgaagtgaggctggtgagatcgattttaggtgggagttgtgttgatctggtgaaggtcgaatggagggtgagttggtggttcgatggtggtgcgggttagcagctgggttgctgtttgagtctacggggatggagttggtgatggtgaatccggggtgtggtggaatggaggtttggtttgatttagagtggcacacggctgagaattgtgaggagatatacaacagtgatggtggtagggttggaattagctaatgggctaatcattgatcaattgggctgagtcaacaacatgatggggccatattgactacaaattgaagccccataaacaactaactcaacttgtatttattgtctttgtttatatcaagttggcatttttaggtaaaagatagtcaactcaagtacatcagcccaaatgattggactgaacataaaatttgtacccaatgattgcttcattcaactaattttccatcacatgttctgttccaaatttttttctcagaccaatactccttttcctaaaccctcatatcagaacacttttgctgccaaataaaattgctgagcccttgctatagcaactagatagcattcttcaaccccaaacttaattcttttgcccaatttaaaattccttcacttccccagccttcttcacttgattttctgcacaaagaaaagaaacactttctcaatttcaccatgacatttatataaactaattctataatatatatatatttttcttgttttttttt

SEQ ID NO: 48491 - DNA, 932 bp, Cannabis sativa
tgaatttttcagtactatattgtctgtcctaccaagattacttcatttattaggtcttgtactcatagactagactcaataaatgataagagagtcatctaaactaaaacaaataggaactagttttatgtattgcctttaactgaaatattgtcgttgccacaacttttgtcgataaaaaattgtcgcaaagattttctttttcttttctgtgttggtgaaaaagaaaaatcaaagttagaattggttatgaaaaaaaaacacataatttttagtttcagattataggaaaaaaaaaaaggaaaggattaatacttagaagtacattcctatatgatagaaaaggatcctatgatcatggactgatttaccgacgatcgcaaatctcaagtttgtctataaaaagcaaatctaattatattagtgtctataattgattttttttttctgtgtaatactaattcataaagcctcattaataagtgttacatgatcttgtacattaatggaactcatggttatggtcctgaatttattaatatgaaacttttttttttttttcaaagtgaaatcccctagtatatgaaagagtgaaaaagtgctttcgttgttgtggaataagaagccttcgtatcttaataaatgtctttaattttttcggagctattagagcgggatccactttgggggaatatgagtcgaagcaataataaaaatatttctagtggaacatcttccataatctctgaagagggagtttactaaaacgagagataagtaattcaactcatacatccagatgattaatgtttggaatccatatatattatgtaaggtgatattacttttgctaattcgaattgaatggtgacatatatcttaactgtatttaccgatcagcttaacttgctttgctctcgaacctttatttt

SEQ ID NO: 48492 - DNA, 1704 bp, Cannabis sativa
ctctttattttggattggactattggagtcacttttgcaatttcagcaaacataattttcttttatttccttttacacaacatatttgtaattaaattctattttaaactataatgtgaaatgcctttacaattatttaacccatcatctactattttcactttttaaaaaatatatttgatttttttaagcaatataaattcctagattttaaaaaggggaaaatacataatacattactttataaataattattacaatatatacaacttatttatactttttacataatttactatacaatttataagtaatgcattatgtaatttttttcttttattataaatgagtcttgtgtttggtgattaagtctctctataaatttaaactggattgtgatgttagagttaggataagaaatatgtatattgcagtggtagcaaggaaccatcttggtgaggtggtttgggttcaaacgaaattcttggattaactgattctctgtctggagaagtgactgcttgctgtttggcgttggaagtagctaaaaaaaaaggccacaagtttattattgtggaaagcaactctaaaatggttatcaatactcttaccggaaagaattcatattggatgcttttgaatcgttttgtaatagaaccttttctttttttgagagtgactttttatctaatattaatagaacttgtaatttcgtaactcataatgtggtacagtgggcgttcacacaccaacaatatagttgcttatgtattttctatttctacaaatttattttgtaataaccgagaagtctaatcttttctatttatgcatgcttattttcaaaaaaataaaaaaaaataaaaaaattctccctacaaatttatttatttaattttttaaggtttttttttttactttgaaaccttatcaagttttgtgtcttttactagaatatatctgttttctttaaaaaaaacaaagtgttaaaatataattgtggaatacaaagagtttttgaaacaaaaaattgcaaagtttgaactcacattatacacaaaacaatcctacaaatagttagatagagcataatttgcaacaacttactagcaaaaatataccatatcaaagttcaacaatctttggctttttttcaatctttttctttcttggtttggctttggaagatttagatcttttatgctttgtagaagaagaaattgtcatcacaagatcctcattctcactgtcatcttcttcaccatgatcagttttgccaatctcattctcctcatgttcatcttcatcatcactactactaataatactatcatcagattctgattcagccaaaggaatcttaggttggcacccagcaattgcagattcagcagcagccacagcatcaggagttttaagatcagtaatacccaacattaagtcctgtaaattgagtagtttaagtcaagaaaaccaaaccaaatcttaaaaaggatgcatcagttttacttatttcggcatctagaaaaaaaaattagtctatttttttcatattcatgtacgttatagttatataagatgtcttataaaattttgaaaaattcaaaataattcacaatataaaaaacaatgttcaaatagtctatttcacacgagtgagtgcgacacaatttttgaatcctgttttcagcgtgttaaattttt

SEQ ID NO: 48493 - DNA, 1402 bp, Cannabis sativa
acttttatttaagaatacacttgtaaccagtagtaaattatattataacttagaaattataactaaaaacaaccaacaatattaataagagtaaactgcggtaaaactcccaaaaatttaactttgctagcaattaacccctaaatctcacattttggcaataaaaccacctgaattggtattctgttaactattagtcatttttgtctattttttgttgttaactgtcatgttagactacatacgtatacacaatgtacatgtggcataatattattgatccacgtaaatatatattatttctagttttctttcttgatcttcttcttcattcttagtaccattgccaccacactcaaaccaccattaatcaccaacgcacaatcaccactacccactaccatcacaaccaaatcactgcaaccaccaccacaatcattgcatttatgaaatccaaaatcaacttaaaaatacaaaataatagtgaaatccaaaatcaagctgtaatccataaaaaaaatctctattatacccgatttacatatctagaaaaaatatccatatgatttttatcataaatatcttaccaagacaaaaaaaaataccaaaatgaagaaattaatatacgaaaaaaaaagagaattggtaaactgatactatcggtggtagacccaacaccgtggattagtttttagggtttacaacgtgagatgaacagatttgtctccttttgctaatggtgtatgtgctcagacgagagagaaagagaagagtgagggtggggtttacgcgaatagggacctccgacggtcggagaagggaggaagagaacgattgtcaatgctcttctccttctggtgctggtgcgttcacaagtgagagaaagaatatagtgagtggtggggtgggggtttttgggaggagggacctccgtcatggtcctggttcgagaagacggggaccgataattggaggaagagcaaacgactgggagagagggtgatggtatgtgagtaggttgtagagagagagaaagggtgttggtttgtgcttcttaagaaattagggttttctaaaaaaaaaaggagaaagaaaaaattatttttttttaaaaaaattaaaatgatttatgttaaattttaaattagtttattttttaaaattttatttaaaaatatatatatacgtggaccaataatattatgccacgtgtacactgtgttcacgtgaatagtccaacatgggtagttaacaactaaaaatgtccagaaatggctaattgctaacaaaatatcaattaagggattttatcatcagaaaatgagatttggcagttaattactagcaagattaaacttttgagggtcttaccgcaaacaattgtggttataggtatagccta

SEQ ID NO: 48494 - DNA, 1242 bp, Cannabis sativa
aaaatacggaatttcaatatatacatgcttatatatatataatagtttataatgttttatacttatgatcatgagtgtaaaaggcgcatatagtcgtacacattacaattgtcacccactacatttcttcaataatgtagttcttctataagttcttgactcatcatataaaaaaagatttcttggtcttttataaggccattaatgggacactaaaatacatatagtgtagtttcacacacacactatatatatatatatttttaatgaaagtttcatactatatttactccaataaaatactaaacctattcggtcatttgactcaaccaattccccttccaatgcggttctctttctcagcaatagcagcgtcggtttcttctcaacaatgactgcatggactagatcacgatagctgatctcatcaatgatttcctctctttgatcgcctctgaacctgtcgatctccactaccccttctctctatttctctctactctgtttatcctctcatgaatctctacagtattgaatcaatgtttgagtaagtagtgagtgaactggtgtttctccactcatgaatttccactgtatttgaatcaatacttgagtaagtagtgagtgataagcataatctcatttggattaaattttggcaaattctttatactaaataacctttgtattgagattatttatttaattttttttggatctgagatatcacataattttttttttcttaaaaaaaaatgtttaatttgggtctgtgatatttagagactgtttgagatatttttagtttggttctttaatattttctacgatgttctgagattgttttacgggtcataagtttttgttctcgtgtgttttggtgctcagatttgattatataataatcaaagtgatattttaactagttgctgaacaattttgtttgaatattccttacatgaaaattttggaatatcgttatcttccatctcatctcaatatcatatacaaacatataaatatatatacatattactggtagctgattgtaaaaggctttaccttaccacccagttttttatatacaaatatatatacatattatatgtataatacattacaaactttggaatatcgttatctcccatctcaattccaatatcatggatcatgtccaagaccaaagtaaaactatatgctcactggtgaagtatgtgcatatatatttattggtaccctatt

SEQ ID NO: 48495 - DNA, 1691 bp, Cannabis sativa
tatttaatatatcctaagcctacctatcaatcaatacctaccggccggccgcccgaaattcaccttgtcctcaaggtgaagaacatcaagtcttcaactgcgatgcttggacgtcctctgtcaaagaaccaagccaacaaatgcatggtgttccggccaagagagagacgcccctccacagcgagtcgtcctcgatcaaaaaaccagctgagcaagttaatagttcttccctttgtatgcaaaacaagttgaaaaactgccactcccacgccattgaatggagcttccaaatcaagttgagaagaaaatagaaagaccaaccctgaagttgccaaaatctgagtggttccaaaatttattgtccttcccttgtcaaaaacccaagagacacacccccaaaatcgataactgtgtttcacatgaaacatttcaggacctttttctttttttcttgtggtgctcttgcccaaaaccagtagaacgaaataggtataagacaaaaaattcccataaatggaaattaaaaacttatccctttgtatatcacttggtacctgtatggtgttgtgcacgctgactatggacccattaacaagccttttccagccaactaaatctttgaatcgtaaatgcgtagccagcaaatagaacccaaaggctctgttctcatatcccaatccattatggataaatcttaatacttgagaagcatcacttacaagctctaggaaaacaacttgaggaaatacatatattatctcaaatggcttgttttctttagtaaggccaatctttgtagtcaaagcacaaagaacaccataagtggaaagcaaaaactcgttctgacgcttttgcctaatactgctcataatcaaacaattccatatatcctcacccacattaccaatccaatttgaaaacatgaaagcagcaaaagagttggccataagccttttgaaataccttatgacccaaatggtgttgtttaaacttggcgatgaaggatacttctcaaaagtaacttttctccctctgtcaaaaatccaacgagcagttggtgtatttctgttttcgatgaacaccaaatctgaatgcgagaaccttcctccaaccacccccaccttcttttccgttgccggcacttcggtgtagtgagccaatagtacctcattcttgtaattccccaagggtggagtcgtactactcccaggatcccaaaccatatacaattgacctaattgaattattgggccttgagtaatgtttaatgggctgtcatttatacccaaaccccaaacaacacaatgacctaaagcacacaatgggccatattcaagggctgagttgggccttaggtaggctttcaaaaattcaagcccacatgtctccaccatgtacgcagctccaccacgacctggaatggtggtatcgcacggaagtggcttctctgggttttccttcaacgttctccaaccgtagttctctggcgagatgcatgtcttcttcgacattggcgatcgcatatcacggtgtaagatcggtaacgtactcaaccccaaatcgagatcagaaatcgtcattgtttcgtgttgaacggcgttgatggctagctggtcgcccctaccacgatcaaagagcttgtgcgcctccatcgacaataacggaggatttctttctgaccacgtcgcctt

SEQ ID NO: 48496 - DNA, 1745 bp, Cannabis sativa
aaaaaaagataaacttcatcaagaaaattcgttattagagaagaactcaaaaattgtggacaagcatctgtccaaatccaatctcataaactagtaacagaggtttctagtgtgtgggcaacagtattcgttgatcgtagaatgatgctgcaagaaccaccaccaacagcagctaataaagaatagatttctaataaaccgaaaactaaaattaatgcggagcttattaatccaactaattaccacagtaaaatcaccattaataatgaagatactgaacccacattgatgcgcaagagtcaaacccaaacgaatggcaagtagctccgccacattagcagagaaatcacctaacacgcatgatgaccacgccaaccaaattacaccctttgcaccccatatcactctcccaatccgacaaagcccctcctcggaaccaccgaagcatctgtcgcaagagcaaaggattcaggaggaggtggcatccatcgagtagctcgatctacaactggatttgcagggtccaatcccaaatgaagacctcgtcgaccatactccttaaactctgccagatggttattgactaattctagaataacatccaatcttgactgcttgttgccaaataatactgagttcctatcataccacaaccaccaaaggattgtcatcattaattcaaaaacctcacagggtagcctatcaaagagaaatgagagaatttcctacattggtccataaacacatcaaaggagcaccgtacacacccctaaccgatgccacactggaatcaaactagaacaagaaaatagtgcatgctcaggagtttcagattcttctccgcaccgagaacagcaaaaaggtacccaaactttttgagagataagttgcgttactactggtaaagccaaatggaacatacgccaaacaaatactttcacatttggtggcatattaagatgccatacttcattccaccaacgagttaacctggatgaatatgtaactatctcctcaacctggagcgaccacgctaatgattagccactcttgacattataaaccccatctctatcatagtgctagcaccaaccatcttccgcctcacacctcgctaatggaatagataaaattatgtccacatccattggcaaaaaaacctattgaagcttccccacatcccaagtaccagatgggagaataaattcactcacctgacagtcatcattaatcctcctcgtgattggctgaaaagacctcagacgcaggagacatggatccttgaaaaccctaatttgtgttccatccctaatggacctctgatgaccacatttaagcaattccattccctagatcaaagtcgaccaaagatgagaagaaccaactttttttgtggccttaaggataaagcaatttgggaaatatttatgtttcaaaattcaagcaggcaatgaatctggatatagaaataactgccatacttgcttagccaaaagagcttgattaaagagttgaaaatcccaaaatccaagcccacccattgccttaggcttatataccatttcccatttcacccaaggagctttcctttggtcaccaaatgaaccccaccaaaattgtcttacaatggactttaatttttcacaagtttttgctgagagcttaaagacactcatcatataagttggaatagcttgaagaacagatttgatcagtacttctctcccaccaactgaaaagaaatt

SEQ ID NO: 48497 - DNA, 1365 bp, Cannabis sativa
ataccaaacatgctcttaaattttcattcctaagattgttattgacacgacatgttgtgcccattttatcgtgccaaattaaagtagtatttttttttaatatgtattaaaatatatgaatacaccacatttttaagtataaatattattataggtgtgcccaacttatgacaatatgatatattgaaattgttatgattatattttgaataataaaatatgaccacgacatgtgtacaaaataggaataggctcacatattaaagggattcatataccattaatatgtctcgagaaattactactaacggttttatatttaagtcttaccttataaaataattaaagatgagtcaaaagtattaattatttaatagaaaactagtgaaatcaaaatagcacatattgcaaccatctcggagataactgagtacgtaacatgcccattacaaaaaaaaaaaaaaatacagaatatatgagggctagataagtcaccacatataacacgagatgaacttaagaagcccacatgaagaaattgcgagcatcacaatgaaggaaggcttcccagtataataactatctattaaataaaaccaaatgacggttaccatgcatttatgtgcatttttccacatgctgtgattatttgaaataggaagattgtccatatttcataagcagttattaagataagtccaaaagaaataaccgccatatgagaaattctataaatagaaagaagaccactgagtaaaggatggcaaatgatcaagggaagaccctgagaaaaatcatctttgaatcttattattttcctaaaaatccataccttgtattctgtaagaaaagcactcaaaaataatatggtttcgtggactatgtagatttaactacaaaattacgtaaaatattatgtgttatttatgatattatttattaatactttgaagctttattaaagttatttctttatttcatacaaaaaggtctcattattgttaacgaaattgtgagttaacaatttaatgctttcattgagagccttttttttttaaactatgactctaaaaaggtgcatctccctagaaaagaaaacttgaaagtttttctataatggaagataatcaacaagatgacaatgtgagacaagaagaggtagtgcgctatccaggaaaagaacaacaaggaactcaaacccaagacagatcaagttaaagatggagtcctactgaatgggatttcaatagagataataacgagaaatagattctagaaaggacaagttctgatgcctatgactcaacaacaagatatatcccaattgtggagttggaaaattttcaacttcgctaagtcaaacca

SEQ ID NO: 48498 - DNA, 670 bp, Cannabis sativa
ttttgtaaatgtgaggtattttgtcggttggtatatgactatttggatcccactactaataaagctggtgtacttatttcactaaatgtaatattctttattttaaaagttttagcttcgtacagatgatggtaatggtgatcaagtgatgtgatgtccgaaatggagaactttgaagttatgaagcagatgggaagaaaggaaaaaaagaacatactttttagtttttgggcgtatataatatttttttatcaatgtttttaattatcaaatttttgagataatttatttacaaacatgagatgcccaatcgatattaaatttctaacaagatctctatattgaatttggcttcattttcaataaacaggtggcgattccaatctcttaggatgcaaccttggcgctttcaaattttttgcatagtgtgtaactcaaaatattaggaatgccaatgaaacatttgacataattttacattgcataaccgaacaatctaaatccctctaataaattttattcataattaatatgagtgtgaggcattcatactttatctttttgcaggtggagcatccggttactgaatggaatattgaagttaatatatgcccaggttgttatgttgggttttatgccctaactaatgattagttatcaatataagaaa

SEQ ID NO: 48499 - DNA, 545 bp, Cannabis sativa
aagttttagattagattacttattcagatcattatcatattaatgtcatatatatatatattatatttaaaattaatataataaaagaggactaatttggttataaaatgcaatgttaattataattaagttacctacgttagatttaataatattataaagatatattgctttaactaattaaactcatgtgaccatgacttgataaagacacacatcgagaatgattcttattagactaaaatatatatatataaaataaacataattgtaagcaattgtaataatatttcttataataagtaaaacaaaaccacaaaaagcacctatacgtacacttgggattatagtttataatatagtttactaaacttgaaaaataataataataataataatactagctaataataataataatttatagtataaatacataaatttaatgtttagctgctaataaatatttacttttaattttttacggtaataatacctaagttataattctaaaacttcgtcaagtagctgactgttaagtgtca

SEQ ID NO: 48500 - DNA, 1039 bp, Cannabis sativa
  modified_base (36)..(56): a, c, t, g, unknown or other
aaaaaaaattatcatgaatttctcataaaccaagannnnnnnnnnnnnnnnnnnnnttatatagaatagatatatattatgtatgagattgggaacatataactgaatgccatcttcttaggggacataattcagatcctagaaaaatgttgtattttacagacacaaaagattgttctaatttttaaatttatttttagaataatgccatatgttaacaaaaatgagaaaaacataactattttgtcttaagaataagaaacatgcaaatcatagcgaatcctttggattgcctctgcagcatatttaatatttttcaaagtaatcttattttccgtactaatagtatattataaattttaataatatgatgagtctgaaaatgatttgagtttttcttttacatgatattcttcagttgtattatttctctttaagcatttattttgttatttatagtttttatatttaatatactatatggccctctcttagctagaaaagtactattgggcccagagaaaatagcagtccatttaaattgggccaaggacttaagttaggtcagattgcagagattgataacttttatgttaataggcttgatgattatcaagcacaccaacctattttcatagaggaaaccctttataaataatagcttccaaattcattatatttgatatataatttttttttcgtaaggatatacaataactaattatttgtatataaaggtatatcaattttctatagaaaaaaaatcagttgacaaaactaaccaagtcaataaaaataaataaataaataagttggtaggcaaatctaaataattatgagaaagttatagattttttattttacaaattttcttgtaatttgctataaattttaaagtagatgaatacaaaaggggcgataaaacttccccaaaagttctagtagcctcagtggcggaaccagacgacgaaataaggaggggccaaataaaatgtattttcacctaatttttttaatatgtagtattttataaatcaat

SEQ ID NO: 48501 - DNA, 1226 bp, Cannabis sativa
  modified_base (83)..(85): a, c, t, g, unknown or other
atatgcatctttctcttcttaattatatagacaaatatgcccacacacactcttttcagcctacatatatatatatatatatnnntatatttatatatatatatctaaagagagagaggatgtaactattatttattaattaaaaggttacaaaacataaggtaagagggaaagagaaaagctgtatacattagttgtagagtacatacataattgatgctaggctaggcagagaagaaagtaaacacaaaattgttatcagtactaacaccaagagaatgatgaggatgaggtttcttcatcataatattcttcttgctgttcttcctgttcctgttctgcatcatcatcaccatgatattctcctccacctcatgactattattataattattatgatcatcatcatctgccttctttgagcttgtactcttcattccattccctttgcctgatgataaagctgcttttctctccactcttctcctcattacatactcttcaggaatgaatacatccatatttaactaatcttgaagattttgttctccaatataggaaatgaaatttattatgtcccccaactttgttgagatatggaaaatatatatagcatattttgctcctctttaattattaactctaataaagtaccccttagctgggagtgaagagagagagagagagaatatgagtaacataggaaattaaagttgatgtgataccatgggcgttttgggatgagtatagcccatgtttttttttttcttttttttttttaattcaaagcaaaacagtgtatattaattcgccaaattaacgaaatttccaaagtgcagtggatgtagtagtagtgtacacacttgggttttgaaaatgaattaaaaaataaataataaattaaataaaaagtgtgagtaatagtaaggacataacaacattacaaatgtaattgtacgcagagagcatgtgtaaagttagacaactttgtgtttagacgagtgtctgcagttttacactacaacggtttcttttctcttctctttctcttcactcaactctctcaacccaacaaccctcccttcgttcctttaaacagataaatatttttctttatattatttttagaagaaattatactcttaccatttttatattgtcttcttttatttttaccctttttttaaagtctattatttttacctctttttttaaacattgtacca

SEQ ID NO: 48502 - DNA, 952 bp, Cannabis sativa
aaaaaaaataagagtaaatatgacaattcataatttaaaaagaatgggagtggcaatcctatcagtttggtgaaattaccacacctatttttcaatccgaaattgctacaggacccatatattttattctcattgcttaaaaaaattagaaaaataaacaagttaatcaaatccattttgttcccattccctaatcccataaagtagaatatcaactaatggaaaattagattcaacaaaggtttttagtatagctaagaattggactgaaatataatcctttaggatatttggaggaattcctaacactactatagttgtatatttaggttcggcttgttcgacatttttgacacgacatgaaaccgacacaaacccaagagactcgaatagatacgaaaaaatatggcttgagcttaacacaaaatgaaaacatataagttggactactggagcacacaacacaaaaaaatatgtgttctgttgtttttatttaggccccacttaatgcgtattatttcaaatttcgcatctagaatcctaacactcatcctaaaccttaaggccaacctaccatgtccctaaactctagcctaccctaaacactaacctaatatcttaactctaaacacttatacctaacaccctaagttccaaacctcaagcttaaagtgaacctcatcacaaaaattaaaactgtaagatatggttacaagttacctaccaaagttagttaacactaacttgaaatgtggttgttagctataagttagcttgggtcggggttagttatttctgttagaggcttggatctttgcttagctataaataccattctataacttgtattatgtaacataattcattgtaatccaattcggatatatatatatagagagagagagtaagttagagagtgttcatacgaggaaagttttcgcgtaactcactt

SEQ ID NO: 48503 - DNA, 3705 bp, Cannabis sativa
tatgcttactttaggcaaatcaaacttagagttagattagtagtggtggtccaagctaaaataataataaaaaaaaaactcaaaattataagtggtatatcatttaaaatttgcctattagtaaaaatttatctatttaattttcctaaaaaaacatgttgcattatcgatagggcttaatatattttgaaattaaaaagggaaaatacttatttattgtttttctaattagttaataatatagaagaagtggcattgaaaggaactaataataaaaataataatattattattatgatgatgataaattaaatttaaaagtcaaattaaattgactgatgagctagctcttataccttttggtaattggtcacacttgatataagggacaacgattgttgaacctgccatgcaattgccctattaactggataatattatccttattcttttctaattatatattactattaattcaatttaacataatatatatttatagaaaatttaaaccaaaaaaattagtctattattagtagaaaatgatatgcacatttaatctcaatcgagtggaagacttgtatatatactcgagattaaaatctacgtcgttggattctgacttttcatcaaatcaacatctaagacttcatcaaatatataataattaaatatcatatattataattaattactttttttttatatccataaaattattatttcattacgtaaatcacaagctaatcggtgctgcaacttttttttttttttttggatttcagcttaagttaattttcaaatttcaactataatttgtgaaaatacacgtgaattaatggctctcgtgaatttgattaagatatgtatatgttattaattccttttgttatatatttaggtgaacaactaattcatatttttcttttctgatatatttgtattcttacctattattattattctctcttcatgccacgtgttctctcgtgccacgtgattttataaagttctttttggtatgcatatatatataaaaattttagcatgaattttcaactgaaacctaatcatctaattaataaactcattttttataaattttgacacgggtgtctctgacctttgaatatttctttattttttatttttcacaaattttgttgattcctttaattaagagagaggagattgaaaattcaaagtcttaggagatcatgagttcgatcattttaaacaatttgtattcgaacatgtaatatataaaacttcataattaaaatatatatatttatatattataggaatattttataatataccttttaaatgggtatatttgatcgatacactcttatttattttagtatctaaaaaaatattagtacaatattttttttataatcgtatacgttgaaattatttatgatatttggtaaaattttaaaaaaatttaaaaaatttagcatgacgaaaatagaaaatagacgatttgaatattaatttaccataatgttttaaataactataaaattataaaagaatcttataaataccgaaataattaaaaattgcaacaatatacttattttagtggccttatattgtaaacgttagcaccctatcatattatatataacttttaaagttaccctaaaaaagttataatcatgtatttttgaattggtctaattttttttaagagacttggctgtattagtataatgtatatatattctctcctctaattattaaagcaaaacttgtggactgaattgccgaaaacctaaaatcattaacttcaactaaatataaataggagaaaatatatatatatatatatattatattatatataatatatatatatatttatagtttcataagagaataaaaaaaagggggagggacacatataatatatagtcccacaaactaaacctcatctttttataaataatatttttaaaattatcaataacgctatatatatatttacactatatatcagttgatccacagcttaagtaccaataacaaataaaaatgtaatatatataaataaataatttttattttattttatttgaacatctatttatatataaatgttatagatgaatttgaattttttttaattcaaaattaataatattaatgtatatatgtaatatgtatgatgattatttgtgtatatatatatataaccataggtaggtatgtactaggattttttcacgagtacaaataaaagtatagttcactataatatatagtaatatataatttagttcaatctaattagttagtagttttaaaaggttagctataattaattaatatatattcaatagtgtaggtacacacgtacttcattaatagaaaaaaaaatcgtattaatcgacaaaatcttacaacaagctaagtatatataataaataaaatattgttttaattgtaaagtaatatagggtaaataatattatttttattgtaaaataatattatagggtaataaatactattttagattctgtattttgcaaaagttttaaattgaactcaatagaccttgtattttccaaaatggtacaaatatgatcctacactgattttttgtcaaaataaaatttaataataatctgatccaaaggtgttatgactaaactgtttacattttctgtatttgttcgtgttaggacttgtcttcaagttggttatattaaataaaaaagttgtcaaaaattaagctcagggtcctatttttataattttgaaaaatacaagatccattttgtcatttaacaaaaaaaaagggtccaatcggtaatttttgcaaaacacaatgtctaaaatagtatttaccctatattatatacattatgttattgctacgtatatttagttatatttttaatttttattctttatgtgtatttttaaaattttataaattgaaagaaactaattattaattttttaattttctttaataaataatatttaaaattttaaaaataaaaaaataaataaatgtaaagtttaagaatatattaaacataatctgaatacaaaaaaataacaataagaaaataataatattacaaataatatattaatatatttaaaataaataatattaatatttataaaattaataattctattattaccgttaaatttaattaaatatttttatatttttaaaatattctgttacgctaacaaaaaaaaaatcgttagataactatattttatatataaaaatataatttgatttgtacgtacctaattaaaattatgtatgtagatagtactctctcatgtactaagtttgaaagttcagagttgttcttgcattaattaaattgattgatcatagagttgtgactgtcatcatccatatatgcccaattaattataatatataaaagacttctccacttacataaattgatagatattctttcaaaaaagaaaaaacataaattgatagatataagtaaattagatccgtacttaaagtcttctaaagaatcaaaataaaaagtgaaaggttttattacgtaaaattaaatctacgataaacaataaatattcataataattaaattaagggtaaataccattttggatcctgtgttttgcaaaagttacagattggactctgtattttgttaaatgacaaaataaaccctgtatttt

SEQ ID NO: 48504 - DNA, 1017 bp, Cannabis sativa
tttttgttatttatatattattttgatgtttttttgttgttatttttatatatttttcttataattttgtgttatttttatataaaactgtaaaagtgtaaaaaaattgaacatacatatataaaattcttttaaaaaaatagtattttatgtatttagtctttataaatttgcatgggcttgggtttgagtttgttgaatatttattaatgttatatcaaagggtttttaaatattttggaggttgtgctttaattttaaaactggactttaacaaaacaaaatgcaaagtataaataatatcattcaaatattttcatgttaagattacttagtttacaaaattaagtacagtgtactaaagaaaaattaatttcattgattaagaaagttaactaaataattatgaaaattgaaatctatgtgataatgactaatggatatataaatcaaattatctagagcatccaaaatgatactactctctaacttttatttttttgttaaagaaaaaagaattggaatgtatgtgatagtatttgttaatgtttcttttctttcctcccataaataataattctaatttttaattttttgatgaaaaattctaaggtttgacacataaattcgagaaaaatatggtctaatgtatttaattgaattaattcttcttatgaaatatggaaggtttaaagaaaatgatggggtttttaaaataaaacataaataaataaataacaaatttaccaaaagaaaataaatattaaaataatgagaattgcaaaacctaatggagtaatgatagcaatatttctgatagaaagacatgtgtgctgtgtgcatgtgcataaatgaatttttattgaataccttttattaaaaaattagaattatcttagaagagtgtctataaagggctatttacaaaattatgggaaaataaagataagttttgatatatatagcataaaaatttaattacactaaatatgacattttttaaaaaaacttacaaat

SEQ ID NO: 48505 - DNA, 970 bp, Cannabis sativa
  modified_base (916)..(944): a, c, t, g, unknown or other
aaaaatacttctgtttctttattgatgttgaataaaatggattacattgaattggagttttatttagggcataaaacccaacacttagttcataatctttcttagccttttttgaagtttcactttgtcccaaacctttcttcctctcttgttcagggactgacttacattttgctctggaacatcctcttttgattaatattgtccaggagcgatgctgcatttggcatgtgtctctccatatccagagaaatgggttttcatgggtgcttgtacaaatacggatggttcgtagattgttgcggtatactgtgttccaagaacaagaactggtgggatgaacccagaagcagaagcgattggagttggtgctgaaggaacttcgaatgcttgctggtaagcatcttctaagctgataaagtcttgtaccttagccatgaactcggacaacgttttagccttccttctttgcatttctctccacagcaaggagccaattgcaagtcccgattgtaaggccacaagtttcatatcatctgtcactttatgccgcctatatcatacataagataaaattctttaggctttctcctgcccgttgcttgatgttgatgatggagcccatctctatgtcataatcacaagcggcaataaattatttcctcaaggcagactgtaattccttctaggaattaatcgatccaggagcaacctcttccaatagtcttcagcagatttggtaagggtcagggagaagcataaacacttggcatcctcactgactcttgccactaggatcatcttattgtactcggctaaatgagttttaagatcagtttcccatggaacatcttaatttggggcatcttgaaatttttcaggagcagagcttttgtgtgttgggttttatgccctnnnnnnnnnnnnnnnnnnnnnnnnnnnnnttacttattaataaagatcagaaaga

SEQ ID NO: 48506 - DNA, 4121 bp, Cannabis sativa
  modified_base (3329)..(3329): a, c, t, g, unknown or other
ataaaatttgggatcctgtatctatatttttcaactgtacataatcaaaagatgttgcacagcggctacaaaatcgtgagtcgtagttgttatgaagatccaacactcctgttcgaactgtcttgatatgtacaatcttcatcaaactaaaatctcactgtcgttcaacaacagatttgcctttaattacctgcacataacatagcatctgtgagtcgacagactcagtaaaaaaaaacataaaatataaatatataaccgacctacgactaagtgcccatacacctatcaacaggtcataaaccatgtcaaacatgtataattgagtctcaaacgttcttgaccatagtacaattgaccataataccacatgcactcagtactctagtactgttggtagcatcaatccatactataagtacaactagtcataatactacatgcactcagtactctagcatactagtgttggtagcacttgttcatgctttcgaaagtataaccaaccataataccacatgcacttagtaatcaggcgtactattgttggtagcattggttcatactttctgaattgcgaaacacatacattcgcgataccaagatgcaatcatatatacaccaactattgttctaacagatatgtcatacatctggcaaacataaagtatttttgttttagacaaattttataaaaattgcatgctttgggtttttggcagttcagaacttcgaggcacatcattagcattcaatgctctgtcttttccaaattgtagtgtttccatccgttagatcggacttattttgatctaacagtggtttttaatagggtataaaagacaagaacatcagtctatttcgccatttttgcatttctgagttttaaatttcttctgcaaaccatgaattttttccttttcaacttgcatgccctcattgtcattgacttacttcctgtatttcattagatttcatcttcaacctcagagattctcagaactcactgattcaatcatcacaatctcaatcgcgaagttcttctttgtctagaaatcttcatcaaagtagtgagtggttcatttccttcttctctatgcatttcttctcgatatttgtagtctggtttttgttattgattgtcttctttatctgctttgtttggttatttttaggtaatttttgttttgttagtttggataattttagggttaaggaaaatttctaggttttagattcatagatttctaggttaagttgaatttatctttccagaaattgggattacactcgtccacaagtatgacccaatttatttttgaaactacaaccccggaattcttagaaactatattccctaaaaatttagcccttctatttgaatacaagacttatgtacctaaatccatacttgagataaacgatgtcaaaattagagatcatctaataaaaaccaatcaagatgaaatttcaagtcgctataggcagtttttgtaagaaataatcgagggtaaacgtaattttctgtgagatgcagcttggcctgaaccccaaacttacctttgtttttacctcgagtcactattgcgttttcaccaagtgacttaaattttgaaaatatgaccacttaatctcgaaaataaggacccctcaagatcccacagttacttttgaggcaaaactcattgaatccaaaataagatccataggagcttatgttgttaatatattaaagtctcgtggcatcaaatacgagaaaggattttatgttaggtatgtcgctctaggggagtttagctattttccccctgagagagtgattcgagaagagtgtggtagcactagtactagtggctcgtcttgaataggcgcttggagcctcgaacacattagagctagagcagtactccctctgagagagtattacaaggatttcgataattatctcgaaatttcctcttttcagctaagtccaagttcttacgaaattttggcttatttaaaggttttataccaaattatggggagggagtgcccgaatcccccttgaaattttatatttctaccctgtgaaggttgttcctgcaaggaagagagggtcagacagtttttattatcttgggacccacacaaatgaccgaaggatcatcgtaagattaccaaataaaactgaattcaaagatgacttcttttggacaactggtctctcccccgtcaacacaacaacatttttccttatacgagagtattatcttttctcaaaagcttggttttgagtttttgatttatatattgaagacatttatttatttcgcttattctgttgacagcgatcacgaagaggccaattctaattcctgagatggtagaacgacacaaagctctcttaggtcttctgtttggactgcgatcaacagattttctactgaatgagatcaatcttaagacctgtaatcctctcggtagtaaacaatccacctaggactataagaatccatagtattctaagtagcagcaagtcccagtttcagctagcaaggaagatagagactatgtgtctcgcatccacttcctgaataaagtatcccctcggaagctgaagaataagcatctcgaggtaataactgtgtatggtctccaactgtgcttatggctgagtgtacctcgctagttaaatttaaggatagccagtataacttttatacttgggataatttttgtatagatctcataacacatagatttgatagttggtaccctaagtttcatgtccaactaagttgtgatagttcctacttcggaattgccgagcagtatggtactaatttggattgggcgagccatctggattcagattgggatatgtctccaatacatccctatgatatatatatgatcacaggctctagggagtttagtacatattgtagctcatcctcatcctcatctaataattatggtaattttttttttaagtaggagtttattccccacttttttcatagtttattctgaataagtgttgacccattccttttctcgcagatatggaccttgacctggaggatatgcttaatagtcccactctcactaccaagaagtccaagaagcgagcaatttcaacaaatgaagcctcgggatccaccaaggagactttaaaaagcaccaaaactacctgaccaaaccttgcgttattaagtaattacaaagtttcattctttaaaattacttaaggggcatttatgtatgactaaccagaattcatctggaaatacattgtataatgcaaactcgccatttcaaattttttttgaaattcaaaggttctngactaaacctctttgacgaaagtggagtcgaaccattataactacctaaccaaacctttttgacgagaaaggggtcaaatcgttataacaccttgatcaaacctttttgacgaagaagggatcaaacaactataatttttgatttataacctatccgacgggattagaagatcaaaagttataactcgcgtacaaaattgaatactaatggttctcgcgagctaggaaagtactaaacaaggcatcacaacaccttgataaagtacttaaacctagaaaacggatagataatataactattcatgcgagtaaattaaaaatataaaaacagataaaatccttaaagtatatttaagtttgctaaggtagattataactacaactgcgaggcaggatggaaaactgcttgaaaatcataaagtttggtagattattaactacttaaacaagaagtatatgagcaatggaaaaaccaaaaagtgttgtacattcgatcaaaatataattgtttacattgtgaataataacacaagcaaatacaattgtattaagtttgaataaaaacagtacaaggaatttaagataagaaaaacctaagactggttacaaacttgtctttacaaaaatgccacaacgggcaaaccattaagtcattctcctaagcttatgatgagaggggaaaccgatgaacttgagaaataccgtcttcatatagcttggaaaagaccgtttacacgtagctcgaaaaaagaccaactacacatagcttgagaaagaccagctacacgtaga

SEQ ID NO: 48507 - DNA, 1965 bp, Cannabis sativa
attaattgctcacgaaacagtagtaaaaggtgtgattaaaaaaatgtaagaggcatgtttggctaataacgaaataaccgtgataaaagatttgttttaaggtccagccaaacgtgtgtcccttattccaattataaaagaatggtaaaaggtcaaaaatattcattttgtagtagcgtaaattcagcacaatttatttatgctcctgttctatattgtggagtaataaattttcattctattaatagaaattgttacaatcacattttaattacagtttttataaaaataaattagtatacgcaaaaacacgatacttcacagacaaattttaagttttgtttctaacgcacctcttcctcatcaaataaataagaaaaaaaaatgctgactatttgggtttagcaaaaaataatttattgagccctttgaattttgtttcttgcttattgacccctcaccatgtattgctgcctccgtcccctgtatgtatatgcactttctaatagaccttctttctaattattcagaggtttttaactccaatggcttatgctgccactattgcagataaaatcatcaatgacttgtttccgttgttctgttttaatgaatttttcatttcaatgtaaaatcattttagatctattctctaaaatattcaatatatataaggaaaatcccttacaaaatatataatgtctataggaaagtaattttaattataatctaccggcatcagaccaacaaaaccaagatggtacaccaaatacataaatggacatcaagcactaatatcagagccgttgcatgtatgcgacgtggcatactagcattggtgagaaacccaagctaattagtgatatgactagctttcgttatttctctgaatatacctgcacacacatatattttttaccttattattattatatctggtacttattaaacagagactaagcacaagacttaaaattgaacttattttaaaacgtaacataaaagtcctagtgttctaggagcaaggatccaaacccatcaaattacaaacacatttctctctctctctctctctctctctctctctgcatgtagatcttattatcataaatatccattactcgtcaactttctcaacagaggctgcttcattaacaactttgtccacctcacttgctccaacagccttctcctctgccttaacagactcctctttgtgggcttccggctctgccaccacgggatcctctgctgcagcttcggtagtactctccttagtctccttctctgcttctgcctcctttggtgtttcttcttcagctgtagtcttaacctcctctgcagggatagcagtcttctcttcctcagtcacaaccttgggggcctcctcttcaaccttagcaggggtttcatctgtagcagtttctgcctcctttggcttctcttcagctacatcttgatgatcagccggtgctggctccccagctgattccgtctcctttggctcctctgcctctgtggcggggtggggcagaggtgtttcagttgtcactggggcctcttctgtgacttctgttgtaatagcaggagctgaagtctcttcttgatctacctcaactgattcctcatgaatcttctgctctgggagagctgtctttgctgatgcaatctaccatagccaaattaaaaaaaaatattaatttaatttagttattcagaaaactttcgtatgctcaatacctatatgtatatataattttatgggtacagaagtaggtactctacttgtcacagttcgaatctttggtagctctacatgcaactcatgcgtaataactaatatagacaacaatgtaaagtagttacctaaatattatgtacaatgtaaaataactttaattttataattattctcatgactttatatagctagtgattacttatacagatgtgtttgtcagccaa

SEQ ID NO: 48508 - DNA, 1059 bp, Cannabis sativa
  modified_base (1001)..(1016): a, c, t, g, unknown or other
ttttattaattgtcagttatacccgatggtttacaatcgttagttataatccactattgtaaatcacgataaactcataaaaccatcgcggatttcccttttgagtgttctaaaccatcgcgaatacccatttttttacgatttaaaatagtcacttaatattgttagcgacggtccccgaaaaaaattatttttgggaccgtcgtgaattatgacttttgtattagtgaattgatactatgcgtttaattttagtgaaataattttttaatatgacaaaatcaaaattgtcgatcaattcgggattcgcttgatcacttaggaaatttcctttcatcttggaataagcaagggtttgggtcgctatctaagcaaattgtagaaactcaaaaggagatagataaattcttgagtgctaatgcgcaagatgttcgagtggatgaggtgaaagttatagaacttgaattggatgacctaattaataaagatgaactttattggaagcagagatcaagatcaaagtggaagatggtaggtgataaaaacacaaaatattttcataacaaagcatcggtgagaaagaagaaaaatattattacggagattatgatggaaactggccaaaagtaaatatgtgtttaggaggagattattagtgaagtggagtggtattttacagatattttttcaaacagccaatcagataaacgagcaaatccagcatggtatagatgttattactttgcgtatttcgatggctgataatgagcgcctaatgtgtaaagaccgcttaactttaatttggaaattagtagataattagggtttaattatgaaacttgcatgatatttatgatttatcgttttatggaaatttatttgaatccaaaatgcattatataagccatatatggaattttatgttttttcttgttttgtgcccggcaatattggaacgcgggatttggccattaaaatcatattttagtatttttagtatnnnnnnnnnnnnnnnntagacattgagaatgtcgggattagtcaagattttagaattga

SEQ ID NO: 48509 - DNA, 1635 bp, Cannabis sativa
  modified_base (703)..(705): a, c, t, g, unknown or other
  modified_base (1563)..(1591): a, c, t, g, unknown or other
ttgaatccatgacctatatatatatatatattcagggtttttcatttttatatttcaaaacagtttattttgtatttttacgaaaatccacatagcaatttcaatcccaattcaaatttacatagcaacctacataaaaactaccgaaacaactactagagcaacccaaactctataaataaaaaaaaaattaaaaataatatatgagataattctttattttttttttattttagaggagagagaattcgaacttagaacctcatttttataagaaaaaatgtgtaactactaaattatgccatactttctactttgttactttgttacttttgttttataaattttttcggttctcatccagaggtcccatctaactttgttacatctaattttaatttcacaataataatagctcaatctttagctcgtcgatattaacaaaacctggcaaatttcgagtttttggaatcacaaatcgatgttttatttgagcaaaaccatgatttttttccctttccttattcaatatatcaacttttgcagaataagactataatattcccacgaaaaaggtggtaataacccatttgtgatagttatttaatgagaaatgctaaagggcatagtagtgcctcacactcttttactgtcaatatcgctattagtttaactaattatcgggtttcatataatttaatannntaatttttaaggagtatcgctagccaattacaacgcgacatgtcgagaagatattaggcaccataatacctaatagcaatgctcttatttaattgaaattctggctagataaagaataattttagtagtgtactagtgttataatctataataaattctgctattattgtatgaatgtgatgcaatcaagttgtactttgggaattggggacccttattttaaagaaaaatactaaagaatattataaggtgtaaaacgcaataagaagcgttttaaaaaaatattaaaatttatctttattattagtgaatttaaatatagaattctaaataatttaatttaataaataatataaaaaactactaatttctaataatatatacaatatgttaagtatcttcaagtgttttaagcagtgttctatattaaaaagaatttcttggaggcttattttattattatatattattatttatttatttagtggcatgtttaattaaactattttgtaacctattagctcagtcatgagttaaggaaatatctaatgatgatttattaaaaattaaatatttcactactcattctctcaattgtcaaaagcattgcatcgtggcctttgttgattgtgtccatgtttcttgacatggtacttgacatttgtatatgatatgatatataaaaatgttaaaagcttatactacttttttttttctttataaattatatatattttacataacataactaattgaatattgttatgtggtattatatttactacaattaggagacatgaccatcattcctctaaacttttgggaaccccatgttattttttaggctaattaggattnnnnnnnnnnnnnnnnnnnnnnnnnnnnnatcatgccccctgaacttttaagtattagaatattttatatatg

SEQ ID NO: 48510 - DNA, 2066 bp, Cannabis sativa
ggtaaaaatcctaattagctttaatattatacatattgttatacactttattaatttggtatccacttttattttactctctagctatacaaaataaaaggtcacgttgagtatagtaactaaaggggacccaaccccatgaccgcccttaatgccacgatcgttgcgtcacgaggggctcacgtggcagtccacgccagccaagcaagcagctccatgctgagtcaaacaactcacgtgtgaaaattcctctatccaatgaaaatttgccacgtaagaagcaagtagatgaggatgcacctctgccacaagttagttgaaacacagtgagtcacaaaagagagccgatctgatcctctagacttggcccaggcttggctcatatataaaccaatattgggtctaactattattgacagaaaatgttactatcatttgatttgatttcatttgttttgttttgctttgttgatttgcacattttgtcagtcttcttactccctaaccactagtgttttctctttaattaattttcccatttaatttcaattgtatttggtcttctaattttataccacttttgggcaatacgtttacttttttttgagttagcaaattattctaaacaggcaagactttcactaaactataatatagctgtattgggacattgttcacaaatgaagcttttgtattattccatgcaggaatgtaaaagaacaataaaatgagccctaaatttatttgttttttaaaaatttattatatcaatgtacatatattatattactttgtattgatttgaatttctggacaagatttacacattaattaacaaaaaaaaaaaagttaaaatacgatagctaggtttatttgtacaaatatgttcgttttcataataagatattaatcagattattgaattaactatctaatttgttaaagaatattggcagtggaagttatcttttgttagcataaagctataaaaatataaaatgttatgaatttattgtataatgaaataaaggggtagataagattgggaagctaggcaagtaggtccttatgcaaacttagtcatgaaatttaagttcaggctcactagtcagtagtcacataccgatgttgacactttggacattatctttgagaacataatataagaaaagaaaatataatatatatggctgtaatgaaaggagaaacgatacacgtagtaccatctggtccaagaaagaaatcctaatttcccaaaaggggctttgcattgcaacttgcaatagttgatcactagatcactttgaaagtgatttatcctaaaatgtcttaggaacacaacccacttcacctcacttcatgaaacacacaaaactcactctgttgagttctgcacatttgttttttttttgttagaaaaaaaataaaaaaataaaaaattgtgcactctttttctcattaaattacactactattaaaacaccctttagagacactttttaaggccttttagcgtcaattttgacaaaattcactaccaatgctgatccaagtaatactactgtagggtctaaaataaccgacgccatatgtacactatgacgttagctattttatagtaaccgacaccatatgtaccttatggcgtcagttcgtagcaaataaccgacgccatataccccctaacaaccaacgacatataccccctaacaatcgacgccaaattctgtaataattttttttcttcagtttatttaatttcatttaatttatttaaagtaaatatttattaatttatatattatattatttaatttaaatttaaattaaatatttattttttaaaaaggtaaattaaatattatttaaattaattttataattagccgatatacctaatttcatttcatagaaataattaaataaaatacaattaaatattacacaaatattgtaaaattagtcaaattattaacaagttaataaacctaactacaagaagctagggaagaaaaattcttaggccttttagcatcaatcgtccaagtcttcgtgaatcaccgcca

SEQ ID NO: 48511 - DNA, 3945 bp, Cannabis sativa
  modified_base (1063)..(1064): a, c, t, g, unknown or other
attttttacttccaatatggatttaaagtttttttcacttcatatgtagattctaggaagtagttgtcaaatggtaagatatctttaaaagcagctaaaaattgatttaaacatttatcgctcactcaattttctacgttgatgttgtaaaactttaccattgttggtaatcttaattttttataaccatcgaacatggatttatctagatcacttagaaacttgtcatattttttaagatcattaagaaattcctcatgtgcttcgttaagcaagtctaatggatatcatcgaaatcattatcctcgatatcatctaccccccgctttcctaatggatgtagatcatcagctaaatgtttgccatgacaataccaagtagtataacttctattgaaacctcgtaaatatacatgatccttaatctttgcaatatttcctttatatccattacaataatctacacacgtacaatcaatacaatacgttcagttcaggattttatttttattttagaatagaattctttagggcaaactctaaaaatgcatcgaaccatacttaaaatcgcagtgtgtctctctcctcacgccatgatttgtctataacaattatcctaacaaaaaaaaatcagtatttagtaactaattataacaagttactacttacacaatgtaactaactaggtttctcacaattaattcatattaatttatatattactaaaattcttgttttagttttgttaatgttattaagttgtatgagttgtaattaactagggtagtgtttagttgattggaatgtaggtagaattggaatgaatttccctaaagtgaatccattcatttgtttggtttgtcaattataattaaaaatttatataaatgtgttatgtcacctaatttcttacaactagcgagtaattaactagttatttgtgttgtgtacttttccttcaatatttatgtgttttagtaaaatttattctatttctactgaatttttgattgcataacagctgtaattgggcattcccaaaaattttaaaaattcctaaagtnncaaacaaaacaaatataacaatgcagaacaaacaaaataacataaacaatacaaaatttatccactcatccgaccgcagtacatgtatttgcagaacctacttcaccacggatgaatatttaagatattcaaactccactaaccatatatggataatttattataataacaaaaagttagggaatatatacacctatagcaagttaaaatccgatcaataccgaaatttttcgaacctaaaaattagctcacaacatacaatataatgcaatacaataaaattagaattttaattattgaattacttgctagttatttaaaagagtaacaagttattagttattaaagtctatagattaatttttgaaagaaataacataagcatatacatatataatcaattatatatcatactaacataattttaaaaacttcatttctaaactaattaaatccctactacctcattctcattcacaacaaatatatataatatatacacaatatatacacacacacaatatatataaatatatattcaataataaaacacaaaatatatacatatatattatatatcaagttaattaatatttatcttataaacgcaatttggcgacaaattgcgacaaaaattcggccacctatagcacacacacacaacataatattaataaaatggaaaaatcccaaaaaaatctacgaaaacaaaaatatagcaatgtacattaataaaatgaatagaaatcatatttataccttaatggacgttgagatacaacgttttctctgctaaaatcagtggttagagttataccaccaccttttcttttaatagggtcgggtacaatgtaaatgggtgaaaaaacaaaacttttttagtgtatagaattagatattgaaaatagaagattttttctaaaaaatagagtgaaatggtgaagaaatgagagagaatgggtgattttttttacagtagttggcaaagatttctaatgggttttctcggttctgcttgttcttactgaacaagttgatgaaatgaggaagacgaagatgtgggtcttttatataaccctatggcgtcggttattaggtattaaccgacaccataggttcacacatgtcgtgtaatgagtgcacctatggcatcggttaggcttaatgcaacaatacaacctattaggctttgtacttccttgacagttgtggccgacttcatgcccaaaagagcttggatgcatttttatctgattgtaacctgaatacgtgttcatgaaactcaggatttcatggccagttgtggcgtctactatctggtcaattttgggtagagaaaagcagtcttttggacatgctttgttctggttagtgaagtcgatgcatactatccacttcatgttaggttttggcaccatacttggttggattcccattgagggtagaatgcctctattatgaagtcattgactctcagccttttgacctcatctttgagtgcttggggtgcgctccttgtttagcaaccaccttttttgctaaatagaccagattcttggattgatgttgagtgcatgggtgatcacggagggatcgatgccgaccatgtctccatgtgaccatgtgaaatggtccaagtttgcccttagaaattctatcaatattgatttgattttgagaaccaaacctttaccgatcttcagtcttcttgttgggaaagtgggatcaacctccacttcttccaaatcttctataggttcaaagcttcgtgtaggatccccagagtgaggatctatgtctttgtccccaccttgggctagacttcattgccccttgctaggctcattctctagacttttggcaggcatcttctcttttttggcctttgacagggccaagttgtagcagtgatgggcagactgttggtgcccctcacacataccaccccatgccttgttcgagatttgaggcataggtggtagatagatgccaccaccgccttcaagacgttgagggccagttggcctatcatgacgttaaaagatgagggaatctggatcatgacgaactgcaccatcattgttctagtggttggattttctccaactatgaggggtaatttgatatacccgacaggtgcgatgccttggccaaaaaatccatacatcccatggctgcaaggctccaggtcagtgagttaaagccccatttttcatatgttgatttgaaaagaatgttggagaagaatttgtagtgcaccatacatcttgccacgatcatattcccaattcgtacagtaatgaccaaggggttattgtgcgagaaactgacccaagcaacatcttctttggtgaaggagatcgtggactcttcagccttttgttgcttagagctccaatcttcaatagctaggacttcgcttttaggctcgtgatggagtttctcagcatagcgctccctagctttgctggtctccctgtaatgggccaaatgatgacccctaggtgtcctaccacagacagtggcatcaatactctattttggcctccttgtgcctgggtctggtcgtcttgtacataacggcgcagatgaggattgttacaccttattaggtattcaatctccctcttgaggttttgactctcattggtgtcatggctaatgtggttgtgataccggtagaacttcaacgtatctttcttacccttctctttcctgataggaaagggctttcggtatgggattgttccgtgagtagccatgaagatggcctcaggcttctttgttagaagggtgaagcaggtgtacttctcctccttattcttctatggtgtgggagaagtgtttgacttctccttttttccattgttctttcaagtgt

SEQ ID NO: 48512 - DNA, 1193 bp, Cannabis sativa
taatattaaataattagatttgataagtggtaaattagagaaagacaatttgtaccacttaagcatagatgaaacaaaagttggtaaaaataaaaccacgagctgtcctataggatttcagccacatggagtaatttttgagtttgggtctgagtttagatctggtctagatctaaatcggttcagaatttaatatatagattaagaaaaaaaaacctatttaaatttttttttgaaagtattattttaaaatttttaaaattgtaattcttatttaactaattaaagatgtaaacagttatacaaaacatatttttataaaatacttttactttttaaattaaaaaattaattaaaaatatattaccaaacccacatattaccaaataagccataaatatataatagttttgaagaaaaaaatagagaaaaattatgtagaattaatacgaaataaggtatacaataattgctaggaatttgggacagtacacatatatgacaattttacctcctaactataacaacttttcctttgggcatatcaaacaaaagtggcagctgactcatgccagtcagtaacaacactataaaaaacaaaatatgcaccacactaacaacgtttaaaattgaaaatatcttatatatagtagatatttaaaattttgtagatataataattacaataaatgtaacgtgactaaaaaaaatcttgtatagctagagacctactagtccactgcacaacaagaataaaataatgaaattactaactttacacataatgaatagaaatatttctcaaaaaaataattataataataattgaataaaacaaatatggcagcagtttatattttattttatcactgcaccctgcacaataaataaattaagtcatgctaattttttttttctcgctcttactaatttttttcttatatatatatattcgattccttaactatcgagactaccatatatatgttttcccatattttaatttaatttactaagttaattatcaaaacaggtacgtaaaacatgagtaactcatctgatctctaaagttaattttatagatctgaaaattgttaagtatagaaacattacttttgtccctattataaggactctaatatatatatataaatatatatatatatatatatacatagagagagagagagaga

SEQ ID NO: 48513 - DNA, 1738 bp, Cannabis sativa
agggcttgataggtctgatatcaataagacaatatcggacttatcagcccctatattagacccatcgtgtcacaataaaacttaaaattatgaggatcatcaggcatactatcgggctatcttcttcaacacttaaacccattcaacattgacctaccatcggaccctatatcgggcctacatcggacctgcatcgagctaggcaaaaatcgcatattctcctcaaaatacagattcgagcctaaaaagctcaaaaatcacatattctccactaaaaacacagacctaacactaaatttaatttctaaatcatgaaaaaataaaacgattacagttagaaattcatgaacaaattagggattacctttgacgaagacattgtcagcgttaggtggtgtgatcgcggtggtccgtgggtggaatgggtggtgtggtcgcgaggtcaaggtggtccgtgagtcatgggttgtgtgggtgatccgattgtgtgctcctccatgtgcgtgtttacagagagcgagagagagaaggaggagagagagagaggcgggggttattcaaatgcgaggagtagaatgggattttaggaagaaaaaatgacatattctaccaatattgaattgtttaggtttagaaaaaaaaaattagcccaatcaatgcataattaatcaaatttctctttttaattagggttttcttacaattgaggcggttggattttccttatagttttatagggtttcattaggagttttattatgggtcgaatcccatttataagtttggaaacccataggcttcagttatgtgaaaataaccgaagtcatagggtaacatgtggtaccctatggtttcagttatttctaaaagaaccgaccgaagtgtaaagggttgcacaataattttttttcttttagcttttagttttcttaatatatatttgaagtatatgtgagcaattaaatagcatgggtactaaaaggatatggcttcacttttttcatttttttttccttttttttttttgtaatgattgaaaaattcgagaggaaattacattgtatatctattttactttaattgttttaattttcttacatttaagttactgtaaattatgtgctagactaagtggaaggtgaaagtatattgagtaactcacttataaaagtgaatacattttaatgaaatataatatgtagtattttttattaatggatataaaaagatgtgttcctattccaaaactctagtgtatattgatagctaataagttaaggctagaaatcaaaattgagaggaagttggagaagacaattaattaggaagacaaaataaagtttattattataaggctattaattattggctaaaagagtagaagtgggagtagaagagggtactttaaggtgcttaaaatcatacaaatataaattacaggtatgtcatttaacatttctcaaatctatattatataccaacttaggaatatgtggacttttttattggtaaatatttgaagatacatatattaattataataataattattataagcatcgtaattaattcgagagagagagaggggtgtggacccatccaccgcccatgagcacgcagtcctaccgaaacaaaacccatcctcgatctatttttctcaaatctaaccctaacccaacacttaacagctaatagaagacaaaggaaaaggtagagaaaaaataagaagaagaagaag

SEQ ID NO: 48514 - DNA, 1473 bp, Cannabis sativa
ctaaatattggggtacacaattaattaattcataaataattacaaaaataacagaaattagtgctaattgcctttactaatctaaattactaaagcggtcattacacccatgttctgttagcatttagtcattttcatgcatcttttgtagttaagtgtcacgttggctatccatgtgtacacaaggtattgtccacatagacacggtgtacaactagcacaattcaattggcccgcgtaaataaataatttaaaaataaaaaaaaatatataatttgtgttagaaattaaaattttaattaataaataaaagaattcaaataaaaactttaaaaggaaaaccctaaaatttagaaaccttaaattaggcatttctcatttcaaaatcagttaaaaaaacataacaattagcaatataattcctacaaataataagaacagtccaaattacaattctcattacagtgtaaataatattacagttcaaaatagccacaatattactaaattgacaatttataatacatctctaatcacattaaactattaaactcaacataataaaagttgtgattaaagttatactctgagattcacaacgaatcaacaactatttcaagatattgaaacaagattgggagcatctcaaatgatgactagccagagcacgaccagagctcctcaattcataacgtctatcaacattcaacattgaaaaaaataaaaatggatcttgaaatcatagagctcacataaactaggataagaatctagagatcatttaccatgagggatctagaaatggtcaaatcgacgccacgaaatctcagctctgacgagctcctaacggtgatgagacaatgacatgcgtcttgggaatcataaagatggggtcttcagaacacggcaaggccaatcttggcctcgtcttgggacctcgacgggcagaggaggcccattgtcgccacgccgagagacgttcgagagcgagagagaaagggggtcgaatctgggttggctcttgggatttttgagggtagtggttctccgatcgtgcgactgagtgagtgcggctgggagaatatgatgaagaaggaacatgctcgatatggcattagttctagtatcataagtgtttccacataggaacgtccacgaatctgatcaataactcttcgcgctttgtgagcagacatagatgtatactatcttatcaaatatacttctgtagatcggtttgtccttttcttctttatcataaggttcactcctcactaatgaacgataagcatctatattttaatttattatttattaactaaatattaactaacgacgagatctattatcattttttgcatgatcccagaaatttagagtgggtgcaaattcttccaatttatggcctaccatacgatatgttatataaatgggcaaattttattttctattatgaacaacaatagtatgccc

SEQ ID NO: 48515 - DNA, 794 bp, Cannabis sativa
  modified_base (150)..(151): a, c, t, g, unknown or other
attaatattaggaaaataatcatattaggccataatcaatagaatcaattgaaatcgaagccctagtttttattaactgtcaattttctataattattttcttcatattagttttcttattttaaatttctttcttaatttttatttaannaaatagaagtaaaagtttaattttgatgtacttaactacaatccttatgggattgacctcactgctggtgagtttactacttgaaacgatacgtacacttgtgtgtgcaaagtatcacaacactttttgaccttcggaatcaatgttatcaaagtttagttaaaaattgatgggtctgcaccttcattaagaacctctaaaactgccgtagagactaagtgacccacaatgtgccagtaattagtgtcaaacatgactgacatgccgtccaaccccgagctgccaccatctttcatagaagaaagggcattgaaaatatcttcagcagtatatggtcgaacaagaatgtgatttatatcagcagttatagtgcacggtacagtagccaagaaatgatttaaagcttcattatcaaccctagccgatgagtatatattccgaaagtaatcctcaatgatgttgcagatatcaacatgttatgtgcaggttataccgttaatgtcaatgagagagttgatcttgttactattacatctggtattagccctttggtggaaaaattttgtgttggagtcacctgatttgagccatgaagtccgagagcgttgtttccaatacctttcctcttgagccaacaagtcat

SEQ ID NO: 48516 - DNA, 1634 bp, Cannabis sativa
  modified_base (996)..(998): a, c, t, g, unknown or other
attcgtttttgttataatataatagtatacaatactaaaaaattatagaacttaatttaattattatgtatatttttaaaaaataatatgtactaaatgtatttttttaatttttattagctaatttattatatttggtcattttattaatttattttaaaaataaaaatagacatttactaacttcgtttccaaatttaagatcattttgcatctcagcctaatctaattcttgtattataatttatttatttattcttttattttcttcatgtttatctttttgattagtcattaaatagtgttaaatgttaaatatttatttatttaaaatctaatattttaaaattgattagttgtatctaattatttctattaattatgataattaataaattcgttagatttcatgactaatcatgtttgatgtttgaataaatgatttcagttcacatcctctcttatttagatcactggcaatttcaagtgattttcatgtttaagattacttattaataatgatacttatttctcctttcataagcaatactttaatatttatattattttattaattaactccttaatcttaaattttaataatgtgttataaatagtttcatttacttcaaatatatttaatattccaactcaattagagagctccacactaatccgctgtgtttgatcatgttataaagacttcttcttaattcataatttaaaatttattacttaataaatctcattatacaaatatctctaagttttaacaaataggcaattattgtattgcatatctatctcatactatgaatataattttaactgtttattcaatactttacaccactacaaataactctttttatgtcatttttgtatgtccaacaaaaaaaaaagtattagacattaaaacaatttgggaagatttctagtccaacattgatggactagaaaaataggtgggataaaaattagggattatttcacaannncacaaaaataacaaaaaaaattaccaaaatacgatttcatggaattcgaaatatttttacgatttttttgattttatttagaaaaaatacggtctttttatgttgtaatcttgctaatttgttgttaattttttgttatctatatattattttttgttgttattttgatgttatttagatgctattttcatgttacttttatatagttttctcgttgtttctacgaaaaactattaaaatgtaaaaaaaaaaatctttaaacgtaaaaatgtaattttttatttttttacaaaaaataatactttatgtaattattccaaaaaaattaagagaaacttttttttttcaaagaggcttacatctatttgggttggacgtagctggacttgaatcgcgggccacgtccagctttgatggacgtggggcctcaaattatacaccctaaataatagagaaaattatattgtatacccactttattttacatgttttaatttttaccttcatttctatattttttaaaatatactcacttttatagataatgttcccattatacccttaggttaatataaattatgtgttagacttaaaaaaaaaggtaagagtgtattgagcaatccaatcacaaaagca

SEQ ID NO: 48517 - DNA, 2488 bp, Cannabis sativa
ttagtaaaaaataagaaatttctcatcggctgattttaaaacttgttgcccaagtctagctttttagcgctggccccagtactaatttaagttttttgttatattccaagtagtttactttaattcaatcatttttcttcttcagttatgttccccacttatcaatttccattataatcatttcaagaagacgattaaaaatattttggaaagcttgaaagggcatatattttgggatgagagggtcccatggcttgtcctttctcttcagatacagattcgaatcaaagaagtgaatgtattaaattcttggcaacaaacaagtgggagaagaaatttgaataaaaattatgaattttgaaacttttacttggcccacatttcaggccgacccgtatcattaatttatatgagtactgaattttgttcacttttgcaatcaattcactataataactgaatatcacaattttctttaagtcacttttatcaatctattttagattcagttatgctccccacataatagttctacattgatatattttccccaaagttagaaaatctattaattggtaactgccgatttcaactgcttcttccagccattttttttgaggatttttttccagccattttgtaaggccaaaataaacttattaattaaaacgtgagttagcagcgaaattttttatgttttacacttcaactttttatttatttttttggcaaaacttcgttatattacttttctttataaatttaaaatacttgttaagtatcactattaaattaccaactcgaggaccatatttcagttggtattgaagataatatctcatatcaaaaaacaaaaaaaaaacatctaattggtgcttcaaatttataaaaaaaataaataaataaatataagaagaattttgctaaaaaaaaattaaaatgtatagaatcaaatatatttcaccgccaataacacttaaaacataaacaaaatcatatagaactgaagaacaatttaagatataacttttggattcaatataaacaatattttatccagtgctgtttagtataccatattttaccttcttataaaggtaaaaaatggtatacatatacttaacaataaaaatgtcaatgactatagccaactagagaaatatatggttatacagagtaaacattaaagttcatgaaccaaatagtatatacaaaaccccagttaaaaactattgattatggtcgattctgttgaaatttcatagttctatatcaagtacaacctccattattccttataccccaagtaaagaggaaaacttagacaacagcaagcaaaaagaagaactacagttttaatttgtactgaattttatcaacagcttccaaataacaccagttccctaacaaaaacaaggaacaaaaccacccccacaaccatgttgagtaggtacacagacggtggagttgtatcacagctcaagacagtcggcgtttcctcgaaagtaaagaaactcttccatttactgctaactgttggcacgccgcctgcttgcaatacatactctccgctgctgctgctgctgatgtgagccttctttctaacattttcgggctcctcattagactccttcccgggcctgtgaacagaagtaacactgtgttttgcagcatctctggcctgtaatttatagaaatcacatggagttggagttaaggtccagcaaatatagactcaagagcataagataacacttttttgtaacagagaaagaaagcttctctttcatttttctttttatacatgtagctatagaattccttaccttgtttccagggtctgccacatttgaaactttcaatggtggctgaaggcgaacccctcttcttgcagaaatctcatcttcatcaaagctaatatcgatactcccaaatgttcgacgattgatctctcttgctggtgtgaagtcgtcagatgaagtatcctcttcggagaaatgaccaccaactatagtttcttgtccagcattaccaaccatataagtatggtgagtttcacttggtgtactggccatttgcatatgccggaccctctttgaatcttcccgtaagccaatcgagcctgaactttgcaaagcttgcattatctggaagacagagatgagcagcattgtaagctatttgatatgtttcaacaaacaaacagtgaaaaatgttaaaaaaagattcaatttctcatagtaattacaagtagtacatgaaactttgacaaagaagtaaaacaagaccgatcataatttttgtcagcggggtctacatgcagctggtgcttatcctgattagagccattcattgccttaggcctgtttaggaaagaaaagatgaccatggcatgttccattcttaatacgcagaactattcgccaatgtttgactgtataaaacatttttaggcaaagggccctcataaaacattctttatctgcta

SEQ ID NO: 48518 - DNA, 2818 bp, Cannabis sativa
tacgtggcttggcacgtaacaatcacctagtatattatattatacatataaatgtcttacagtttcttgattcttttattccattaaatagtcctttaaatatttaattataatattattataaaataatcattcagttaaattttagcatacgtcactaataaaatattgatgtgatttattattagtctactatcatattaacgctaaatatttacatcagtattatgattgtcacatgtgacacaaaacttaatagaaaagattattttacaagactagaaataattcgagaattattaacaaaaacccaaaataactatataatcaatctcaagaaaataattgaaagtgatatataaatattattctagaattgcatttgtttaatgttttataatatatatttgttttttttttttggaaaataatatacatttgtttgatgtattattttgattaaaacataacatattttaatctaacatatttaattttttttaatataaataaaaaccgaccaataaatcataccccatcattacatctttccctctgttgaatatatttatttaagattatatatcatatcatcatagaagcaaatcgtatcgggtacagggataacgggaccacatttatagttcatatcctttaaaaaaaaaggtgtaccaatatctcttatttcaccatttatgagaatttttaatttagtttttttaactgtacattttagttatttaagatattttgtgaaattttaaaaaattcaaaataatttataatataaaataatgtgttcaaaaaataataaagtaaaataatgcgtataaaataataaaatcacatgtgcagcagattatttaaactttattttcggcaggttaactttctccaaaaaaaaatctccaaattttacaaaatatctaacaaaaaacatataatcattatatattagaggaaaaaatttcaatgcactgggtgcactgatgtacttatacatttttatttattttagcattgagaataatttcttagtttaattttttttgtacgttataattatttaaaatattttataaaatttcaataaatttagaaaaatttaacatgtcaaaaatcaggttcaaacagtctatcgcatacatgactattttattttttatacgcgtgtgaaatagacagcttgaaaattactttttatattgtaaattattctaaatttttcaaaatttgtagcagattttaaataattatagcatacacaattatgaaaaaagaaattagattaaaaaattctcctacatgttgaaaccgaaacagataaggggtgcatcaatatcaatgtatctcttttaagagtgcattgtggaaggaaaatttaactttttatgcttacaaatatatacctaatatttttcccctaaacatataacatgtaatatttatgggaaatgacacattttacaatatccctaaaataccctcatttacattatcacctatcccctctcttcttatctctttcttcatacccatcggaccctaatcaaggtccccatcggacccccatttacagcacatgcattggaccccaatcggggtccccatcagacccgtcggacccaaaagtttttccagtacatgcatcggacccccatcagggtcccatcggacccgtcggacccaaaaactaaattttttcgcatatgcatcggacccccatcggaccccattgggccattgtcttccccaaatcgtagatctgaaccttggacattgttgggcatcgtttgagtctcctccgtgtcgaagtgggtctcctccgtgacgcaatgatgagggtcggaatggtgggtgtgggtctcggtcgaggtggtttgtcgaagtgggttgtgtgggggattgtgcgatgtgggttcgggcgaaggggaagaggcagagagagtttgagggaaggagagagaaagggtttgagtttttgagaggagtatttttggggttttggaaaattggtcatatgtttttaatgttgaaaagtattagtttagggaaaaaattatctcctaatgcatgcatagaaattcaaatttcccatgtggaatcaccctatattatatattacatacacttcatagtttgatgagtattgcaccctcttaaaagtgatgcatcgattcactatttatcagttcaacaccgagaagaattttttagtccaattttcgtcatattcctatacacagggccggccctgagcataggcctctgtgcctagggcccacctagctaggggcccaaaaaaaatttatcgccttttaaaattacacatttttttttttatcaattttgaaaaatacccatttttttttctaaatgagagcccaaaaatatttttttccctatagcccactaaatttcaaggccggccctgcctatacagttataattatgtaagacattttttaaattttgaggaatttaaaataatttacaatataaaaaataatattcaaatagtttatttcacacacgtagaaaataaaatagtcatgcgtactaaagacgatttgaacccaatttttgaagtattaaatttttttaaaatttttcaaaattttacaaaatatcataaataacgataacgtatacgatcataacaataaaacaaactaaaaacttttagtgaaaccaaaacaaataaaaatatattaatatactccttttaagactttgtattgtaaaattttccaacttttataacagtagcacaatgattaagttggatgcaatcccaactcgaacaatgatcatacta

SEQ ID NO: 48519 - DNA, 1955 bp, Cannabis sativa
  modified_base (52)..(69): a, c, t, g, unknown or other
ttgttatatgtatgttattttttattgttgttttgatgttatttaaatgttnnnnnnnnnnnnnnnnnntgtagttttcttattattttcgtgttgtttttacgtgaaaccgtaaaaatgtaaaaaaaaattcattaaacgtaaaaatgtaattttttttttacaaaaaatagtgtcttatgtaactattcctaagttatttggtatgaggacggatcgatcataccagttacattactagcaaaagcccacttaaccacattattggctgcaaaattacaaaatctagatattaacgaaaaattacaactaatcaaaaagtttaagagaattttacattgaagcacatagttaccaataccccaaacatcccttcaacgtgttgatcaccgtctcaaaattactctctattatcacaaacaaatgcttccaaagggtcgctgattccaggactaacaaatatgccgcaaattctctaatgagagggtcagagaagttgaagattttgctagccacccacaaaaacgattccttgtggtctttagccaaagccaccacgcacattaagtcactaccaactttaacgtcacagttgatcttgacccaatcgtccagtgagagaaaccaaacagaaggcgcaaccatcaccaacgaaggaaacatacaagaactaacatatgcgtaacatataaaaatagagtcaatacaatgcttaatgttacatataaaattattatgaatgttatcatttcaatggtattgaacaatggctttaaatattttgtgttccaaaaggagaaactttaataagaaactctaaagagagtaccctctttctgcaaaaatgtttactcatttggatagaaataatttttatttcgagtactaaattgggttgcaacatgttctacccacatttccattcagttttttttcttgttggattttcttctgttagtttattactcaaagagagacgaattattaaattcataagaaaatacattcttttcaaaataaaaatgtttcattctttgagtctcagagttatacttaccgagcatattgaactcctacgattttattatctgagaagagaatgcgtacgagaaagagtttatgcgcaccaaataatcttggaaaataataaagctatcttgtatttataggctcataattgcaggcagggcaagataggtcgtagtcccaacaacgttattgttaatattttttaatcagttttttatttttttaattaaaaaagtaaaaatatattcaaaatacatgttctatataattgtttttacttttaatttaaaaaataagaatcaaaataatttttgtttaaaaaaatcacttaaaaaaaattaaataatttcttttaattatagtctatttgtatttttttcattaatattttagactcggactctggtcgaactttgacatgtatcgaattgtgcctccactttttagattcttcctaaactatagagattgttgaattcaattcaatgactttaatctaattttgtttaattttactaacggtgtctgacatgaatagaagttcggaagatataatttggtacgtgtcaaagtttggggtacaatttagtatatgaacaatcgttatcttaggagttcgtaagtaaaattgaacgaaattagacgagactccttaaatttgacaatctaattaacattatatttgtaataagttaagtattttatttgtttaaacgtttaattttttttatttaattttccttattgtaacaatgacatggatggattggtgagactagattaattttttaaataaagaaaaaataaaatcattagtaaaacaaatgttaaaaagtagagcaataatatacacacataaattacatataaatttaacacttacttttgtgataaaaagaagatcaaccaattttattcatttaaga

SEQ ID NO: 48520 - DNA, 3789 bp, Cannabis sativa
tatttagtagatatttagtctcctaattttgtatataaatatgtattattctatgaaatcaacacacaattcgaatcactattttctacaataattaaccctaattatttaatttaatccagtatattgaacttaagcggtctttacaccacttgtttccagtagcaactactaacatccgaggcttgatataaccccacaaaccctcctcttgcgaataaacaatatagacccatttgacccataattaagttatcattttttgtcactactgcccaaatgtacttccctatggcagccacattccgccgtaataatggaattaataaacgagattattctattgatgagatcaataataatcaagtgtttattggagtttcaaaatataagttcatggtccccaagtcacctctataaaaaactataaaggggaaggggttatttgatgaaaagatttgagatagaatctatttctatgaggaataattctttaggccggcaaaatagtaattttgtgaaaattattattttgaataattattatgaattttgtaattagatagtaatatattaactctataataattatactcagcgcgatgttctacatgacggaagtgttatcatccacaagctaaatgatggcattttcacgggtttgaatacttttaacattctcatgattaatattacacatatatacatatagcttctttattatttattttttttttaaaaaaagaagaaaataatagaattaatatgatcatacatgctctctaggagcttaccccagtgagggaaaagagatttgctcttcttattgatttgctctatcagttgaacaaggttactgcattggaacttcctgattcataatggaacctactaagtttagcgacttgttgaagattcagttcagatagcacaagacgacatcacgtttgctctcaatcctagagaagtggatgaaccactagaagcaaaccaagttttactgggaaagatcattagccgtaatcgattggggaaggctactatccaagggtccctcaagctctcttggaacgctatcaaagggtggaaatggaaggagattgaggatggaatcatccaatttacttttgtaagaagggaagatgccatgagtgttctcgcgcgcagaccatggttcgtatgtggctccttattagtcattatgccatggcctacttggctctccccagcagaggttaaattcgataaaacacctatttgggttcacattgagagtataccccccttctattggaacctgtccaatctgaaggaattagcctccaaggcctcccctgtatacgaactaccacctggcattgaggacgccataggaatgagtacactccgattcagagctactattgacttgaacaaactgatattctctggcttcttcctcaggcgtcaacgtcttaaagacttatggctgcaatacaaatatgaacgtctccctaaagtttgtttcaagtgtggtttattaacacatgatcaaagctcctgctttaaacccccaacaatcatcaaggatgcctcaggaaacttttaccccatgtttggaatctggcttaagagtgatgcaaccgagaagtctactttcacttcgccactggctaagtggtttcaagactgggttctccaaaagtcactctgtagggatcccactcttagaaaccagatgaaagtgcagaaatcaatccgaaatggtgagaatgatgagataagggaatgtagaagacagcttccaggtaaaaaaaggatagtcaccgatgacgatattctccccggcgatcatcagtccggactggttattacccaactccccctggtttatctaccaggtattggggagattgccccttttgggaacaattcaaaatgcatttccatccaagaattgcaggaggaagccgagaagtacgctgctgcaatggccagcaagaaagcatgctctgctgaagatcaagggacatcgaacaggcttccctctgttctggtatgcaatacgaatgaggatattccctctttggtgaagaccacagctcaagaggctgaaagtcatctaaccgttaacccaattgagtcgttgaatgggtccaatacatcagagtctgggaccacttctatgcatatgggcccaaacgatcccatgactaatcaaacggaccctcctaatctctacgggggctctattttggggacccaagcccaagttctacaatggccttctaaggagtgctgggccgaacccaaagcccgtgaactgtttatgggagctctaacagtgaacaagttttttagagagcccaccctcttcaatccaattgttgatatagaggactttagagtcaaagagcacttaaatgggcctagaaagagaaaggcctctgatggcatagtaattggaccttcgtctcggcccaacccacttcctactccctctaaagtgaataattccactgagaaggttcctactgggcacgatcaaacagatgacattggctcttctactgcaaatactccccaggcgttgaacttagaagtcgtcctaaacgaaggaagtttttcacctggtttcaatgaagattcgaagtctcaaaccaagaaagggcggggaaaaggaaaggtacagaccaacctttgtgatctgggcagtcacaaaagaagggggagacccccgaaatcgcattcccccttggccgccactccgacatcattcaagcgaggaaaaaaggccacatcgagattgagtggcaagttcaatttggttagtcactgggatgggagggacttcgaactccaggtaaatcttgataatctttttgtcattattgataaaccagagagaccaagctctagctgtacaataactgaaattgaagaaagcatagaggactcggctgtgttgattaatggccaggattttcattggggctatagttgcccggaaaagtctccaaggtcgccatgaaaatcctagcttggaactgtcgtgggctcgggaacaccgcgacagttcgtcaactaacgcatctagtgcgtcacccaatcccgacttgctaattctttctgaagttcgtctttcaatggtaaaatttatgagaatttgttccaaactccactttatggagaagcattatttccctcccattggtcattcgggggggctaggaatgtgctagatgaaaggagtaatgtgtaatgttcaatcctcctcaaagtatctaattagtgttgagattacctcagacccaccaggaattctgtggcttttatggggcttgtatggtcctcctcattgtgttgataaggaacaattctgggttcatgtgggagattgtgttctaaaagctcaaagcccgattctcttgtttggagatatgaacggcactttaagtgacaacgaatgttttaattaccgcgacaacacctccagatatgccttcaactttcgacgcatggttcacagagtgggtttaattgatctaggcttccaaggccctcgctttacttgggccaagggaggcagtaactccaatgggaatggggggcatgaagcgtgctagactagatcggggtctcgctacacccgattggagaattttattccctaacgccatcatcaaccaccttggggccactgaatcggatcacaggtgttaggctaaaattagtctaagtttcgggtcgtattttcggttagttttcactctttgtttctagttttaggactattttacgcttgattct

SEQ ID NO: 48521 - DNA, 2691 bp, Cannabis sativa
  modified_base (608)..(632): a, c, t, g, unknown or other
tttgcaattttggaaagaaaaagtagaaaagagggtgttctagctagcttctcttttcacagtcacaaatccagacttctgagaaaagctcattataaaagctttttcaaattttttttttttttgggtccaaagataattaaatcataaagtgaaagtaaattgtgtatatatatatttttttttaatgacaaggaaggtgacatactgtggccctatctgattttcttttctctagatagttttaaccaaaatcttgattgaataaaaaaccaacagacccttttatttgcataaattaccagaattgccacttggttcagataagaagttcagatggtaatcctgtgttaagctgcagtgaagttttgatcagtgtcatgctttagtctatttgatcacaaatctcaatcctaatctcacatagtgctgtaaaataggggtccaattttttaatatatagcacaaaaccatctgaaaagaatgagcataactagccacgaaaaatataaatttgggcacgacacggcatacaggctaaggcaaattaagtgcccactcattttaggggcttaaataaaaaaaatatcttttaaaaaatatatatnnnnnnnnnnnnnnnnnnnnnnnnnctatttatctttatagtaaggatctaataatattttcttacctatagcatatttcaactcaggatcggccatgacggcacaatattagaaattgacacaacacgatactaaaaatatatttttaagcacgacaaaacacgaaaggcacgacacataacacaaatcaactagcccaaaaagcatgacaagtgacaaatttaaaaaacacgacacgacatattagaaaactctaaaatttattataaataataatatatatttatttatcaattataaataagttaaaataataataaaaattaaatataatactaaatattttaattgtataattaaaactattaaaatgtgttctctaaaattatatatcaatttatttatagagtgtgatataaaaatttgagtatttataagtaaatattaaaattttaataatactaatattttttttatataattatctgtaaaatattgttgagaagttataaaagatacataaaatttagttgttatgcccatatttcgagcaacaatatgatcacgacacgtgttaaaaaaggtggataataacccgttcgtagttgaaagaatgtagaatgttggttaactcgctttagagaatgctggttaaagacatgtttatgtctttcctcaattaattaaagacgaataaaaatgccaactttcattagacaaaccagtgagattaaacaactgacagaagatgtatatctcaggagatacacaatacagaataatcaagacaaaatgatatgtgagttaaatgaaatagtatgaaggttcccatgctaaggagtacaaaagatacaatcttaaaagcttataacttatacaagaagtttcctagcttcaacatggggatacataaatgaattatacataaatggataaatgaattaacgatccaacaattgtctcgcataagtcgtctcgtcaccataatgcgcgaggcaaacaacaagtatatcctctcgacaaaataattattatagataaggatagaaaagggttaccagcagttaattcatttatcccatatgttgtaattgtaaatataaaacgtggggataattcacgctttatgaacaatttttttagacaaggccaaaggagataactgtcagatgagaaatcatattaataagggcaaaacttacagtgcatgggcggccaaattgattaagggatcaccctataagaaattcaccatttattgcttacattccttaaattttgtactctgtaacacaaaaacacttagaaataataataaatatttgtggactacgtagatttaactacaaaactacgtaaatatcttgtgtcagccttattattatttattaatactttaatatttttctcaaatttattattttaattcacaaaaatgtctcatttattgttaacaaaattctgagttaataatttagcgcttttattgagagccatttttctaaaataaaacttttagaaaaacgcatctcccaagaaaaatataattttttccttaatggaaaacactcagcaagatgagaatgccaagcaagaaaagacaatgcattgtctagggaaataacctaaaggaactcatacccatgaaagaccaaactaaggaagggagcctactttgagaaattttgaaagggattttaatgaggaagagattctagagagaaggaatttagatgcttatggccccacaaggtacgtcccaattgtggagttaaaaaattgccaactttggtgaagactcgctgagtcgaactaaagaaatgaggaattagaacgagtggttgctgccacaagaacaattccaaacgatgcaccacctgttcaagaggaacagccttttagacgatcatgaggaagacccgtgggtcgcgagcaagaagggcacaaggacccaatatcacagaacatgaaccaaacaacccttctcgcccttaggagcaacaacgagaggagatgagggaggttcatgttgatagagaaggtttgcaaaatcaaagtgccaccacttctaaggaaacgcgac

SEQ ID NO: 48522 - DNA, 3025 bp, Cannabis sativa
aaaaataattttaatatttttaattttctacttttagtagtatacattcttctattttttattttttttaaacttttggtcttttttttagaagagaaaataagtgtttattaaagattttttaggaccactactaaattgtatcttttttttaagaattatctttgaactaattctattgttaaatataaatgaattatgttagattttatcgcatatggttaacaaaatgctcagatcgtattcaatgagaaatataaaaattgtgttatattttatacaaatatttagtttgtgatatatttatattaatttttagtattgtactcaaatacacaattataaaattcaactcatgcaaatttatgttcaattaatacttctattaaaatacaaaaaaaaaatatttatcaataattctagtattatcttataattatctaaaacaataaaaaagaatgtaaatagtttaatattaatataacgttatggtcgatagctatatatattaataaaatattaaaaaatagtgtatgtatagtgatataaattttagattatgctatattgtattttaaatttagtataatttttttaatgtatcaattttggcacaactttttaaatagtgttgaagcaaattttttgcaagataaactatactcataatctatttgatgcatcaccgagatacacttgtgcaactctttaatggatgatgtatgatcattatcatgtgagtgccacgctaataaccatatgataattatatatttttttgaatatattaagtgaagtttattttactattaagtacattacatgactcatgctatactgaattaagactcaaccatggcagaaagtggagttggagtcatattacttagtagcagtacaagctattcgaaatttattatctatatttttttttcttttgaggttattatagaagattatcgtaaacttcttctatctttaaacaatgtttccttgttttttattaatgatggttgctcataattttgctggagcatattgttcttttctaatttgagtgttcaacaaaagcgatgtttctgttgaggaagaatcttatcttttaactgatttaataaattaataaaaattatatatttacttccaaaaagttacgtacgtgttgttccaactagtaggaaaaaagagacaaatgagaagggttggaagatttatttgattgggcatatctatatccaattatggtgggatttgatttaataaatatatgagtatgcattcaaaaaatagaaaataatattaggaataatgccttgaagcaactatagttaacaataattttaacgaaataaattgaactattgtgtatatatagcttataatctaaattataatttgaaatttcatttaaatactttattaacttgatagaaaaatatcataattaattatctccctttatttttcctactttattgaaattttttctacctagtgaaaactaccaaaattaacctattaaatttgaatagttctaattgttacttgaaataattaattgagtctatccagattaattaattgaagacaatgtgggaaatataggcccaaaaattcaaactctaataagtttatcgtaaatttactagtttattattttcttgtatctcatatagattcagaattgtactcttaaattcacaaaacgctttatagccaatatagatattgttgactcaaaaatctggactagacttctaagccacacccactcgaatatttgcttagtaattataagagagacacaataaatttataatagttcactccctatatcgtggctataatggagctaggtttacttcgagtttttttatttctcacgagatggtattacaaaaaaaggctaagtgtcagaagctccaatttctaacaaccattgattaaagattccataactttaatatgttgttgactgttttatttatagctaattagttctctgtacagctataagtcacaacaccttatatgaataaaaattatttatatataaattatccaataatatatattaataatttgacattcatgcatatttctaaatgttcaactctttattaataattagaaatatctttataggctttttagggcataaaccctaacaatctctcacttaccctaaaagcaaactaggcatttcccttaatctcatattagttatatgacccataaaagatttcgctagtaaggtctttgtgaacggacttgcaagcttatgttccgatgcgatctttaagaccgtcacatcacctatctctactatagctcttagtagatggtacttcctctcaatgtgcttccttctcttttggctcattggttccttagagttggccaccactccattgttgtcatagcagaacaccaatggtttttctacttctggaactacttctagagttgtgtagaatttcttcaatcaaactacttccttagttgcttcgcaagctgatatacattcagcttccatgattgaatttgcaatactggtttacttaatgctttttagactacaactcatccactaagagtaaatactgacccagatgtcaactttcgactatctttgtctgattgataacgactgaaattagaatcagtatctctagtaggattcaactctccaccggaatatacaagcatgagatctttcgttcttcgaaaatacttgagaatgtgctttacaactatctagtgttctaaacctagattagattgataatgactaacaatccctacagcgtagcatatgttgggccttgtacacaatattgcatacatcaagctcctaactactaatgcataggggtactttttcatgtcttattccccttgagaagtctttggacattgatccttacatagcgtaattttatgtttgaacggtaactgtcctttcttggaattctccattgagaatctttctagcatcttattaatataagttgcttgagaaagt

SEQ ID NO: 48523 - DNA, 3898 bp, Cannabis sativa
  modified_base (3696)..(3717): a, c, t, g, unknown or other
agagagagagagagagaggttgggcaatttggggtttgggggtttcaaaaacccataaatttgtttctcttttattggctaaaaaattggttttaatgaaaataaaaatatttggccgaaagactattttgtcctgaaggcacacacataagcataaataacatataagggcaatttttcatttcccactcacatacatatatcacataattaatattttcacatttaacacaaacaagccataactaaatcccaaaaatgtatttttggaccccgaacacagttcggcctaaaatacccggttgtgactataccctgttgacttatcagaaatcatcttcaaaagaaaaaacaaacatactatacaataatgtattcgataagcacaatataccgtaaaattacgatatttaccctttttaggtaaaaattacaaaatcgccctcgacacaaaaatggggtcctaaaatgcaattaatatcagtaattccagatattaaatcatataaaaatataatttctcattaatacttaattaacttagttagggttgctaaaccggttactaaactttagggtattataattattttgtcccgaaatttacctgaacaattctggatatttctgttacatatctatctctcttctgtctagtatctgcactggttgctcctcgtatgagtggtccggttgaagttccaatgcttcataactctattcatgagatgagtttgacacatatttttgaagcatcaaaacagaaaacacatcatgtacaactgccagtgcttggggcatagccagcctgtacgctactttccctatcctctccaagatctcaaaaggtccaatgaacctcgacctaagtttccctctcttaccaatgtttataataccattcatagtagatattagaagaataccatatctttgatttgaaaatcaatatctcccccctttttatcagcattgcttttctatctactttgagctacaaccatacacgctctaatcttgtcaattgcctcacttgttctctgaacaacctcgggaccaaaaaactttcttttgcctacttcatcccactgaataggtgatctgcatttccttctacaaagtagttcataaggagccatcctgattgttggttgatagctgttgttgtacgagaactcgatcaggggaaggtactttaaccataatccttcaaagtgtaatacagatgcccgtagcatgtcttctaaaatttgaatggttctttcggattgtccatctatttgaggatggaatgttttactgaactttaattgtgtacccatagctcggcgtaggctctctcagaatcttgatgtgaacttcagatccctatcagatacggtggactttgggacaccatggagatgaaatatctctctaaaatatagttctgcatattgatcaatggacaagtttgtctgaacaggtagaaagtgcactgattttgtaaacctctcaactatgacccacacaaagccatactaccttgtagtcctaggtaattcaagtacaaagtccatggtaatgtcttgccatttccattttgaaagattcacttgctgcacaaacctacgagcctttggtgttcagcttttacttgctgacatgttaaacactttgcaacatattttgctatatcattcttcattccaggccaccagtacatagacttgaggtcttgacacattttagttgtccctaggtgaatagagtaaggagtcgtatgagactcattctgaatttccctcttgatatcataatccataagaacacaaatacggttcataaaccgtaacataccattgttatccactgtaaaatcattggtcttcccagctcaaatcttatcttgaggcttcactaagtcaaggtcttgaagtgtccttctttaattctttccaagaggtagactgcaaagtaatgttagctaactttcccatgataaactcgatgttagctcaggtcatatcatctgcgagttgtttggagatttacttcattgtattcatatggctttgacccttcctacttagggaataaactacaacattgggctccctaggatgataaaggatttcacagtcttaatcctttatcaactcgacccaacgtctttgtctcatgttcatgtctttttaggtgaagaagtattttagacttttatggttagtgtaaatctcacatttcttgtcatataagtaatgtcgccaaatctttagcacaaatactactgctacgagctctagattgtgagtagggaaaccactgttcgtacacttttaactttcgagaagcataagctatcacctttccagcttgcataagtacactgcctagaccttgtcttgaagcataacaaaattttccttgtcagaaggaagagttaatactggaacagtaattaaacgttgctttaactcctagaaacttttctcgcactgatccgtctaattaaacttcaaattcttttgggtaaattctgctaaaggtgttgctgtaataccctaaaattaagaaatcggattagcaaaccctaactagttaaatgtttattaatgagaaattatattattatataatttaatctatgaattatactgataagtgacattttaagaccccattggtgtactaggggtatttttttaattttgacctgagaagggtgatatattgtgcttgtaaactatattattatctagtatgtttattctgtttatctggaggtgttttctgacaaaccggcgcggtatagtcatacccaggtattttggggcgaactaggttcggggcccaaaatacacttttggaattttattttggcataatttggataaatgagaaatctaaaatttatatgttatgtgtgtgtgtgatgaaatgacaagtttgcccttgatgagtgagtaattattttggccttggaaggccttctggtcattttaccatatgtgatatatttactaaaatgaatttttgttaattgagaaaaacctattttccgatttctaagccttgaccaacccctctttctccttcaccttctcttccattttctaaatcaaatttgaacttgaaatcaaagcttgaattggtggtatttgtggcttgaagcttttggaatttaacgtaagcctctagttcttctcttgctgagtttaagggttgataactaaagcttaaaaagcatgttgttgttttttttttatgttcttgaatgcatgtgtgtgagaattgaatgaactgtattgttctatgcatgattgtgtgggtaggattgtaaggtgtgcatctttattgttgttggcaagttttggatgattatagaatgtgtaattttaggtttcactttgatttctgaaatggaagttttcgcttggaatctttgagtttcgtgcatgaatttttgagtttagaatgtgtagacagagcattttgttgggctttgtgccctaaataaaactccgtttgaaagtaatcttttctatacaattatcaataaagaaacaaatttattttcattacatatttagtgtgttatttggttcatttgataatttattcgtttatttgatttataaatttatccaaatccttatcacattgatattgttgtttattgtattgtcaacacagtagaaagtaatcaagattgtnnnnnnnnnnnnnnnnnnnnnntttatcagtacacagggtttaacagataggataatctacaatgtagtttgcttgcaccttggataagttatgtgtcttttcctgggcattggttacagtaagctttggttggatgtatggagtatgcatcagaatggatcgatattgaacttgaatcagatatgataaacttactgtaata

SEQ ID NO: 48524 - DNA, 2875 bp, Cannabis sativa
  modified_base (1057)..(1070): a, c, t, g, unknown or other
  modified_base (1210)..(1212): a, c, t, g, unknown or other
tttttgaactccagtggattttcagtagggattccttcatgtcgttggcaattttgggtttccctccccaacaatgaggcctttattctatagttttaggactccctcctcagtggtgcaatcttggctggatgatgatcctttcgtcgttgaggggttcaaggccgcctagttgtgcaattttgtaatgttcatgcctctagccttgggcatttacatcaacagatttacgactcttatacacgggtacgtcactttggctactttctggaatgaagactagccttacaaaccaacacgagtactctttccagtatactttttcctcacttgcatgcttcctaagaactcacccatcatgagattactctagatcaagcacggttaactttcgagttctcaagtaatgggctaccgaaaagaagatgcatctcattggcataggtacgtagtacccatcaatcaattttagccatctgcaactgtgtagtctcatacctacacagttttaaaatcatcacacttgacattcctaacgatgtaagattacatagcctatactcaattttccttacagatcacgagattttgactattacaggtttggtgtctttgtgggggcttctggcggctaagtttggtggttgtcggtgggtctgtcacccttggctagttgaaggtgttgacagtgtggctattgctaatgatgcagaaactggttggtgtttgatgggggtctgctctcgaaaatgtctttcatcctcgatcttgacttcggcataccatttgggtccatgttggcgtttgccaatcttgggcattctttgaagattgatattggaaagaggaggttgcaagtttttcccgactcccaagggtaatgcaccctcgtgttcttccgtcattttcttggtcattttgtttggatatttatggtttttagtcgtaatttgtaattgttttggtttaggctttgtttggtcatctccttatgaaatcagtgcggctaaatttgcctaactttttaaaatcaattttttcatttttacattttaannnnnnnnnnnnnnttttttttttacatttttacataattccagacagaaacccctatagaaactaacgatcaacttaaatcgcaaccaaaatttgtatagcaacccacatagaaaccgttgaagtaatccaaaccgtaaatttttaaaaaaannnttaaaaaaaaatagtatatgaaataattactcaaaattttatcaccttaaactattgaatttactctctcattcaaaaaaagaaaaaaggaagatatatatattgatatatatataatgatattaaagaaaagataattaacacgatcgattttccacaaaactattaaagattattaatgaggattattaacacaatattggactttatcaattcatcaaattaacttgcactcttatttttgtttaatttatttgtcttggccttatttatacaatcaaatttcaaacacatttattcttggaataaaaattgaatatgttattttaattggatgtagggaaatgaaatagtgaagggaaaataacacatttatggaagttgttatttttcttttcgaatttctttcttttttatttttgaataattatggaagttgttgttagttggtctataatacaatttaaaaaagcttttcttcattttgattaaattattctagtttgttctctgaaaaaaaataataatatattcttctcataagtttatatgattattgctattaaacattagtggtgcctagcactacttagaagtaatatccgattggttagcgataccttaaattatatgagactcaatacttaattgcactaacaacgatatgatacataaacactactgataccttttagcatttctcattaaactactcatctaattttgaaaattgctaagtggtacattagagagcatctttaatggagagctataaatgtaatgtattgcctttttttaaaatattttactaaaatttatgccaaatttaacctaagctaaaaattatatcaaatttagcataaaaagtagcataaactgaattttagcacacaaaaataccacatttttaattacatttttgttactcattaatactcttcattaataaaaaagtacttttatatttataagatattaaaataatataaataaaattaattattctgtatattttcaatgagcattaatagtattgaattttatagttaatttgcaccttgtggaagcacaaatacaaaaattgagtcaaatactagtgtatttcaagctaaatttaatccaaaacatacactatccattgaagattgtcgttaggtgccaaacactacaagaaatgacataccgctgtcaatgtaattcaatatcatatctatataaataatataagaaatcgctaaccgctcacaacacatcacatcaatatagtgttggacagattaacgtgtctaatatcaatactcttatacatttaaatttaaaatataataatatgtaaatcctgttattaaattacaccaattataatttaccactacattgatactatgaacttatacaaaaataactatatacaatgtgtacaaaatatataagccatagcataatatacaaaagaaaacacatccaaatcttataagtatacaaatagataatatagcctcaaaacaaaaaaaaagacagaactactacttcattattctctggtcagtaaataaatatgaaatcaccctactcagcttcaaatatacatacatgaatttccaagaaaaaatgaaagaaaagtggtcagattttacaaaggagaggctcatagtcacatttg

SEQ ID NO: 48525 - DNA, 1689 bp, Cannabis sativa
aatttacctattatactgaactataccaattattttctgtttttacctttgtttttttaaattttcaattctataaatttttatttacattaatatcactttattaacttttaaaattatcacttttacgttttgttgctaccctatcaaaaaaaaaaaaaaaactgtcttcttcctcctcttcagatctcctcctcccatccctcgcctctacctggaaaccaccattattaaaccccaaaatctctcactctcattcatgtgtatatatacatctatcacttggaatcattagtaaatgtttgtaacgtcgtccattttatttctgataagagatttgctgtctgattataatactaagaacttttgtctgtctagctaggtgatattattataataagaggtttgaatcttgctatatagcttgctaaaatatttggagtataataatattgttgagaccgaattggtatgaataaaatttaaaatttacagtgaaattgaaaaaaaaaaaaaccaaaaccagaataggacacaatgttgtatttaatttatttatactacagatatatataatatatagatatttcattattggggtttgaatttaaaattgataattaatgaaaaataataatcaaccagtagtacaaaggccactactgttcatgagtcgcaaaaggtttgcagtcctttgaatttgaactatttctcatgaaattaaagttgcccaagctcgatcgagctcaacttccatagtatatatacaatatgtatagtccacacactaacgaaacaaattataatacataggactacatataaattaattgccttgttcaacattaattagtacatttggtttttgatcatatcatatatatatatatatattaaaaagtagaaaaaaaagagtgaaataatttgtaaagctagctagcgctgtatgtataacttcgaatccgaaattctgactccatatatataaataatatataaatcttgaatatagttgaattaattggttggaaataaaaaagactaagaatttgatgaagagagacgtgtagtgtagtactcctcatttttcaagattctatgttctaaacatagaacaaagaatatatatattattaatatcacttaattaatggaactgtaaagaattatctatatcaatatagtagtcatgactctttcatttccaccaaatttcttttgttttttcttggatgtttcctctcattaattaattaatattagcatatatgtatatatacgtaccaaccacagagaataactattatattttggaacattaattatataactagtttttatatatagctattatatattttaattctgtaaataattattgttagttatgtaaatgttatatataaaaagtaaattaagtaattcaatgtatatacgctgactaaatcacaacacatgcaaaatgaattatttatctattttatatataggactaattaaagccaattaatttacatcaggttggttggctgttgataacaaatcatacggattagtacccaattcgatcgttttcttgattaatatatgggtaaataccattttggaccatgtgttttgcaaaagttacagattggaccctgcattttgttaaatgacaaaatggaccctatattttctaaaatggta

SEQ ID NO: 48526 - DNA, 991 bp, Cannabis sativa
  modified_base (26)..(41): a, c, t, g, unknown or other
  modified_base (898)..(913): a, c, t, g, unknown or other
ataaaatgatttctgatctttattannnnnnnnnnnnnnnnatattaaaatgggttttatttaggacacaaaactcaacagtttcatcatacatgaattcagaaaagagctaagtttccatcacttttcagttatggccttttcacggtatgtcgtgcaaaggtagccaaaaattaaatagctatatgaccatcactcttcagcgatggcccttgtgcggtatgtcgcgcaggagtagcccaaacgtggtttcaaaagcatactctgatttgtgagctttttttacacaaaagtgtacattgcacagcaacaacacatatttaagagtaattaatgaataaaaatggtatttcaattcaatattgtgtcaaacaacttactaacaagataagttcttaaagttattctttattctttagttccacttgcgtaaaaacatgtccctccaaaaaaatacataggcaatgtctatagtacttggtgaattgcaagtgacaaagagactgtaagtttgctcgatcactttcggggcacccacacttacaacattgaacaagcacatatatacttaggccaaaaaatttaaagctttgctaaagctagaaattaatggataagtaagtgcatccgggcacgcttcaaggtgaacataaaacgcataaacttgggattaaaggctcctagtaagctacatgttcaaaaagtcgaaagaagataaagttaggattaaagaccgcttggtcaatcatttatttgaaagtaaagggccttaaggccataatacaagagaaaaaattggttcaaatgcataagaccagtgccatgcaagaaccatgcaaccagagaagaaccggacagaattcctatgggaactaatgttggaatatgttttaccagnnnnnnnnnnnnnnnncaagtatgttattaacatcctaaacatgaacatatgaaataaacacataaagtttcaggaaccttacagtggttgcag

SEQ ID NO: 48527 - DNA, 947 bp, Cannabis sativa
tttttgtaaatggcatgatttgcctatctccttgattttgttattttgaatgatatatcatcataaaatagattattatatatccaatttgtctattaatcaaaatttccatttttctcaagaaaaaaaaaatctaaatattacatattcaagtgtggttcacaattgtgcaaatatcactactcaaatagtttttaattatttgaataaaaaatttctatcctcaaataatttgaggattgatgaagatttttattcaagttgttatgaaggtttttttataaatttattaaaataattttagtttatttttcaaaaaaggacactagttgtcacaagatacacgtgtggtaagtgaaaggaagagttcatattagtgttgggtcgtaatcaacaacttttttattacaacttgtgttgtactatgatatttatttagtgaaaattacaccatttaccatttgtatttataaaagtatggggaaaagtctataataccctaaaaaaagagtatagaaaatatttgtagtagtacccaaaagaaacgcgtatattataattattcaaaataatatataaatttttaaaacactctaaatagtttatactaaaaataaaatttaaatgtttttattgtacgggtgctatatatatgttttcttatatatgtagtaagtaacgtctattatactttatttttagcaatataaactactaaatttataagtagatttaaataactacaaagtaaacaatcatcaaaataattaaattaaaaagttctactctttatcgaaataaatagaaaatgtacctaaactttcttttagaggtgtgctatagactattacccaaaaaaaaatattatatgtatacctaaactgtattttgtgctaaatcaatagaaaatttaatgtttctcgtttctaaatcaatagctatcgaag

SEQ ID NO: 48528 - DNA, 3712 bp, Cannabis sativa
cttggttcactccttaattttctcataaccatgagaaaacagaaagttccttgatctgactatgtgccactttgttctttaccgttaattgaatcttggctgtttgagtcagtggtgcttgaaatactagaatgtgctagtccatcaactcttgctaagtttatattagttttggaagggatttatcttttatactgtaattgtaattgtattataagtatttgatgctttaagttggtttttatctaacatttggtgtatgggatgtttcaatatccagttacagctgtatttcaaaaccaagccaccagaggggagcaagcctccacctgctcctgctgcaaacggtacaggtgctcctggtgttccgtcaaggcctttgcctccaccacctccacctccacaaaatcaagcacctggtgcaccaatgggaaatcctcctagagcccccccacctggatccttgccaccaccaccacctcctcctatggcaaatggcccgcagcctatgcctcctggtggagctccacctgcacctcctctgccccctgccggtaacccaatgccaaattttggttttggaggccaacaaatgccaaaccagggtattcgcttgcctccaccgcctcccaacatgggacagcagatgtctaggcctccagcatcgcaatagtcttccaaatacctctagaggtcatgcaatttcgagatcactgttttgcaaattatgtcatttaatcatgcattctgatttctgtttactacaagatgcaaagtaatgtttatcctgttgttctcatcaaactagacgttatatcagtaattttttgcgagagctacattagtacataagctttatacttggctaatattctttcccactaactaaccgtgaaatgattacaaagaaaataaaattacgatttactaatgtgctgttagaacatactaataacatgccatgaattagaagttgataagtaatatcttatgttactcaacaaaatgtctgaggcttaacctgtttcgtccaataaattgaaatggggcttttctaatcacgattcttaaatggcggaataaataatcacagtaacacaatttgcaattttaaagcatgaaatgagtgggatgattattaaagaaaaaatctcaagagggaatataatagaatacaaaaaagaaagaaaaaaaattaatttgatacagctgtagaagggaaaatcttcttgatgaattctaagaagcgctgggaatagaatgtggggtcaacagcagagattgacaaggaatcaaactgaagagatttgtatgcatgctcaatcttcttagtcatgttgtattcttgcaatatgtcaatgacaccaagatatagcacaacatcatacacctcatgaaacatctgttcttcttctttccctcgaatctgctccgcccttgctggcatgttcacacctagctgaatctggagtctgaattaaacaagttacaataaagggggaaaaaaatcagtctctgttagcattagttgaagagcaaatcatctagtattgtccaacatttccttttcaatggtggctattgacaaaccatatgttcttttcatccattgactagggaatgagtgactaatctctggcattctgaggtttactatacacgtttgatatagcagagaatcataccttgctgtaccaggtaggaggaggtccacttcctcatcaccagcagctgatgctcgcaatctactacctcggatgtgtggacccacaacaacactattatcatcttgtcctcgagggactaaaacaagcccttgtggacagttggcaatatcatcctctaaagtctctgtaatgggaacatcaccggcaagctcttcaagttagtgacaataaaaaacaaagtatctaaacgagtttcagtttttttaaacccttgcaacacaaattttattccgtgaagttttcattaagctgtcttgatgcaatttagttatcaatgcaaaaaatcatgtattggaatatttatggcgttaccttcctctgccagcattcccaatccatctgcccttctgctatgattgaaagaagacagagaccataggtgccgaggtgcacgataatgtactcccaggagaaggctatagtccatgatgcactgagcttccaagaatttactatcagtttcaatctggctgcacaagttatgttgagcaagaaatcaattaaacagccaaaccaatgagctttggaactagaaaatccgtatggacaagctcgcatgttgtaagaggtattgttcacaccacactaatgttcttaaaagtgacaaactttcactaactatgacattcattgagaaatcaaaaccaaactgttattgtaagccaattcttatatgccatagtagcataacaaagcttacaattctaccggacaaaccaaaaaacaaacatctatgcaaataaacagtcctaacttttcacttacctcattaaagcatctctccaagatggttccaaatagaagcagtagttcaaatccaaatccttgagagttgtgttttcatcaatttcaaccttgtctgaagaacgccctaatgatgaaccctttaaatcaaatcttctatgtatccttaactctgtgcagaacatgtttcccatcactacaaaacgaaactgcagagtaaaaattggttatatcatcatcacattatcgaagaagaggtggagttccaactcaaaagagaatataactaatcatatgctcaataccttctgaccgcttgaagctttgattctgtgaaggccaaagaactttgtgattaatgtgttctcatatgtccttacatgatggtgataatcaggaagcatccggaggagaacctatacattgaaagcactgtcaggtgaatataatggcagttcaagaaaagtacatagattaggttctaacacagatgcacaaaccttaacttcagattttcgaagtgttttaatcatgaagcgatcgtcttgagacaggaagaacacgctaccactttttccgggagaagagagttctctgagagcatcatttccacaaatagacatcatgtagtaagcagcatcaattttgaacatctccctcaagttcctacaataattattgacaaaggaatgtgcagtatatcaacaacaatgagaagaaactaaatctgtaaagggtaagaaatgagacgacctagaacataactaaggttagaaacaagttttcttccattgtatagaagtttaatactgttgtaaatgcatcaagcaaaagacaagatgccaaagagcataaataactaacctgaacaccattgggcagtagtctttccatttaaaatcctctgattgatgaggaggtgtcagttgagagccttctctaggaaaactcatccaaaaacttgcccggggaccaaaatctgatgttcgaacttctcgcctttgaatgggtgtaattttccctacagtatatctgaccatattctaatccacgttcaattttaaacttcccaaaacagtgaatggaaaattagatcataaccatgaaaatatccacagatattcattcaataatgtctactctcttgcttttaaaaaaaaatatgacaacatcaaccttaaaggacttcatcctctttctgcttcataccaagatttcaattccaattctacagtttaata

SEQ ID NO: 48529 - DNA, 1800 bp, Cannabis sativa
ggggggggggggtgagctactataaatatctagtgtccatttaatttactgcaattttattagtcaaattaattcaccgtgctcctcttttattttacaatcttcttaggtcagttgacgaaaaaccgtgtcaacagtttgatgctttcattaagagtaccacggtgaaaatctgactattttccccttagaaaactcatccatttacttttttctacaacaatggagtttggtacgagaatgaccaattatgaggaggatactgaagtcccaagagaaattaatcgactccaaagtgaagtacctttgtccctccacaaccttataaagagggaacctctaggcaccgagagacgcgtcccatgacacctatgccagaagatgaggcacaagtctaagattgtgagagttcctcatctccatctatggagcgcccaccagtctatacctgtccataaagtgttccaagaaaatgaaactctgtacgtccaatcggcagagagcttacgccacaacggagagctccaagagcaaaaccaaaggcatggggaccaaccccctatactaagaaatccttctccacctaggagaacaagagggcgcccaaggagagaagatgcacctatgaataatccagcaaggaggggggaccaccatcacctataagctacctcaatcagtgaaatggtaccactccacaagaaccaaggcggtccacctcccgtggtaatgcaccacatgctcaaccacctaagggcataggcgacacactgcacctcgcaaagatcacacccatcaaaggccaacatatcataggaaaaaataagggacacccacaaggcgccaacctgcccaaaaaaatagttatgtgtccaaatcagacgctactttgaagccgtactccaagcgatactctgcgcggctcgcgcactctcctcatcatccataacaacaaagaatagtgagctttaccgaggatagtggtcggtctgacgctaaaagctgctccattgctgttcagaagaatgcaccctacaattatgaacgtcgccacaacaaccgtctcccaagagatgcaagaaggcctaatttgcgagaacacctcaatcaaagacaacctaatttgagggaacatttgaatatatataaaataacaaccataatatcaatgggggacatcaaaataacatcccccaagctggccatgttggggaaggaaaattcaataatcctaggctaaatgctttggaacaattgatacaacaattgatggtggccaataaccaaaatgccagtgggtatgatttagatgaggagccagtgccttactctcctagaatattggccttgccatatctgcaaagattcaagatgtcgaccacaaccaagtatgatggaagtacgaatcatggggtacacataagtgacttccacacttatgcgtgcccaccaagtgattgatgacttgagatgtgagttacttcctgtaacacttattggagcagccaagacttggttcaaaaaatttaagagtcactccattacctcatgggaccatttctcacatgactttaagaaggaattccacaccgccaaggctaaaaattagaatgttcatcccttgccattgtgaagcaacaactgggcaagagcttaaaagcttatatcaactattttaatgctgaggccgccaaggccagagacgttgtgatatgatgttggcctaatgcgtataagagtcgcagcatataaaatagcatgtccccaagctaaaattgggagttttgttctcataagtaa

SEQ ID NO: 48530 - DNA, 1695 bp, Cannabis sativa
attaccctacacaaccaaacacagtttacacatttctctataatcatattctccttcataatatttcctataatcaaattattttaaacacctcataccaaaaggcctcttactataattatgtgatgtggcccaataaattatactatgtacggtcacaatagtaaatgtgcttgtcatgtcagcaaaatacactaaaaaaaagtcagctaaactaaaatagataagtaaatgactaaatattataggcaatgggaacaagaataagaaaataaaattttgtaaaagtaattgaattagaaaaagtaatgagataaagattcacttatgtttttgtatcttacatgcaaaatgattctaaataaagttcactctatatttatttttgaatattaactccttacaagattattaatatacaatatttaaaaactgataaaatactgctcatagtaattttttagtaaaagagaatcatatataaaaatgctaataataacaaaatattaaattatataagtagagcatgattaatacttatataaaatatggcataataatactttatagaataacgagaagaaaaaaatgaagaccacttgaataaattcaaaatgtagacattatcggaggaagaagctgagttgaatgagaaattatccttagcttggagatgtaaagaagatatgtggtgccagaagtccagggatatatggctgaaattgggagatagaaattcccgatttttcccatgcctcagttgcagttcggaaaagaaggaatcatatatgggggttgagagacaaacaagacgttctatgggaatcgagaggtaaaatggaaggaattataaactcttatttcaatgaaattttctcttccatcgattcgaagttctctgataattttgacagcctatttcaaaatcaaattagccatgaagtgaatgaggagttaactgccttaccctcaccagaggaaatacgaggagcagtttttgaaatgcatccgctcaaggccccaggtcccgatgggttttcgagttgcttctatagaaagtattgggagatcattggtccgttggttattgattcaactcaggaattctttcgcacgtgaataatgaatactcaggtgaaccacacattcatttgccttattcccaaggtagatcaccctgagagaattgaccaattcaggcctataagtctctgcaactttcaatacaagataatagcaaagatcttttccaatagacttcgcacgattatggaggatctagtgtctccggtgcagtcagcattcattcctgggaggtggatcgcagaaacttcaatcttaactcaggaactagtgcataaaattcgtcgatcgaaggggaaaggaggactcatggccattaaattggatatgcacaaggcctatgataaaatggagtggagatttcttgacagagtactcatgaagaatggtttcaatgaaaaggttagaagccttattatgacttgtgttacgggggtttcttattcggtgttactcaacggaagcccattgaagaagtttgctcctttaagaggcctccgtcaaggggaccctttatccccgtttctttttctgctgtgtcaggaggttttatcaaagctaattttacaagcggaaggacaaggaagaatacatgggattaagattgctaga

SEQ ID NO: 48531 - DNA, 1235 bp, Cannabis sativa
  modified_base (60)..(60): a, c, t, g, unknown or other
  modified_base (1206)..(1209): a, c, t, g, unknown or other
gagccttcatcccccctgcggcgaatagccttcggtattggagttcgggcttcctcgctntctcaactctctttagatggaataactatatatttaaaattaggtaaataatattttagattatatattttataaaaattacaaattaaataataaataacaatttatgtattttttaaaataatataaaatagatcttaaaagtcaatttttatctattctttttaattaatataacaacatgaaaccagtttctagtacgaataattacaaatagtataattattctcatcgtaatacctttaaatcaagttattataaagttttaatttgacgaaaaattaagttcatgatctattttgtactactttaaaaattaaagggtttgaattgtcaattaaccaaacaaaaaaattcactctgttaacttttgtaaaatagaggattcaaaaaagaaattttatttgcaccacaaaaacgtataagtgcattccatttctataatatttattttacataatatatatttaattacattagttatttttaatttttttcttccaattcatattcttaaaaatatacttattaaataaaaataaattatattttaaatatcataaaaaaaatttaaaataaaaatttatatgaaattttattagaaaagaaaaaggtatacatgatttaaaataaattataaaaataaaaataaaaataaaataagtattgataaaaaataataaaaatttaaaaaataataaagagtaatttttaaaaattatttgaagtaatttttttaatattaaactttatttattatgggtacaaataaaattcccaataatagtacttatttgctaaacatattttaccttaaaacttactaaatgtagctaaaaaatattactgtagctctaagtggtatgactgttagagctttttctcttttatgacctatagtacatttttgacagtacattatatattgccaaagatatactatttattttttttatttaattaaatttaagtcatcttttggggttcatatggtttaatgtatttataactaagcacatatgtatcttgagagaaagagcgtgtatatattaaccttatttttttgttatgagaacgtggtttctttgtgttgtacaataaattggtgctttattgtttcgtgttgttgttgcttttttttttttnnnntttgctttttttttttttttaaaaaa

SEQ ID NO: 48532 - DNA, 2233 bp, Cannabis sativa
gtttataatattattttgatgctctctctattagttgttgctgttttatactgttttttgtgtggaattggttgttttacaagttttctacatttttttggtttctggtttttttttttttttagtccggtgggagtgtgatggtggcctgatggttagtttagattggaggttagggaagatgtctatataggttcgatggtatgtctgatataggcctgataggttaaggtggtccaatatatataagacctatggttggttcgatgtacaataagaatgtggtttagtggtcaggtttgatggtgtccgattgttatttgttgaaattgatcatatgtggttcgatgttggtctgatgtggtccgacgttgtccaatgcttgactgatttatggcttttatagagaacttttttttatcaattttctcttaaatttttgttctaaaattttaattgtgttttttaatgtccgtggatgataagttcaactatttttgcattcattatgtataatggtgtttgggatcttgagggtagaaattgggtttataatcgagctataaatttgacattcgagattgatatgaatgtaagctactcacgtttgattgatcttttgtacgaaaaactcgatgttgacaaagggtagtatgacttgaaattgaaagtgaattataagtacatgaaaggcttaatgtatcaccttgaagtaattgaaaatgataagcgtctaaggttatttttggctatgcttgtgtagaagctagatgaatttactctcctgtttgtgactttggtgaagaagaatatatgtatcggtcctagtcccacgccaaatactattaaagatactcatagcgaggttgggacttttgttccaaaaaaatttagaggtgttggtggccgatgtgttgcctgaattaaatactatgatgtcgacagctaacattgtagcacgaatgatgagtttggtgatggtctagaccctgaatagaattttgaaggcaatgatgatgtaagagacaaccaaaatataaaagtctctgatgctgtagctttgaacctactccactattgtaccaaagacccaagcaacaaactcatagaagaccccgtagagaagatcgtcaaatacctagtactagtagtattcatctagacaaaaccagtaacgctagaagaactactaatgctagaaggaccactgatagtagaagtcctactgatgctagaggaacctgttgacggtaagaacttatcaacaaaataacaaaaacttaaaatgatatttaaatagtgaactaaatatataacacaaacttaatttttgtgtcaaatttaacacaaaatttacatttggtctaaaatattagtaaattgtattaccttacactaatttaaaaaaaaaaaaaaaaaaaaacaaacaaacaaacttttcctatatttttatttacaaaatttaagaaaatataatatttggtgccacaccaaggtacgactttttggctacaaatgaatctagtaatcagtttttaataatatatacttaatatataattcaaaatctagttcttttcattgtagagcttatattaatagtggctgagtcaagttccactcttcaatatttgactcaaaatattgacaatattattcaattaattatctgcattaaaaacagctgatgaagatgatgaagaaagaatatacatatagtcatgatattactgtaatgacgtttgcctgttttttcattctttgaattatcaaacgtttgactataacataacaaagtctctttcaccaattgagaattgggatttcacatctgcaagagccacatataattttttatgttgttgttaaacaattttaaggcgcgtccaaaataatattaggcgtcgtaatatctaataacaatatgacacttattttattataaatcaccgcatttgtaatttagtcgtggaaatttataatttgtaatatgaggttgagggaattcgaactaactcggagtaattattatattttattatatttgtaccttattttaatattgttcttatatattttgtgctttgtttttgtctctctcattgtgaagaggtttgattctcttttcttaccgtaagtgtatattgaatttaagattgtgaatagatttgagaattgttacaatattcaatgatactaatcattgtaaacatctattaatgagttaagaaaa

SEQ ID NO: 48533 - DNA, 2076 bp, Cannabis sativa
  modified_base (1779)..(1781): a, c, t, g, unknown or other
aactacagaaaactgttttcagtaccagtttgattattccgcatttaattaatcatttaattaaataatcaaactgggaatattaaaatacggaatttcagagatgaatcttgcttcgaatagcttagacattaatcagactatcagactctggctcgatagtgtgccagttatgactttttatccagcttaaggcttccttaattccaacaatctccgccacttcaggtgtaacggttccaggattacagccaactttggtgtcaataagaatacctgagttgttccttgcaaccatgccataactatatttgttttcactaacaaacatagcagcatcaacattaatctttatatatacactatattttcatacaaagaaaaagtctttatatgtatcacaaccctacctattatatttcattcgcaacatttataccatatattattttttttaactttttttttaaatgtacgcagtacggtttatatttctaaagtgattgcagcgctacttgtaataaaagttcctatatgattttttgttacaattgaggttgcaccgctagttgcaataggagtttttatgtaaaattctgtaaaaatatatatataaaaaaaataaaaaaataaaaactgatttagagtataaaaatgagaaaaccttttttttaccgtagtttaaatgcttttttttcagtttgaatttattattagttgttattttcttttatatgttttcaataatagtttacaaagaatcagtattatatttcctaaagatcgtttcagtacactgtctagatatttcaacatttagatagtttttttatttttattatgatcggcgtatgttataatattttattttaagatcacttgtaaatttttcagacaattctaaatagtttatagtaccgaaataaaaattaaaatagttacttatggtacatataaaaaataaattatgcatatttaaatatttttgcaagtctcaagttcatatttttttcgtgtgttatgtcgtgttcttgcttcttagtattaatcatattaaatacaatttttaacatctatcaaatttaacacgtttttttaaaaaccttattaaactggtacgtttttaaaatatgctaaaatataatcatacactacttataaaacactctaatgctatgcttatttaacaggcatgcctaatcatgtgtaattgttgttgttaatcaatcatgttccttaatcctttcaaaaaaaaattgtatctcatgtagctttttcgatcactagtaaagttatttatacaattcgtaatccaactctaattaatttggattaaatgaatttggtaaaaataatatagtcaatccgagtcgtttataattctttggtctagttctagttttaaaattgaggagtgttagggaaactctcttttgtactctcttttacactctcttcctaattgagtgacatgtgtagctttctaaattatgtttaaaaatagttacaaatatgccctcatttagtttttattaatgataattaaaatgagtcatctcatttactttttttattttttaaaactaataatgaatttatttatttttactgataattaaaatgtctgattctatttacttgtttgtttattttttagataataaaataacttaattaaaatttatttttttaattaaaatttcatttttttaatagataataatatgtatcacaatgaatcattcttttaatttcttttataataaatattggctattnnntttataaaaaatggaaaaatatttgttttttcataaattttgcaccaatttttttattattttctttcttatttttttttttacttcgtatcattcttttaaaaaaaatcatgtttttttatttttttttacattcctttaaattgttcttaaatttttctctaatcgaatatatatatatttatatatatataatctatgttaaatcaattagttttttttgcctattcatgagaagaatttttttttacttaaaaaaataaaataaaaggaaatcgatctaacatatattatt

SEQ ID NO: 48534 - DNA, 1448 bp, Cannabis sativa
  modified_base (1388)..(1410): a, c, t, g, unknown or other
tgatgtataatttgtgagtaaaataagtatgaacagttatgattggtggggaaatcataaagcatatttaaatggataaaccaaataattagctctctatctagcttgtgctagtgggatgttagttgaagctgacagcatgaaattaaaatgatttgtcttatgagcttttaattctattgtgtcaaacttaattatggttgcaaatttattagggattaatataataatgcatttgacttacaacttagaggagtttataaaggaaataataatttcagtgaacactagtttacatattcatacctcactatttccactttgatctcttttaaacttttccaaaaggaattgtttttattattattattattattattattatgtcaatttggaaaagtttcatttcttactagacatgatgagattctagctcttggtaagaatctaacttgtgtacttagtgggcagattttatagctaatttggtgattgagtccattcctccatatgaaaactcatttttgaaagtgcaaggtggtgtatgtaaaatgcttattggcaatttaattttacataaaataaatatttgattttttgtatatattcaaaaattaaattttttctttcctgaaataatgagctggaattaatttgaaattgtgtatatcaattatttattacttaatcattaattggattatataatttatatatggtatattcattttaataagaattaatgcttttaattcaataaaataaaatcacatatgtatttttagctaatcaatattgatttcaggtgctttaaaggggatttattatcttatctcgttttggaaacaaataatcttttatgattaataaaatatagaataattcaacagtttaagaattctatttttggaaactttccttaattccttttgcttgttttcaattgttgtcttcacgacttggtgtgtattattattcagttataaattcaagtatttacaaacctatttcatctcttgaacactttgaccttttatattacagagtatgatcaacatctgaacttaaattttcctttaggtaataacaaaaagattacatagttttttacactttcttgagtattgccttaaaatgtgtggacaattaatcaatcactcaagttcgaaaattctaagaagaagaagagaattcaaaaaatataaagctctttttgattttctattggtctgacaaagtgagtcaatagtattctaaaaaataaaaactatcatattctatttattttgtaactttagagttaggtttagaatttaaaatagaattaaaaaaagataaaaatagttttatttaaagggattatttcacaaaaacataaaaacaacaannnnnnnnnnnnnnnnnnnnnnnacggaattttaaatatttttacgtttttttttatttta

SEQ ID NO: 48535 - DNA, 1285 bp, Cannabis sativa
  modified_base (624)..(625): a, c, t, g, unknown or other
tgtagaacagagagaagcagagaggaaaaacaaatgaaagagctcaatctcttattatgaacatgtaccagtatttatacagaagaggaaaagaaataacaaacattacaactgaaaggaaacggctaaaacagaattaactaattattaaccacagtaacagtaaactaactatgattagtgaactatgttaacacctttgtctaacgacgactaataattaattagttagctatataatatttttagaatcaattatttatttccataaataactaattttaattaccaattatgcatagtatatatagtttactataataagtacaaatggagtaactgagtaaggccggcttattaagttcagagacaaattagttgatcaatttgactaagatctcaatttaacaaataaattatcacaaaatgaggtttggattatctcatatatatttttttaagaaatttaaccttaatttatttttttcgaacattaaaattaactaatttaaattgattgcccaagtcattctacctttgtactttttggactcgttagtatgctttattgtattgtattgtattagcattatttaatataatactatatttggtattgacttnnattaatagattgtgtaaagttatattatattttcaatatactcgacccaacacagactacgagttcgggttcaagtcctgggtcacgagtctcgggacccgggtctaggtcgtgggtctcgggtctagggtccgggtcgtgggtctaggtccagatccgggtccgggtgcggatccgggctcaggtctggctcctaggtccaagttcaggtttaggttccaagtctaagtccgggtctaggtccgagtcccaagtcttggttcgggtctgagttcgggtccgggtctcgggtcgcagttctcaagtctgggtctgggtccgatcccgggtccaagtctaggtcccgatctgggtctcgcgtccgggtctgggtctaggtctcgggttcaagtttgggtcctggtctcgggtcaagatccgggtttgggtccggggtctgggtctgggtcccgagtttgggtccgggtccctgatttaggtcaaggtcccaagtccgggtctgggttccaggtccgagtcccgagtccgggtccgggtcttgagtctaggtctaggtctcgagttcggatccgggtcctgagtgtgacagtcagtagtcccgtgatccgtaaagggaaataccaggtaagctgtgcaatcccacatcgcctggggaaggtc

SEQ ID NO: 48536 - DNA, 1267 bp, Cannabis sativa
aaaaaaaaagaggtcaataataatgaattccaagccaaacaatataataaactcaaagagttgggaagaatgtacatctagatcagtagatctaaataccattagactcatcacaagaaaaaatcgaatatcgtctggatcgataaacgtataccatatatattgaatattaattcagaataaattagatttacaaactaaaaataaataaatgaaccaaaaaaatacctgaaagcaagcgatagaagcgttctctctccttcgttctctctctctctacgaggtgagaagtggccgtttggaatgaggcggccctttctgaaaggctggttaggcaatagccaccctatttaagcttttttctcagcccaaagggtccacttgatctttctctcctggttcgctaagcaatttgtccacgtgtcacatttttaatggactactgtatttgctttatttatgtgaaaagagtaaatatgtccaccgttgattttgaaaatttcaaagccttaagcttatttaacggctgagatcgtgcctctatcagttaaaatatcttgcccctgcttcgttggaacggacttggtgagttaaataaagaaaataacctacttctttatagcctaattataataataaccccttttttatatgtaattgttttttaattttcttcaaaataatcataacaaatttaatatcaatatcaaacggtgaaaaatatctataactaaatttaatactggtgcggctgaagggtttcaatggcagtctcctctgaacaaataaaaaatgaatgttgatgctgttttacaaaacaaagttggacggagagttatcattaggaattctacaggtcaagttgttgcagctctttttaagactctaatcggtagatacagaccacaagaaatggaagcgaaagttttactctctggattagattgggcctctcatcataacttccttgtgagttttattgaatctaattctcttgttttagtcaattctattaagggacaatcaaacactatttttttctttagtgatctagtgatagatattaaaaatcatttattcaatctctctgtatctcatgttaagcgagatgataatcaagttgctcacggcttaactaaacatgcttgttagataatgattgtatgtggtttgagaaaattcttttaccatcttctctattgttgtaaataattctttctaatttataataacagacttgctcacgtattgataagttttaattttg

SEQ ID NO: 48537 - DNA, 1664 bp, Cannabis sativa
aatttattttattatttataaatttctctttgcatgtcaatctattctttttctttccccttttcttccttttctcttcccaagaaacaaaagtagctacttttaaatttttatttttattttattttttaatttatttacatgagagcaaaggaagcaactttgtgtagattcctcattggtgaatttaactttaccttttctaatatatattttttatttttggaaatattctaattcttttcccaccttaagtccactactttaatattaaaatccaaccccccttttttcaatgaaatatgataatttattaacccctaatttagtatttacaatttactaatataattaataaaactcatttaaatatcactatcatttaaaaaaaaaaaaaaaaaagttgtgatataactcttatatagtcgaacaccacactacaaggactctacaaaataatttaatgttgggattagtatttaatatctaataacaattacaatttatataaaaaaatataattatttatattagtgtggtggccaatttaccaaaaataccatcaatgaactttaaaatgattctttctaactaaagtggtcccataataataaattatcattttttatatttttgaagggataatattatcagatatttgaaaatttaaaaaataaataagtgagttttatgtttttgtgtgtgtgtgtcagaaaagtacattaacatatcataataagtgaagtgataagtttttgtgcttatcaaagtgttttttaaagagacagctatagcgcactaacctaagacaatgacctgtttgatttttttaatggataatctttttttgtgtgagtaattaaaattcctagaataactaaaatcacttttataattattttttaaaattatttatttctaaattaagaaaagtactacttccactgtgggctttggtttggtgggtcctactttaatttattttaattaatttaaattatttagagaaaaatatctgtagttctgtacgaggtaggatgacgtggtcacttggggatcgaactttatttgataagacaattttaccctttggaaaaaaaattgaaattaaaataaaattgtgtttttgatgaaagtttgtgtgtttttgattgatagatgatgatgatgatgacaccgaaagcaacatgtcaacaattttgatgaagaaaaaatatatatatttttttatctctttttccgacaaaactttaaaataaattttttaaataattttaaaaaatattggtgtgagatggtgtgtttttattcaaataaaaaaataagagaaatactaaaaagtgcctagcactactctaaaaatctaaaggaacttgtatctgggtagggatggatgtaaactcgtaagctaccgagtgtaacgataatcgtctaggtcttattgtgaaataagaaagttgccctgccacaacagatgggttggttcctctgtcttcgttaaggagctcttagtgaggagaccttaagttgctaaaataaacgtgaggggaggatcgaactgtaaagtataatttcgaagaaagactgttgtcaacatgtagagacatttatttggcccttcctttttctcgaacttcgtgaagaactccattctatcttgccct

SEQ ID NO: 48538 - DNA, 2126 bp, Cannabis sativa
ctagatatatagttttcaaactttctatatggttttcttattattatgtattaaagttattagctatacttacaaacttgactattaatctttcctaatttattgtgtaataaaagttgtttaatagatagaatgtatgtttattttaaagtcaatgttttgttttctattttcattttgaattacattacagtattttcttattgttttaatcttaacgggtacctatacccaatgaggaacggaattgggagatgcatacccgcttattactcatccgattttcatctctaagcataaacatgaaaaccccaaaaaaaaattgaactaagggaacatattaattctgaattgcttactttcaaagacattgaaaaaaaaaatgaaaatcatcacaatccaacaaagcaaataaatagattaaatagaaagtggaaggaaagaaagaaatgcttactttttgaacattatttgtagatgtgatgtgaagaagagactactggaagatctttaaacgaaaacaagccaatacctaattcatataccataaaactattacataccaaaatatttttagagtttcaaatgattagacctaaggggagtcaaaacgaaatgaaatccaatgcttttatcttgatcctgatactaatattagatatcatcaatggagtctattacctaacattgcaaaaaatcattcatactatagaagaattcaacaggagagctaattttctctcaagttactttttttccttttcattaaattaaaactttttcacaaaatttgtgagtaaagacactagaaaaagggaaacaatttacaaaagttcttgatgatataaaacaacattaaaattgaactcaaatgctgacaataatgctaaagagatgcaaatgaacaaatcataattgttattaattggtaacttcaaattatcatcatctcttctccaatgaagaagcattgcctattttgattctccaattaaaacagcagataaaatttgaaaccaaccacaaattatctctccaatcaacaacacaacattgttttttctattctatgtaacttttcatcaattacattttatttaaagacaaatttcacaatgtcaccaaacacttcttcatcatcatcaacaccaaacagcttaaacacagtaatgaaataataacatatacacataggaacaaataccaatctaaaaactgtactatttaacagtataaactaattacgacagaaataaaactattatcaaaaagagagagaataggatgaataataacaaattcccatatcaatgcaaatgcaaaacaactctacacagcaaaacagagagaatcaaaacttgagaaaactaactcaaacaaccagacaaagtttctctccgatctccgatctgtaatccaatccaatgctccatatccaatacccgattttcaaatccaatgcttcatagattttctcgccgcatattaagttattatttgacaacacatataacaacaaagttgacacaaaacttgtaacaatctagtttccagaacaaacaaggtacgggttgagaagggagattaaagttagataagcattgaatggggaatatagtgaatataccattaataagtaataaaaaacccacatctctaatgcagcacatagattaaatcaaacttggtactatgaaactgcaatgtaaaattcaatttctgctatgtctttaaacaactaaactccaaaacatttgtctactacaactgatttattataaaatcaaaagtaaatcccgtaaccacacacacccctgaaacatcttttgggctgagtagagaacccaagattttataggctctttatccatcatccatatatcttagtactaaaatatttgaatgaaagtgaaccttgaatttgaacataagatcaagcaatcaagaaactcttcttcgacgtaggtatacatatttatttaattacatctcattttgaaacattacaattaaaaaacaatggaagcaatcaataaacagcactttgttcaataccttcaataacaagccctgatgctttcaaatgataacccttaggcgaatgaagttctggactgaagagatag

SEQ ID NO: 48539 - DNA, 1604 bp, Cannabis sativa
tttttaattggatatccaattatacacttaaatttcaatattaacttaaaatatgaagaaaaaaaaagtacttaaaaactaagtatcaccttctatttaagtttaatacttcatatatataatattctcacaagtgtaatgtaactaaaaattttaaataattaaaacaataatatttctaagtaataaaatagaacaaaatatcatgaaaataaatacacaaaacaatcaattattacaaatttaacatacaaaaaaacctaataaaaatataataaatctatattatattttttaatatttttttataatataaataattttttaatatatataaatataattggattggatgggttttaattggattttgagattgacatccaataacagatccaatccaacttttagcatccaatccaatccaattgtaattggatatccaactttttgtaattggattggttcggttcaattggattagattggatgatgcccacccctaatttgtatattaccaaaagcttatttatatagatacccaaaattcttatttagacataaggcttacaactcaaaaattgcaaatgggaaatatttgagctaaaactttgtagaataatgcacataaaaagatgtggagagtgttcaaaagtaattaaaccaaagaagatttcatatcatagagaagttacacaacctgatgtgtcttgcaaaaatagaggtaacaccaaacaccattacacatgcataccaaagtcatatataatagactattatcaaaccactagtctaatattgactcttaaatctatacggtacaacatatatatatatatatatgctatgaaaaagctaggctctcaaacaaggtcttggataaaatcctgtgtgccttcttctgtgtgagcaagaaggatgcatatcaaaaactacacacttaattaaatcagtgtttcttgacgtttttctcaagtagagttgatctattctaagacaggaatttttccaccagctgccactatctgttgctccagctacattgaccagaaaaatacatattatatatatatacatacatgaaaaagaagagcaaatctccaaaccagtacaaagatcaatcaagatgggaatgattcaacaaaccatttttatgtacttaccatgaacaatttctcaagcttgctcttcaacacagagcattcttgttgcacatgttgcaaacatctcaaacaactgcacaaaagttttaagaattagatttgtcagtgaaaaaataatgaaatagagaaagaaaagaagtgttagcctatttcaatacttttttactcaataatgaaactccattttcaatgataatatgtttaagtagaagatgaatccatgttaaagtcatcaacaataataactactttcctttggatatttgaaatcttggggtgcagattacacaccttttacaacacaaaccaatgctataaacaacttcacagtctcagtctcacatttcaagattttggtttcatcaactaatagaaaatatatcaagaaaaacaccaaagagggcactaggtacccgtaggatttaatccattgcctcattt

SEQ ID NO: 48540 - DNA, 2304 bp, Cannabis sativa
  modified_base (357)..(357): a, c, t, g, unknown or other
  modified_base (1871)..(1878): a, c, t, g, unknown or other
attcccaggattatgtcaaaatcaaacaattgtaactcaattagattggcggttaatttacaactgtcaatccaaaaagacaatggtaaataatcgtcccgagttctgattaatatttttcttcggctcttctttcttggcctgaggacaatctctgataaagtggcccaccatgccacactgaaaacaagtcttggcccgacattcaccctgatgatgtttcttgcattttggacactcagggtatgatcggaatgaagatccgtggccctgacagccacctctgtttccccgaaactttctgttagctcttgatgttccagatgcatcagccttccgtttgtgattagggttacnactttcggtccccttactgacattaccacttacaggaggattcgatgtcgtggagacatcctatgcagtctactccttaatcacatgttgctcagcctcctcagctattaaggctaattcgatcactttcttatacaaagtgtcgtgagcagtggtaatcttgaagtcccaactgattgtggcattcagtcctcttacatatttttgtttccttgtaaaatctgtaggcaccagatcaccagaaaatttagacagctgatcgaactccagagtgtattcggccacagtcatttttccctgagtcagtttcacaaagtcttccatatgggaagtccttacaacgattttataaaattattcctcaagcagactcttaaactcatcccaagtcatcatactaacatctcgtatctgccccacaatgtctcaccagacgcgggcatgatattggcacataaaggcaacacaactcactctctctgttcccgtcacccccatataatctaggatgcaggtaatagtactcattcattgctcatctttaattatatcattacctcccaaagatgttggaggttgcagctttacaaagcgctcaaatattgaatctctatgcgacgatatgaacccctggttacccaccactggcacaggagctggtggtaaaacttattctacaggagctaccggtgtcggttgccttaactgacacaattcttcctcttgacaaagtatgataccttgcatttcttgaaacatttgctgctagtcaggaggcggattagcattgccaacccccacgttatcccccaaattctacggaggcataggcggtgccggtggattgatttggtttacaccaggctctacttgctcgccctgtggtcaagatgattgtaaagggtccattttcacaaataaccctgtaatcaacaaccccgacgagtcacgcactaataccacacttatgcatttattgcctttaaacccaaactcaactatttcattccaaataaataaacatttatcaattaatatactaaacatggcttcatatcacaaatatactacatgctcacatgctgcctaaaatgaaaagcggtaaataaataatcacataagcagttaagcgtttactatcaacactttctgcaccacgagccgagcttgtctctgatgatgattgtacatgttcagccggtctataggaagtttaaaaaccttggcactctgataccaaactgtaacgccctaacaagtaagcaccctacgacaactgatattaaaaccctagtcccgctaatcaaggattactaaaaagataagcgtgggaaatttaaattttatctgtaacagagtaaaaatataacttgtaacaattttttttactttatagacaaaactaaaagttatatgatttgggatcccacaaatattttcacaaaatatttcaagtttaactcatgtgccgacctaagtggaaaaacagagattacaaaatacatcactggtannnnnnnncccgcttggtctagtgtggcctgaacatgtacaagcaccaccaagctctcgtactcatggttgatcacagactgatttatcctttcctacacaatagagcccccgtgagccaagcgctgcaaggcagtaaagatattaataattacaaataacataccccatatataataatgtcatttcacttattatttgatatagacctgcgtgttgcgctctcacgccctttatgtccatatggcatagacccacgtgttacgctcacacgtctaaatacaataaggccttagaacgattcatgtcggttctaatcactgagtccaaccaaattatgccttaaatgcatagtttttaatctcaacatataaccgctcaatgagtccaatcaataatcactagggtaataacctgtaaagaccgcttagttta

SEQ ID NO: 48541 - DNA, 1293 bp, Cannabis sativa
aaaaaaaaattatttaatttttcataaataaaagatttcattttaaaattttgcccaaagcctctaaaaacttgagacgccctaccaaaacttctaaattttcataggagaatggttgcttcttttgtcaatattgtattaataaaatcaaagtaaaatttaatattaattggtaagtagtcatgataggagaaatttccatttgaagtgtttatcaatacaaatagtaaaattacacaattacaaaatatctagccaaatgggtttcttcctataaaagaagattgtggagcattttcaacatttggttgttgagttgtgtttatagagccaacaagggtcgttcccccaactccaaagctaccaattccttgtggtctgtcatttatgataaagaaataaataaataaacattataacacaaaaaaaatgaggtaacttaataaggtcatatataataattttcaatattgattgagattaacctttgcatatttttcttttgttcattatcctaaaattgtaaatgagttagctcattctcttataaagggcttctttttattgttggatcttgctaaaatttgctaaaatttggtggttgggtttattctatctaataaagtttatgtctaactaaaatgctatgagatgccttaaaaaaattaaaaaaattagacaataaaattttaatataaaaaaatataactcctaacacacattattttcgccccaccaaaagagcatcatctacaaaacaataaaaactagattttcttttattcattttcaatgaagttttctattttatttcaagaaaaaaaatataagatagttttacaatgtattcttaaaataggtctatcgatgtatttcctatctgttttggcatttaagataattttttagtctaattttttcatggtcgtctatattataattatttaaaacatactgcaaaatttagagagattcaagccgaaaacagggttcaaacagtctatgtcgtgtgtgaaataaactgtttgaaccttattttcgacatattaattttttctaaatttgtcaatcatgaaaaaaattgaattaaaaaattctctcaaatatcaaaacagataagagacgtatcaatagacccattttaagaggtccattataaaaattttcataaatatattaaatatttacagaagacacaagaagaattctttacccggcagattgtatattattatgcactcgttgccctgtaaatatataatataagatgattaattagatatacaaaaaaaa

SEQ ID NO: 48542 - DNA, 2097 bp, Cannabis sativa
ataattttatcattatattaatttatagaaaaatcaacatgaaataaatgtatttttataatttctatcatttaatttattatatttgaccatttttcaactttggaaaaaaaaaacatttatttaacttatttatctatttggggtcatttttcaccttatcttattgcataattggaacttagagtttgtagggtccaatttaatatttttttgttatttattttaataaaaaataattagttgtccttgaaagtatttttttcatatgtaatcaattgtataaactatttttaatatgaagtaactaaaatataaatgaaatcatttttatcttaaaaggagtaactcattcaaatcctattgatttcataaataactaaaatattatttgttttattcataaacgcaagaatatatcttttacaaaggtaactcattagtatcttatcaacataatatgcaactaattattaaattaatatgtttataattttttctaatgaattatgtggtaagtttcgtataagttatcttttattaatttatcaaagttattgaaccactttaacactactaaagaattgggttttcttgactattttaaatagttcgctaatgtattgccatccgtctctataaccgtcgcctattcaaccatcgcaaaatttggtagaaaatgtgactgtggaaaattgccagcaaaaataattatcgaaaggttaaatctgtgggtaatagtagaaactatagcctacggtttaaagtcgttgactatactatagccgacatttttaaatcgtaggctatagtgttataatacttcgtttattcctttgtgctctttactggttgattttgaagagtatatgtacatgtcaaaaagattacaaataatgtgcctaatttaatagttggtaaatatttttctatttccttttccaactcttacaaaactaaatcaaaatggacacattctcatcttccctgccataattatatgtaaacatccagatatatatatgtatgtatatgcatcttaaacgattccaaacaaggaaaagatatttataattaaacaatcttgtatcatcatagatatataccatgagcatgcaccacatctaaaataattacctccatagattaagcgaacagaaaccaaaaaaagtaaaaaagaaatgaagagaaacaagagtgagtgccttgaacgtaagggtttgaaagtgtaaaagagagagcttgagagagtcagagtaagaagtaggatttggaaccaaagaaaggtagttgaatcggagtgaagaagtaggggttcgtctaaatggaggctcgaacgcaggaaatgaagtcgttgccgaacgagagagggggagagagtggatggagagaacgaggagcggttgctcatggtggctcggtcacggatgaggacgaggcacaactgttatgagagagaaagacatttgaaattaaagaaacatctgacatgagatctaagtgagattggaattctatagtatgccccctttagccgacggttaataactgtagactaaagtatagccgacggttctaaccttcgataattccaagctatgtgacggtgtagaattactggtaatacatagcgacatttataacctgtcgaaaagtccaaactatagttgatagttttacacactccgtgattttattagcgatggtcccccaaaaaggtatttttaagattgacatgaatagtggttttagtagtagtgtaaacatatatgtccctaagaatgtctactgccaatgaagcttcaattgtgttttaaaatctgaagatttattttttccaaaatcaaaagtatttgaaagaagaccttcccaatcttattttgacagatggtattattgtgctattgtaatacccatagattaagaatcggattagcaaatcctaactagttaaatgtgtatttattatggaattatattattatataatttattatagggggttttcaataatatacttaaaattaattttatttataaaaatacctttaagaaaattatttgcacaaataccgttgtgccacgtcagcatacata

SEQ ID NO: 48543 - DNA, 1265 bp, Cannabis sativa
cagccagtatccgagatgtgattgctttcccagtgcctaggaatcaagaataggtgcccgacgacttggctatacatagattggattcgagttgattagatgagcctcgtacactagtaattttttatatattgagtgatgagagattatttaagaggcttctcaaatttttttcaatataagaatagttcaaataatcagacatgtcgtcgaagttcgagttatttcgagtaacttaataattgctagtttcttcattcccttgtaagcttgtttgtcccaattgttttgattaaattcaataaatttataagtgattgacccaaaatcatgattgccattgccatggattgtttgtacctcaaatagcatttttccttttagataacaaatacaaattatgaactttgaatgctaaaatattgatactagaggacataagtgcaaaagggtgataaggattcaattgcaataaatacaaatcacatgttctcaatatcatatttcattcttgtccctccaataaataatggacacgtgtttttttttcttacattaaaattacattgacaagtataaagacttaaatttagattttttggggggtaatattgtgcataataataatgaaaaattattatattgattggataatttttcaaataattcattaaaatatattataattgagtaattatacggtactttattagttttttaagcagaagctcttagattgttagtaagattaaaatgggttcgaacttttattttctgtttttttttatagttggtgttagctatgatatacaactctatgtatcttaatgagctagttgttcttttttttttcaaatattaaaattttattgtctagctttccttagaatatctatccattaataatagatcaattgaacaaaatccattacacggaggataacgctcaaagagcaatatcaatcaaggagagtgctaattacaacctcttagttaacctccacactcgaaatcatatgtcgaaatatttttttcaattttttttttaaagtgatattcattatagttacaatatcattcctgtaaatttttgaaaatttttaaataatttacagtaccgaaaaatagagttcttgatatttcagtctaccacgcgtatttaaaaaacttcaaacccattgtcgatactgtaaactattcagaaaaattcaaaaatttacaagaatgatattgtaactataacgaacaccaccatgaaaaaaaaa

SEQ ID NO: 48544 - DNA, 2310 bp, Cannabis sativa
  modified_base (710)..(713): a, c, t, g, unknown or other
  modified_base (761)..(764): a, c, t, g, unknown or other
ttctagtgtaactctatttaattataacctctcaattagaatataatttgcttagtcccaagtgtattcttgaatagaggttctactatatatatatatgtatatgtacttgtgttaacatatggtctctgttttttttcttcagggttgtttgctaaattgaataatatatggtctctcattttttttttttaatttttgtctctaagactcgggtagctttcagtatataactatataatttttcttctgtcatcatgccaagtttggtgagcaataaatttaacaacaaaatttttacttgctattttactctctccattatagtcacttttacttgttatccaacatgtcattggtatattctgggataaagggtactctttagtttaaaaatggtatctccaactcttaaccctgttcttgaataatctttattctttagtataaatggtgcatattgttttcttattcattttagcctatttttgctggtttttaaattgaaagaactttttctatttgggttggtgactgaaaacttttatgttggggataacaaggaatggtggttaagagtgttgatgtgatgaggggtgggaattttacatggtatactagcttttgctatttttttataaaaatactcccaatcggtattttttacttgtttactgtgttttttttttaagtttcatactgcagtatannnngttaagttttcactggtgttctagtggtattttttagttgttctactnnnnttttgagttgttctgttttgtgttttactggtatttttgaaaactttttcgtgtgataatatttttgtaaaagttaacctaaattccagtatttttgtaagtttccctgagagaatttataatatgttttgctgattttttatttttttttattttttttttttaaaaaaaaatagatcgggcctacccggtccgattattttgggtcaggcctgacccactaagatggagaaagtaggcggggccggaccgggtcaaaatataattttttgatcttgatcataaataagattatattgaaattaaatttatttatagcgtaaaactctaacagtttctaaatggcgtagcacaccatcaacttccctacaaccgtcttattttggattaattggacagcttttaggcaatcaaattcaatgttaaaccttggtaatgctcattgaattcttgcttgtaaactatcatgaatcaccaacagctccacttacaatggttgatattcatgctagagtagatgaagcaaacactacctgcccctctcaatttcgaataacagaagtcacaccagatcagctcatacctcacctcacactaacatcttttcaatgcctcaaaagctagtggaatccaaaccgcagcaaccctttgatgctccctttctttaagcccaatcaatcatctctgcctgtggtgggtaaccccttattagtattattactaacaaaccaaatattccatgatagaaccaaaaaaatactcaaacatagtttgatcccatgactttgataatctcattagaaaaaatagtacatcttctcctccacatgttgtacttgtttctttaatccacatagcttccatacagctcagtttgccttgcaaccccacaatgcatgaaacacattttctattagcaagggccagttgagcaagggccaaataggtatgaaaccaaaaatgagtcatcttccatacaaaacaaagtgctttacctttagtggtatttttagcttccacgacttttccaccatgccaacacatgatgatcgtcaaattgatctacctttattattgtattattaattaactgaatatatattctcaatttttactataataccaaagaatcttatctttgagctcccatcttgtacttggtatttgcaatattatttgagtatcctcaacactaaaaataacacaataatttattcaaaaaaaaaaaaaataacacaataatcatcccacattccattctgttgcttataacataaaattgttcaagaataattggtctataatttcttataaagcgcgaagccttgacaaccatccaaaatgatcttcttacccccaaacctacctccaacactctcacatttacactagctaatatattttcttagtttgcttcgatgaacctcaccaaaatcttactgtcattcgttggataatattaattatatttgggtaaataacattttggaccctgtgttttgcaaaagttaccaattggaccgtgtgttttgttaaatgacaaaat

SEQ ID NO: 48545 - DNA, 1456 bp, Cannabis sativa
ctcaataataaagtatttctacattggataattcaaattggtataattaatttaatatcatcaaattctcacctattattttatatactaataatattgttactttttgcataatgaaaatggtacaactcattccatgtatttataattaatacaaaccacacacaaaagacataaaaactaatagttctcatcatagtacatactaattagttttatttgaaacatgtgtccataatgacatggtacactatgcgcttgtcactcaatattcttaggagacaagagtgagagaaactctttatcaacttcaagtttagccattgtttctggactgaagcatgcataagcctctatttgatcaccattcttgttgtctaaaaacccaaatatgttaccaaaacacctatgagcagaactcacccaaatgggctttccatatccaaagtcagcatcataaataggaaacctacacaaactactgaacacaagcgcactcacttctcctctctccaaactctcactacctttcttcagtgattctaagtactcatcagatttctcaactccttgaagatcttccacaaactttttatcgatatttcttatctcatctcctatcaccctagccagctcgcaacacttgtcatcatgatgttcctcagtagtaatagtagtagtagtgttaattatggacaaaggaaatgtcaagctactgtgatagtagttcccgaaagagttgtccggcaatggttctaaaaacttgggacgaatattcactgggtgaaagattataactaattttgtcttaacgtctaagccacttgccacagcaaaacggctatataagaaagcagataaggcctcaacacgagaaagccgtcgcgaccacttggggtttgcatggttttctcttcttgttttttcctcgtatttggctctgactgcttcaaccttttttgcatcgaacacaaacaactttgctacgtttgtgttctttttggggagtggcatgcatggatcataaccaccaatattctttggaggaaaaagcgttgaagagatgaatgtaggtttcactaccttattctcttcgcctcgtgtaatggccatccagctttttgtaaactctaagcaagataaagcgtctgcaattctatgcgaaatgcagacgccaatggcaattccaccacaaggaaaaatgttgagctgcacaccgaaaggtaactcggcgtattcgtctagcggaaatggaagaagatcattgagttcaacaaggatagggttgtttagaacgttggagagtttcgtcttcagtacccgagcttccaagaagggtgctccttcgtcgttgcattcaacagaaaaatctttggtgaatcttcctgcaagtgggtagtaaagggttagagttttggacaaagatattttgagcttgtcgaatatttcagagata

SEQ ID NO: 48546 - DNA, 1490 bp, Cannabis sativa
tataaattatataataaccctaaacttttggacacattagatttgacctaaaattgttgttttattataggtatatttggtttgcagagaagtacctgagcaggaccataatggatttggatgtaaggatattctgttgtaataagttcattcataatgataccaaagctataaacatcacatttttcattatatgcttcgcactttataacttctggggccatatacacataagtacctaaaaaacatacataaatttcaaatatcaatactacaccaacacataagacaatattttaaaaagaatatatgctaactttataatatgacaagtagctagggttttttttttctatttcttccaaattatggattttgtaaaattttgttattgaatatttttgtgtggtgagaattaaaaaaaatgtgttaattttctctatttcttctgtttttgtaaccgtttattgatgtgacttgtgcttagaaaatagacggaatataatagaagaatatttttttagaaatttacgtaaaatacttaaaatgggactttttatgtatactaggggagaattacgtgcatatgcacgtatggttaattacgattttagtggatttaatgtgagttgctatgtggatatttttagttacgatttaaattgttccgttagttgctatgagatttttatgtaaaattctgtaaaaataataaaaaagaaaaaaaactattttgatttgtaaaaataaaaaaaaaatcctcgtatatatatattataatttgtagggacacgattttgtcctgtgatataatttcacggaatggattccgtggtacattaaatgggtctcaaggttagattggtaggaaagctggatatattatatattaaactaattatgtgaaaagttaaatgtttttttttattattttattttatttatttgattggttttgcaggaaagccaagttcatctggagaacatagaagacaaagcccctgcaaaagctaacttcaagttgatcaatagagaggtatatacatacatctatatgttcacatatatatttctttgaataacagactaaataagtctctggagatgatcaatagcgaggaatacataaatataaaaagttcttgatgaagctatgttcttcgagtgataatgttatcgaaaggaaccgacaacaagcacctggagatgatatagtgtgggagacaatgcaaattataaatgttttcaggaatgagtgctttaaatatatagccgataatagtgtgggagtcggagacaatacaaatctcaattttcacgaaacaaacttataatagcatacacggaagctgaaacaaattaaatccaaattatttcaattagcaaactcaaggaagcaagtgttagacggttagaattctataaccatctttacagagcgtggtctatattttcactatcgaattatacaaattaatcgaacacaaaaa

SEQ ID NO: 48547 - DNA, 1073 bp, Cannabis sativa
aatattcctgtttttttcccttaatttttttattattttattaaatttatttatatttaataaatttattattaaatattattaaaattataaaacaataactaaacataaagcatgattagagcaaaaataaaaaaaaatgactccctattttaattttttagctattttaattaaaatttagagtttatttgaagatgctttaattgtagttagagtgtttgtaactatatctctctattttgtttttgaataaattataaattttcatcaatgacagaagtctttcattataatagaaggtaattaaggaaacatattttgctttcacattctaaaaataagagctgctatataatgaatgattttggtctatagaaacatgaaaatattaagcaatttgagcctacaatcacgatccaattataaaccaaactcaaataacatttgcatattactccaaattgtttgaacacacaaaaaactattatctgtttccactttctaacactacataatcagtcttaatttcttaattaattattaatcaatcctagcactttacactcagcctcgatgatacaagtgtcattcaaaataaatccattatctaagtgtttgaacttttccagtgacatgaattgtcgaaaaccccattcgttactggatgataagaaaacagcagtattggctgcagcacaatattaggcaaatatatcaataaatgattatcaataatcaaagcaccacaaaacaaattaactctatcatgagctacctcaccttcttcctcaaaattatttcgattattagtttggttattcaaacgcaaaacgaaacaaacaaagagttttgtgtctggtggaagacttgacatctccaattgcaaaaataatgaaatgtgtgttcctttgccttcttctaacccgtttggataaaccaaaatcctcctgttcatgatcagaatatacacacacaaaaaagaaaaaaaaaaatctataagaatgttaaaatatcaatacctcaaaaataacaaaacaaaataaagcatgccaattgaataaaatataaaa

SEQ ID NO: 48548 - DNA, 1798 bp, Cannabis sativa
  modified_base (1740)..(1745): a, c, t, g, unknown or other
gtgcaatatgatacatgaatacataatatttttaagagcatctctttgctagaatcgagtcggacctcgtataatggcataacgagattgaactgctctaaatgcccgctcaacatctttgtgtacatcttcttgacattggacaaataatgttctcttctctccttgaggtaatggcatagttttaagaaacgtaccccattctgggtagatattaatattatctgctagattataccccttattgtactgtgtgccttttatcataaactcagctcttagacattgctcctgtaagatgttagtgaataatggtgattgatttaaaatattgagatcattattggatcccagaacaccaaaaaatgcatgtcaaatccaaagatcttgtgacgtgactgcttcaagcataattgtcggtgaaccgtgatcacctcgtgtgaattgccctttccatgcaactgggcaacttttccatttctagtgcatacaatcaatgcttcccaacatgcctgaaaaaccacgcctttctcccatttgaagtaagcggcgaatgtcaccggcattgggtcgtctcaaatattctaccccaaaaatttcattcactccacgaatgaaatggagtagacattcaatagtagtgctttcaccaattcaaacatatcattaatgtaatcggttggtgctctgtatgccaacattcgcatagcagcgatacacttctgtagtggtgaaagcccttttctatcgattgtcatatgctgtcatatgatgatgacaaaagcccttttctaccgattgtcatatgttgtcatatgatgatgacaacatatgacaatcacttagtacaggcaaatgtgcaacaaccttataacaacacaacaacaacaaacaagcaacaactatttgcaccaagaatgggatcagttcaagatgatgctattttggtcaacattatggctttaacatcatagtcaaccatacagcaacaagaaaataacaaaaaaaactcttgaagaagatgaatatatgtaaattagctgttaaaatataatcgttaaaatataaccgttaaaatatagctgttcaaattgagccattaaaatacagccgttaaaatatagctattaaaatgaagtcattaaaatataaccattaaaatatagccgttaaaatatagttgttaaatatagctgttaaaataaagccgttaaaatatagttgttcaaatagagtcgttaaaatatagccaagttaaaatatagccgttaacagtcaaaatgtgattgttgaaatggaatagtttaaataaaggataattcatttaataaaaatatattgttacaattagataagaacaatacataagaattaaaaatttaaaataattcataacaattagataaaaatacacaggagttataactttaaaatattagtcttagtatgagctaccaaatttttatgatctttcttttgctcgagagtcatatttgatgtgtcaaagaataaataattaatgtttttttccattactttttttttcttgtaccaccaccaatttctccaatgcatttactttctgttgataaaatcataaaatgtagcaagttcctcatcttgctttccctttccctttctctttgctgctttttgactaatagggcactcttcatgaatttcgtaatcacttatgtctacattgaatgatgaagtatatgttgaaaatattttaccagnnnnnngatttactaccatgtatgtttcatcaacaatctaatatgaattctaaaacaat

SEQ ID NO: 48549 - DNA, 1247 bp, Cannabis sativa
  modified_base (32)..(33): a, c, t, g, unknown or other
attaatcaagattaactgctaatttccaaatnnaactaagcgggctttacaggaaaagttccatgtggcgcacgcatagagagaggagagaaggaatggtggttgatttgcacaagaacaaaggcgcatggtatcaatctctactcttattcaccacttttatttattttctttttctttttccaaagtgccacaataatttttaatccctacaaaaaaacaataagttaaatctaaataaaatattttcaacataaaaatatatctcattaatttcatgaaagtattaatttaaatttaatttattttacactttaagatcaataaaatgaccttattacgcactaatcaactgcccatctagaagatctatgttgacggagcgtcaaacgagaaaggagtcagagcaaggatcattttgatctctctgcaagggcacgagctctagattgccctacgcttcaatttttgcgcctccaacaatgaagttgaacatgaagctatgctggcaggcttaaagttggctaaggaggtgggagcccaacacattgaagtacatagcgattcccagctagtggtgaatcaaatatctggcgagtaccaaataaaaggtgaaaaaatggttgcttaagtcatgatatcccgggagctgctacaagggttcaagggttacaacatctgccaagtcctgagggaccaaaattcactcgcggatatgctcgccaaacttgcaatggatctcgagatcattcaacacaaagtagtcccaatttgtcacctaaaaaagttaaacattgaggcccagggggtaaatgctatagtcaacaactctcattcttggatgacacccatttacaaattttggagttcgggaaagcttcctttggataaagccgcctccaggaaagtctagtatcaggctccccattatgtgatcatggatgggaagctttacagccagggattgtcaatgccatagttgaggagcattgctggaactgaaatcagtgatgtaatccacgaggttcatggtggcttctgtggagatcacacatccagaaccagcttatcaaagaaagtctttgtcaagggtatttttggctcacaatgaagaaggattgcataaagcatgtccaaaaatgtgaacaatgtcacaggtatgctaaggttcttcgtgcacaaccaactaaaatcacactcatgagtagcccatggccttttacagtttggggtatcgatttagtagg

SEQ ID NO: 48550 - DNA, 1189 bp, Cannabis sativa
tatttggaatattaattattttcctattttatgttaatttagtcaatttttcattttttttaatacatatctatatttatgagttaatggaagtggtagtaacaagagaattgtaacattaggtatttaagtgtataaaatctaaaatattaagtacttatggcacaattaccctaattattattagtctgataaaattaataatttttatttttgttccataaattttttttattcttttctgtcatatttattttactacattaaatctatatttctttaataaaatttctatattccattaattaccttttgaaaacaattttttttgtctaatattaaaagaaatgaatgggtgatttgctcgaaatgactgtaattataacaaaagtataattgtatagatctcacgtattttaatttaaataattaatatagattaaagttaaggagtttctctttgcaaaggaattgggttgtgacaaagtcttactcttaattattgaatctgattcctgcaatgtctactattccaacaacaaattaaaggggtgcactaatgtaaatggctgattctttagccaaattagcttttaattctaaagcatgtgctagttggagggattatatcatagtattgtgattaatgtcaatgatggtagtcttattatatcctatgtaataaggttccttgttttgttgaatgaagatggctcctctaagaaaaaaaaaggttaatcattcacaaagtattaacttatggtagtgttaggcatgcatagtggcaatgctcttagtttaaatatacaagaatacttactgttattgttattcaagaaagatttgctaaatgagatttgattgggaggaataaaaatatagaaataagaatgaaaatgggaataagaataggaacagaataaaatttaaaatacataaaaaaaatttgataaaaattcattaaatttttttcttgttacattagaatggtctttccttcttttttaaaatgaaatagtcattctatcaaaatagtagaaagagcattctattaaaatgtcatttccaatactttcaaatgcaattaaacaaaggaataaaatgaaaaattattttatttccattctatttcatttctgttaactttagtgtgcctactaatacccttccctatatctaggacactaac

SEQ ID NO: 48551 - DNA, 1283 bp, Cannabis sativa
atttgtgaggtagcatgatatacaaacctcccaccaaatatcttggcaagccacccgcctggcaattgactcaatgcatagccccaaaagaacgacgactgcaccaagccagccactgacgaactccaaccaaactgatgcgacattggaataattgcaatactcaagttcacctgcccatcaacaaaaaaacaacctcttcattaacttatttaataaactcatttgattcaagaaaaatgaaacaaaagtagaaaaatcactacaaagaaaggaaaaaaaaaaagcacaaaaagttagtaccttatccatgttacagataacaaaggccaacgaagttgtaccaataagcttatatctttggggcatgttcttccaaggaggccaattgccactgaaacccacttcttcattccgaaccccagaaccggaaaccggaccaccaaggtccacatccacttcatcaacacgaagcccagtgagaattccatcgaccttcttctggctctcttctattttccgggtttccttaataccacaagaaaccctaaattccaaccggtctttggggggaaagagccgaattcgacgatgtctgagtgaagaatcgaagaccgagtttctggaattgggattatggtgggagagagaaagcaaactctctgctctgatcgaaagactctccattttttgcttttctttgtattgttgatttagaagggaaaagagagaagtgtttggttggtgggaaaataagattcaaagttagaagagtgtaattgtggccatgggtaaaggttgaagagagaggagtttgaggtagccacggtactgaggtgcttgtggctatggattttgcagtgtttagaaagctttgaatattgaaagtgggtcccttgaaatctgggatcctgtgcttacttggaagactgactagtagtcttctcagccactatttttgccacgtcttttttttttcttttttttttttctctttttttgtgaatgcatatactcatttcttggtacgcaggattggattagattaaacaggctaatttgttcaattcagtgtttgggcatgttacaagtctggataactaatccagttaacctcatctgtctgggtgggataaataatcccatgcatgtgagatttttttttaatcgttttttaatttaaatttttattaatatattttaaatttaataataatttaaaggaaataattatcacacatttatttatacatttttttttatcaaaaacttattcattaaaa

SEQ ID NO: 48552 - DNA, 1340 bp, Cannabis sativa
aaagtatagaaagaaagaaagaataatgttggggaagaagatagtgagtttcaaaaaactagcaaagaaagtgaaaatcatagggagaggaggtggtgagaaagaggggtcatcatcatcatcatcatcatcaccattttcattatcatcagagtatcatgagagtttgcttagagaatttgaagaagaagaagaagaagatgaaatcccaactgggtttttggctgtttatgttggagaagagaggcaaaggtttgtggttcccacaacctttctatctcaccctctcttcaagatgctattagagaaagcctatgaggagtttggttttcagcaaaggaatgggcttgttgttccttgcagtgtctcttcttttcgagatgttgttaatgctgtccaatgtagtaatggtatgtttaattttggcaaacttgttgaggagcttctttaattagtattgtatggattaatttctcttatgttaaatgggattgtgtgtatatagaatagagcctttatgagtgtctttttccatttttcttcaacgacatgtatagagaaatgtactaagcatgatcaatttcgatgttattccaacttggagaacaatttcgttgatttggtctcttggcacaaaaaaaacttatgagttcctatgttaggagcaataggtaataggggaagtagattgtgatctgtctaacttctttgtataatacaagttcggcttcttttagatgaaattgatattgaagtgatagaagttcaaatgtctctaaaaactactccattgaagcaatctattttgttgcttgtttgacctcaccaataatatttgttgattaattaaattatgtaactttgtctaatataggcaagcaaaaaagtccacataagctttgattctatttccacataaagagcatcttttataagtaccaaaagtatattatcacaatttatttttgaataattaacaattgtacctttaaaactttttacactattaggttgtggactttaaaatatacgtcttcttaataatattcattaaaatgtaactttaatattaatttagtccttccatcatactatattcaattatttgtaaaatgagtgatataaagggtagtagttcacaaataaatataaattatataatttttactattttcacatcaatgaatgttagaataaaagattttttcttttttataagaattaatatttttatttttagttttttagctattatggtataaaatgtgaaaagtaaataatttgtatctatatatcaattatcatctattgtgtcactcatttcacaaaaaaaaaaaaaa

SEQ ID NO: 48553 - DNA, 1422 bp, Cannabis sativa
acttcgaattgggttgaggttcggctagacagagcgcttatctcctcggattggtttcggctatttccccaagctaagctaagtaatcttgaaacttccacttctgatcattccccaatttaccttgaacctgctatagaaccctttaatctttatcctcgtaagtttcgttttgagaatgcctggcttaaggaacctttatgtgtagaattgataaaagattgttgggattctatgaacaatgaagatattgtgaagaaaattcaagcttgtgcagataagttaaccgaatggggaaaggatattacgggttcattcaaagtaagaattaagaagtgcaagcaagagttaactagtttaaggggcaagagagatgcactttctgtgcaacgttttggggagctaaagaatcaactctctcggattatggaccaaagggagaccttttggaaacagagagccaaacagttttggctcaaggaaggtgataaaaacagcaggtattttcatatggctgctactactagaagagggaacaatgctataagtaaactcagagatgggaacggtcaatgggttagctgggagaatggtttatcagagttgattgttgattattattcagccttgttctcagcttcgggtgcctcttgtttggaagtggtggaagacattgagtgttctatttctgatatggtcaatcatgaactatgtctaccggttacagaggaagaagtgcgtaaagcgctatttcagatgcatccttcgaaaagccctggccctgatggaatgacccctgggttttatcagaaatgttggagtatagtcaagaaagatgtggtgctagtggtgcaaaaattctttcaaggtggaattttggatagtaataccagcaaggcacatgttgttctgatccccaagaaaaagaacccagagctggttactgatctaaggcctatagcgttgtgtaacgtgctttacaagataatcactaaggtgatggcaaaccgaatgaagccctttatggataaagccgtatctgctaatcagagtgcttttattccgggtcgcttaatctctgataatatcctggtatccttcgaagtgctacattatttgaaaaggaagcgtcaaggtaaggagggttacatggcactcaagttggacatgagtaaggcttacgaccgtattgaatggggttttttggaggcggtattgctcaaactcggtttcggtagaagttgggtgaccctcattctttcttgtgtgacctcggctagttataccatcacccatggaggcaaggaaatggggcctatccttccaaccagaggtatcagacaaggatgtcctctgtctccatacctgttcattttgtgtgcggaaggcctctctgctttaatcaagaaatatgaaggtcga

SEQ ID NO: 48554 - DNA, 1401 bp, Cannabis sativa
taaaactctctgaaatgatggcgaagaaggtcgaaatcatgtataaccacaccattttccaaagtaatatggctaatggtattatgtctacgcctagaggaagctctatggtggaagtatttagtgtttttatcgccagccttcaaccaggaagcacgcgaacgttgtttccaaaagacttcctccttataaagagcaacatccagatcattttgaagggttctagcatgctgaaggtcaacctgattaagcccaagggaggagaaagtgttttccaaggcagcttgaaggtcccgaatggtatttttgaaatgacatttgtttttaccccaatctttaagtttgttgacacaattagattgacaactaaggaaaaaggaaaggggattattgctaccattgagattctgagtagaccaattagtttgtacaacactatgaaaatcaggctcagatagccaaaaaatttcaaaacgaaaagcatgggaaataatattttgatgtctagaatcagagagaaggacttttaaacatctgtgatcagagccaaaatatgggaggtgagtaagggttaccttagggaacagatcaagccaagctttatttacaatggccaagtcaagcctttcaaaagtgttaccatgcttataagtaaatcggctaccaatatgaggcatgggggaaagattatacttataaatgaaggattggaagtgaaccatagcattaggagaaggccaattgctagtagatttatcattgataccaagataatcgttgatatcaccaatgataatccaaggagtaaaaggagcaacatcatataatctattaagcaaggtataacaagcagatttaccaaaaaaataaggggaaccataatagcatgaaagatggaaacttatattatcattcatttttacaaaacagtctatatgattactagaataagataaaatattaatattaacaacatctttccaaaaaaagaaaaagacctcctcccagaccctcgctaggtacttcaaaagcaaaatcaaaagaaagttgagccttaaatctaccactagaaccagacctaagcttggtctccataacaaaaagaacttgagggtgatgttgtttaaccaaaagggagaggtttcggaatgctcgagaactccccaaacctcgagcattcaaacttaaaagactcatttttttgggcggggttgcagagcaacacccgtctgttcatcaaaaattggaatggaaggaaccacaacatcatcttcatcgtcagcaactgcccgagctcgtttcagcatttccctaacagaattccgaacttgaacattctgccttgcgaaggatctcttaacaccaaacaggatcgtgggagagggagatagaatgatgtca

SEQ ID NO: 48555 - DNA, 501 bp, Cannabis sativa
aataataataataataatgttgggggagctgaactgtgatagacccaactcctttttttacttgttaaaaatataaatgaacaaaacttgcggtttctgtcatattaatatgcgcagccacacacgaaatgtgcatgtgacacgcactgaacgtgcaccaccctcatttcatgtgcgtgtaaaccaacaccatcacattattcatcaccttcggcgaagccacatgaacactaagtggggaagtcgttctaagttatttggagcttaaagttaaataatcttttttgactacaagtattaattgaatcaaatattatcaaattctattgttttgtttattaaaataactttaaaatataaattaaatcacgtcaatcgaatcaatattaaatgagtaatgcttgttttattaaaggttattctgataccaaagtccaaattgacatatgacgtcaacgtagacgctgggtgaatgagaaaacgtgttggcaatgtattttt

SEQ ID NO: 48556 - DNA, 1098 bp, Cannabis sativa
atttgttttattaagacaaatagtgatattattaagtgttatattttgatgtattttttgtgtgtatcattagtgtatgcatgtttataataagggtgttaataaaatactcgatctaatataatttgtaaagtgcaaatatttttatttgcatttgtacagataggattgagttaaaaactctaaaatccccacgtgtacggaataaatgttgtttcacatacaaaaatcacagatacaatctaattcataattatttatatttattttaaaaaatttaaatatagttcatatgtttttcaaaatttaatatatcaaatatatttataaaaaaagaaaataatctaaaactgtaactaattttttttacacacaattttttttgtttttttattatattttgtttattattttaatttattgttagaaacataaaataacaacttattttcttttgttgttggagactttaaaacaaatatcttacgttttatattttaatgattttgttttttggtgatgtgaaaaaaaaaatattcttaattaatattaaataatttaacattaaaattaattaatttaaaataatcgatttaatctaatctacattattatagattagattagatttaaaatataaaatctacgaatcggacacactataaataaaatagtgtattagattacctataatatatatgtagggaatatctacagtaagacacccaggaaacttttgctaggtcctaccataattttgtcctatatataattatatattctttgttgtaattatataaaactcccccatttaattttaaaacccttgaaccagaagactttgttgttgcttttaatttagcataatgagtattgagtggatttgtgtgatgctcccccaaacaaagtcaacttaggggacacttattcttctttatattttataacttaaattttgttaaaaaatatatattgatatattttgttggagacaaagtggatattcataatataaaatttgagcaataagctttacatgtttcaaaaatattctcttttatcatattaaaaaaagtttcaaaaatattctcttttatc

SEQ ID NO: 48557 - DNA, 1214 bp, Cannabis sativa
  modified_base (232)..(234): a, c, t, g, unknown or other
ttggccatagaaggttctttcaaaataatcatgcaatgagaatggactctaagtttgatagaaatgttgaaagaagacctactcagagagaatttacttaagaggacgtattacattaagtcaatgctctcaaaccgcaaattgtaggatatgatcaagattttagggtcataaaacgtagaagagttgcggaagatggtaacatggaggaaaaaaagtattttctacgagnnngagtattggagcacaaatattttaaagcgcaacatagatgtcatgcatgttgagaagaatgtgagtgatagtctccttggcaccattttacataatgataaatctaaggacaccaccaatacaagacacactactacaaattgactatttagtgacactctttagtgacccgcataaaagtgcgggtcagtaaagagttaatggtgagttatagtgacacacataaaaaggttccaaaaattcagtgctagtgatatacaagttgggtcactaaaaatatgagcatcactaaatactcccataatttctaatattttcttttaaaaaaaaaatattaacatatagtgacatgccaagtgtgattggataaatatgtgctgacgcacttggagcgtcactatatcataatcgaaaataaaaaaaaaatacagatattagtaatattttaaaaatatatttattttgagaaaatagtgaaagacatgatagctattaattaatacactttaccatttgtttttaacacatttattaattctcaaatgaaaaaaaaaccctagaaactatctttcaagccgcctcctccctttatcatcgttcattgttgtgatattttgcacacgcaagtgcacgtatcgttacaagtagtaaactcacaacgagtagggtcgatcccacagggattgtagttaagtacgttaaaattaaacttctacttctatttcattaaatgaaaattcagaaaagatatttaaaaataagaaaactagtaagaagcaaataattaaagacaatttacagttaataaaaattagggcatcgatttcaattgtttctattgattatggcctaatatgattatcttcctattattaatttctatacaataatagcaggtttactaaggtaatttatagtcttctcaaatatataaatctcaattacatgtaaactttctactctcgtgataaatttaacat

SEQ ID NO: 48558 - DNA, 916 bp, Cannabis sativa
ctcccaactgagctatccccgctatttgtaaagtgaatcttatatgtaaattcttaactaattttgattaatcagtttcatgatatttgtcaaatttttacgaaataaagctaatcatgcaattcaggtttgactttcgttgtttattgttgtcaattttttgtgttaattataacatacatatttacaataattaattagttagaaatgcaagtgtattgaaaataatatactaccatcaaaatatatgtatatatacaatgcaatattgattaccatatttcaaattgatgtcaatgtgacaccattttttctattattattgaataaaggtgctttcatattcatcaaaaagaatccgccaatatagcagaaatttcctacaaagttacaataatcttatgaaacactagccaacaaatgaacagcagattgttttacaaaatgcaaatagacattagccagacaaaaattaatcaaagttttacaatccttaaaactaatgtgacactactttaagtagtctgcaaaatttacttaatgttaattaatttactttattaacaaaactactgtccaattaaaaatagcaacagggtctgtatgattggtaatataaatacttggaaatataatgtgtgacataaatataatgagcatattataatgtatacaatacacataatataattttccaagcttacatatttagatagtaatagtattagagattgggtgtagtaattttgcaacataatgaataataaaataaaatttgtcccaaaacatcatcatctactctagctaatttgtaggagttgatgatgatgatgggtgtttataaacataattggctccagaaacggcaagaacaagcacaactgcagcaactgtagcagcaaatcgaaacacagat

SEQ ID NO: 48559 - DNA, 3161 bp, Cannabis sativa
  modified_base (150)..(158): a, c, t, g, unknown or other
aatcaaaccccacgatttcaggggataatcattgtagagatatcagtcaactctgtaattaactgtctgactatgtaattataaatagaggcacgttagatggaaaaggggacgaaaaattcataagaaaaaagccctagaactgtatcnnnnnnnnnataagattgactcgtggactatatagaattttaactgcaaaaccacgtaaaaaactttggtgttcatacttttttctttactgtttttatttttttgtgcaagtttaccactaattaggctcaaatttggttaacaaaaatctgcgttaacacttaataatacaacatcacagctactacatagtttaaatgcttcttcttctgctcttcagacctggcaccacgagaagtatggcaaaatgaagcgagattactattgctcaaaaacatacggctcatttacacaacagtaaggatcattcttctcaccacactgctgatatgttgaatgctaagaaaattttggatgatttgcttgaaaaggaggaaatgtattggcaacaacgtgcaagagtggattggctaaaaagtggtgatgataataccaaatttttcatgctaaagcaaaatctagatacaacactaacaagatcaaaatgctccaaactagtgatggaaatatgcttcacactaatgtcgaattcgcttcaaaagcctcaagattcttttcccaacttttaactacttcagggattgaaaatgaagctcttaatgtcactttggctgccatcaactcttccattatagcaaacatgaatgtgagcctactacagaatttcactttagccgaagttgaggatgctctcaattctatggctctggataaatccccaggtattgacggtatgtccgccatgtttttctagcatcattgggatgtagttgggccccttgtttcttaatgtgtgcttgaaatcttaaatgatggagttgatatctcgactatcaactcatcaatcatcactttaatccctaagggggagaatcccaaacggttgggtgaatatagaccaattagcctatgcacagttgtctaaaaattggtctcaaaagccattgttagcaggttcaaaaaggtacttcctgttgccatttcccaaaatcaaagtgcattcctaccgggtagattcattatagacaatgtacttcttgcatttgaattggttcactgcctgaaaaataaaaagagaggatgtttgggttatgcagctttaaagttggacatgagtaaagcttttgatcgtgtggagtggcactttttagaagcggttatgctaaagatgggatttgctactaaatgggttgagtttatcatgagatgtgcttcttcttcaactctctgcttcaatattaacggagctattaaaggatcagttgttccacaaagaggtcttcgtcaaggtgatccaatatcaccttatcttttcttgatatgttcagagggactctcagccttattatgttcggaagaaatcattggacatcttaaagggttctcaatctcacggggagccccttcaatgtctcactttttatttgcagacgatagtctcctttttgtcatgctactgaagattcttgccaagcaattagtagagccttatcgatatatcatcatgcctccagtcaattgcttaatacggggaaaactgttatgtccttctctcccaataccactgacactttaaaggccaaatttcaccaagttcaaggtatgtctatttgcgatcttcatgaaaaatatttgggattgccatcttatgcatggcgtgataaaaaaaagaactattcagcaacataaaggatcaaatatggaagcttatgaactcatggcatgctaaacttttctctataggaggccgagaagtcctcttgaaaccagttgtccaatcaatccctacctacgctatgagctgttttagcttaccaaaaaaattctgcaatcaattagaagcaaagatggaaaatttttagtggtgttcaaacaccaacaaatcaaagattcattaaaagaaatggaaatttttattccaaaccaaagcggaaaaagggttgggtttctggtcttttatttattttagccaatcactcctcgcaaagaaagcttggcgtattcttgtggatcccaattctctattggctagagttctcaaagcttgatacttcaaaaatggtgatttcattaatgctaccaagggtgtcttaccatctcttagtcggaaaagtatttgtgacggaaaagagctattaactaaaggccttcgctggaaaattggttacgggaataaagtcagatgtgctactgatccttggctaccaggtaatatgacttttaaactattctctttttgtggcgatcgtgacttcacttttgaacactacattacacttgaaagacaatgggacatcagtttgctaaggagtcattttggtcagatcaatagagacagaattatgtctatttctctcagttcatatcctagagaagattagctattttggtaccattgtgattctaggacatacaatgttaaatcgggttaccacttagccgaaagcttggaaaggaaatatacttcttcaacttctaactctccacgcaaatgatgggacagatttggtctctaaatgtgcctaaaaattaaaatctttgcttggagattcattaatgatgcaataccgacggttgtaaatctattgcacaggaaaatctctcatattacagaatgctctttgtgtaagggggatgggaatcggttggtcatgctttatttcaatgcactagagctgaagctgtatggaagctaaatcatttttaagtgtgtattccaaatatcaacaaccttaatggccatgatatctactcatctttagctgaggctcataatgatgattctgatctgggaaaaaaaattatttgcctcatgtggagtatatggacgaaaagaaataagaaagttcatggcactaaaccaaaaccagctcctattatttgtacatttgttgaagcctacatcgaccaatttaggaaagttaaagcacctgctactccttcgaaggctctaatgaaaaaaaaccagatgctccacttcagctacccctattacgttggacaccagcact

SEQ ID NO: 48560 - DNA, 1092 bp, Cannabis sativa
aatattatataaaatattatataatttagttcaatataatacaaaataatataatataatatgacttaagatggtgtaccgaacaatgtccttaatatattagtcaaactataatcagcctaaatttaaatctatttattcatattcttatctacgtgggtaaaataactcttttaacatatcaaaatatttaatatatcatgttatattaatatgacatgtttaaatatcatgctacttttgttgttttatttaaattttatgagaaattatttaattgtattatatgtgttatgcataaatgtatcgtgttaaaatcatatattaatcttaatcacggacatataaattgtcagtcttaaactatttatatcctccatattgtaagatatataacaaaaaaaaatatgtataaataattcttaatcaaaacatacataattatacagtacgtactcactaacggaagatatacagactgcgggcaaattatataaaaattatttgggagagctaattaaaaataaggagaattactttatatattatttttttttttcaaatttacagtttgggtttctaaattgcaccgctagtttaataggagtttctgtacgattttctattacaatttatgttgcagcgctagttgcaatagaaatttttataatacacccataaaatttaggtaaaatgagaaataaaatgagtttaaatgcacaattgaaaatatagctaaatgagaaaattatagtgatgttttgaataaaatgaagagatatttgtggcaattccctattaatattttttattgttacacacatgatccaaattaaaatgtaagaaaattatactacatactcaaatttttaattcttttacttttttattgtggagccgaaatttttcaaaatactgtataaattgtatactgtaacagtattacattttcacaattatttcagtgttgttttttagttgttttaattattttatttgttattttatagttactttatgaaaagaaagtattttgtaaaaaatttcctatgacaataaaattttaagtttttgtcaaaaatctaatatttt

SEQ ID NO: 48561 - DNA, 1132 bp, Cannabis sativa
actattgttttagtaagtttgatagcatttggttaaggtgggagtcaccttcaagggcctggagttgtgtagtttcgaacacttttctgcccaaaatggttccgaatgagttatacctaccgtggttgatctaggtgatgagagccgaaaggatagttccaaatactaattgggaataggctttgagttattagtacctggaagcaagcttccgggataatagactgtccggttagttgtggcttcgccggtagaatcttgatctgggggatcccggatgcgtgtcattagggaattgtttggggaagtcctggttgttgaggtttcgagaaggaagattccagaagggaggacttccagacatgagcttccagatatgtctccgggcaaggattttcatgtaagatttccgaatgggtttagtcaattttgttttaagtcttaatacggatttgattgagttatttacccatcattacttttgtgacatagggctcagaccatcaagggtttcccattttcgttagctggaagacttgaaatttgacttgaggtactttgaatacattaaatgtgatacggttattatcgtatgtgcgaaagagttattactctccagaacctgttgtagggtggtatgtgcagaagagttattactctccagaactcgttgagggtggtatgtgcggaagagttattactctccagaacccattgaagggttctatgtgcggaagagtttctctccgaaaacccgttaaaagttgttcaaatatctcatgataacgattatttgcctaatgagacaaactgttttgtctcacgggtgctatatggtgcaagtaaaggtaaaggcataataggacaaccatgagacctaggtcttctccggcaagtgtacatattaactcttccagctagtttcgccgaagttgttaggagaaatttaacgacacttttgaattaaatcttttgatgtaaagacattacggaattattttgtaattaagggaatccccgaacctaaaagttgtttaaccgtattatatacatagtaaataagaatttttaattagtcgcattttcttttatatacggttagtatataattataaactaatttaaaagcgcg

SEQ ID NO: 48562 - DNA, 894 bp, Cannabis sativa
ttttttttttttttttgagtttcaccatatggactaatgacttttatatatggtatgttattttggctgctttctgacgactggctctgcaaactaatacgagtatttctaaaatttagtaagtcatacgaaaaaaaaaatattcttgggtccttattagaaaaaaaaatgtgatattttttaaaatcagtaaaaataaaatttataattttaaaaggaattttttttttggtatgggctaggtgaggccctaggcacaagcctagcccacctatactcagggtcaggcctgctcacacgcttccgaggaaaacttcccaacaggtcactcatctcaagattactataagtcaagcacacttaactttaaagttcttaagtgatgggactctagaaaacaagatgaacttttgatataggtggtttcaatcaatctatttcaaccctcttcaattgtgcagtcacatacctacacagtctcagaatcattacacttgatctactctagatgatgtgggattaaatagcttatccgatatatctccttacggatcacaagactattgactgtcacataaaacaccaccacagaaacccaataaaagctcacctgaaacagtaaaaattgcaaatcataaaacaccaaaatacagtttcttaaaccaaaataagatggtaaaaatttataaattgcctccctcttcacctagatatggaaaagtgaaacaacatataagaaaatataataagagaagtgagaagaggagaggacttaccagagcaccaaccgtcaaggtggcctgggggttgtcggagaaccgctgaggtggcctgtggtggctgcacaatatttttgaaaaccttagatcaacactgagagagagagagagagag

SEQ ID NO: 48563 - DNA, 777 bp, Cannabis sativa
aaagaattcttatagactagggggcaaatgttgacccccaaaaattgctaagtgtaatttttggagtcattagtattatgcccaaaagtctgctaagtctaaattctaaaaagaaggggatgtgttggaacgaggaggaataaaggcatgggtcaaactccccatgcccacgcctgcgcgcccaggctcctatgcccatgctcgcgcacctagcctccccacgagcagccctccctgcatccactcttacgagcaaccccccttacgccccttttatcctctttgcttcccctcatacatatagtctatatgcacataagctcaacatgaatgtcttgagtgtttacataatcttgtgggcataggagatgaggagtaataaagtagaccaaggctatgcgagcaagagcgccagagacaaaatagcgaccatacagcaactacggatactggagaccaagcctacctcactcaaagtacaaagggtagtgagaacttttgtcctattaaaagtgtcagatactccagaccatttaacatcctaattttcttagtatgaaaacaactttgcatccttaaactaggggaccacatataattcaaaattttcttagtatgaatttactatgtttcatagaatgagtagtgagctcgaggaccttatatttatatgggtaagatcttccatcaaggtttctgctacaattaattttgaaaattaaattaggaaattaaatatttaataaatcgtagtctgaccatatataaaatatcaac

SEQ ID NO: 48564 - DNA, 1578 bp, Cannabis sativa
gacctatttccctatttttgatgatgaagaagaagatgcaaaagttggatttctgatctgatacttggaaggcgcccatattcacagattgtcaatgttggcgctgggtgctcaatcattgattgagccactgccatgttagaaatttgtacttcaatgaccaaggggtcgttgtgcgggtaaaggccatggttagcatcatcttcactaaattagatgatagcctcttctttgtgcaactactttggctttctctctttcacaaccaatacttcatcatccctttgatcatattagagtattcgagcatacctttctctggctttgctcgaatctcaatgaatatgtccacccccaataatcatttgtaaatgtccgtccgctggtgggggcataagatgattttaattgttatttggttgggcagcttgttggttctggctagtcttaatataccggcgaatatgttgattatttttttctgataaggaactcaatttcctccttcagattgttgtactcgttggtatcatgaccaaaatctttgtgaaattgataggatttggaagtttccctcttgctcatatcttttttgatcgaagggggtctcttatatggagcaactgattgagttgccgtaaaatgatttttgagcatcagagaatacagtgaaggcaatgaactttcataccttctttcgagggtatttttgattgaagttattattgaactttccatttttcccacgatcatggttctttttcattgttcgacctattaccaccatggtcagaattattgccagcttaaggttggaaagtttgacctttctggacgaatgtattggttgcagttgtaggacttggatcggtcttattttgaccaaccgtatccactcatcagaatgcttcctcaagcttgataaatatgcatgctcagtccaagaactctcccattgcctacagtgagccttttaatgtctttccacaattcaccttttggatcgatacctcctagcacagctactaatctcccttcttcaataaatccctttactttagttgcctcagtcataaattgatggatgtaatctttcaaaggctcccctggtatttgctttacttttaccagatgttctaagtgggtagggagttgtcttgaagaaaagcattgtgcatagaactttgtggcaaagggattccacgaattaaatttcgttggtgctaacttgaagtatcactgttgggcggcctctgccaaggtagctaaaaaaattgtacatcttacatcgccttttactccttccaagtccaattatatcttaaactacttgatatgagataatgaatcctctttccccatgtacatcttccaagtgggcaacttaaacttggtcggaagatcaagggaattgatccgtgcataaaatggtgaacctcttgtctaatcgagctctaggtcgatgagttttgggccagttaggcattgaatgaggctcttaagttgatccaactgtgcttgccaccctggatcaacttgacatgccttttgaccggcctattgttgggttttatgccc

SEQ ID NO: 48565 - DNA, 746 bp, Cannabis sativa
aattttattaaatgaaaaagagcctaaattaaatatcataatcaattatcatgcctatagaacaaaccacttaatatacaatcaattatcatgccttccccttcttcaaaaaaatgactatctcatcctccataaaatatcaatttaaaggaattcttcatttaagctattttggaaatgcaattaactaatttcaaagtgtgacataggtaaaagatacaaaaaaaaaaaaacaaataattagataaataaaaagaaagaaagaaatgagcctagttatgatgaataaaaagacctttccaaatcagaatataacaagtataacctcatttgcacaatacaacaaaaaaagctaagattgtcccattgaacaagtagaagacaaaaagacttcaaatcattataaaataaaaaatcaatgcatacatagtaacaccctacaaggagcaaacaattaaagaacacctcctgcaagtcattttctcctaattgtactttggagcatttgtctacatacctccagtagtatatttatggagctgaatcatatggctcttgaatttaatattaccatgaaaccagatactctcaaggcgccgctcatcctcatgagccgatgtcttaggcccggctccacgagaaagagtgtggaaatctagaaccgggaggtcgaagtgttcagctgcggcaacgtcaatggagaagaaatcaggggcagcgattgtttcgaatcctgataataatgc

SEQ ID NO: 48566 - DNA, 1001 bp, Cannabis sativa
gacttttagattttatttatataaaatagggtctttttatgtatttttatgttgtcttattattttattattaattttttgtcatttatatgttattttttatgttgtttttattgttatttttttattactttcgagtaattttcttattattttcttgtatttttatagaataccgtaaaaatattaaaaaaaaaattaacttcaaatgtaaatatgtaaatattttacgtaattatatccataagaaattctcatatttagtatgtaaaaaaaaagttaacaataattatcaatctttaattatcgaccatggatatgggtgtgtatacggtattgacacgtcatttattaaaattttattttattttacttatgtgagatgagatacattaaattatgggatatatgataaaaaaattcttaaaagaacaaacatatgcaaaatcttaaaattaaaaccacacaataccttgaagattaaaaccagatcaaacaaaattcttaattatcaaatccccccaaaaaaaaactttagaaactgtaatttttaaaattttaatatctaaaattttaaaatctcacaaataataataattatgaaatatttgatgaaataatataaatattgtagaattctaactacaactacaataaatctttcttaaaaacaactaatcaagaaaaaaaaaaaaacctaattaatctttaggaaattgatagtataacaaggattgatactttgtcgtcactgcctaaatctccgttatcattactcaaattcgttcacaaggttaattctgcccaaatctgctggcatggtcgtcgccattagcgcatcgagatctccccctctctcattgcaatgtcgttgctaccaagtcggtacccaaatttccatatatggataattttcgcatctcagatttgaaagaaattagaagagagagtaaagaaataggcttgctataaatttccaaggaaaaaaaaaataaaaaaaa

SEQ ID NO: 48567 - DNA, 1225 bp, Cannabis sativa
attaaaattacacatcccaaggtctcatgtcaattaacatgtatgtatggtaattatagtttcctaagtttacagaaattacatcattatggacagtttatatagttaaagatgatagattatatataactgcagacgttgtatattgcgatatataacaaataacatataattatatgtatatgtatattgtgacaattatatatatatgcatgtttccttcaaagtaatgtgtgagaggcacatgcagacatgtgtcaataaggagtataatttatgattcttcatattatgcaatcaaaattaatgggattgaaatatttgtttaatacagctcaatatgttttctgtgtatttatatttgtacatttattaagtattatttatatacatacattatacatatacatatatagtactagacgtctaatttaggggtccacttttttctaagatacataacctataagccaagccttatatatacatatgaataaataataaattaaggatgtatatatgtatatatatatatgtcatttaaaagatatatattcctgtatatatataatatttctgagttatgggggaatgaatatattttatataccagaaaaaaaatatgagaaactaggcatcttagctagctccattcccatattgatgttaaagtatatataaatattatattaattacaataaatatatattatattgtagctgagccagccacagttcttagtgggagaaaaaaaattgttaaaagaatattaatgggataaaaatataataaattggaataataataaaaaccatataaataattaataggaataaaaattaaattatgtgggataaaaaatataaaatttattgggataaaaataaaaaattttaagaatataaataaaaaactattaatttatagggacaaaacataattttttaaaattttatacataaaaaattaatttataaaaatttgaggggatcgagtcaaatgatcccataagtctccccttccctttgccatgcagcaatactaaataatggtcttggttggatgggcttctaaagctccaaaaatatttttgttgtcggttaggtaagagtatttctaagcatactctttagctaaaataataagcgagacttaaaaaaatgaacttcaatcgtacaaaaaaatagttttctataataaaaaatggataggtatttgctaaac

SEQ ID NO: 48568 - DNA, 1355 bp, Cannabis sativa
taagaaatttagtgtttttatcaccgttaaaatttgaggacttttcaagtataaatggcggcggccggcggcggattgggtgttggtggtggtttgttactctcacggccggtgacctttgtcaccggaaactccaagaagctcgaagaagttcgcgccattttgggcaactccattccctttcagtccttcaagctcgatcgtaatgccctacccattaccattatcatatctctctctttctcaatctgatcgactttgttttttgatttttgcagtacccgaattgcaaggcgagcctgaagatatctccaaagaaaaagctcgtttggctgcccttcaggttcctctcttttctctctctctgtatatatatttatatagttgtgtatataaaggaagtgtttttggtggatttattgtttgaaaaggtgaatgggccagtgctggttgaagatacttgtctctgcttcaatgctcttaagggtcttcctggtaactatacttactttcttttcatctctgttacaaagattccttttttcgattatgtgagtttgaattgactcttggattgaaatttcctgcagggccttacatgtaagttgcttcactttctctattgagttggaatttatatgggttcatccttgaggtttttgtttttccattcaatttgttcttaatttcaagagtgattagtcaatagggactgatgagtgatgacattcacttgattggaaacttattttggttttcatcagttgaatttggtgtctgtttggttaagattggacattgctgagcttgttttgaagtctatactgactattggagtggacattttctcttagaaattaagttttatgtgcaattttatgttttacttattattagtttgtatatattgtgcactgaaaattggttcacaggagacttaattttccttttttccatatggtattgcttagtttcaattgtatgcacacactaattaagagaaagctatgattatttcttctagttcatcaccttcatttttcttctgccttttacctttcagtgttcagatgttagttgtaactgtgtttgggcatgattcatatgaaataattgttagtgtatgtaatggaaaagaaagcaatagtgttaaaagagctttttgagagtgtacttgtaaccaacatatgtggggatatattttcttgcttgattgtctaattcttttacaaataataataataaaaaaaaacttgttaatcatgtacaagattaaggtagttctattcattgaaagaaattttttggtttatatgacttcttgtcttggttatgcattgattatttaatgatgt

SEQ ID NO: 48569 - DNA, 1630 bp, Cannabis sativa
ccctaggagttgtccttttggcccttggcctatgtctaggcaaagggctcatgcctatcaagtggcgtgactgctcaccaagcacatgtgtcataataggcatgtttgcaagaaactggatgtctacgtcgtattaaggagggacattggtcggggcaggttgagtttcacatttctcaaccaattggacctacaaaaaaaattaaataaattgttagagttgaatataaattaaatatagaatgaatgattaaagatataaaattacttacatgcacttcttgtgtgtatttatcgcgccatttgttattcttgtggtggaacttttaaactatccacgacactggaaagttctcccatcttgagattagcctatatatttatatatatatatatataattagtaatatattattcaaaacttataattaatttttggataataaaatttataacattataccccactgatgatgtggccgagaatggtcttagactcggatccaccttgaatcttcatcttgcttcaatttattgcattctattcaactattgcctataatataatgtaaatttattgtcaactaaatgttcgaaaaagcataagttaatagaaaattaattttagaattttaatatctactcgttgttttgggtctttccagtaggcgatggccttttcctacacctcttgtgtgatctcctgtggacgtgatctcctagtcacttttgcctctccaagattcttaatattcttctttcatgcttttttttgtgtctgatctctagtcgcgtagtctctttgacattaccaaattttagtccacggacttaagattgccaactgggaactcaaattttatatgaaaaaaaataaacattaaagtaatatatatttttttgtaaaatagttttgtttgatcttttacaacaaaaattgaatgttaccgctagtctatcctagataatttaaatgtctcttttgtcaacatcctcaaaattgaacttatttcatagaaatggtattgtgaacaaagaacttgaccatgttgttaaacttgttcccatagtcatatattggggccccactctctgcatgccatctaaattttaatttcttccccgcaggcagcttggccaattcttcttccacattattcgccttgtacagtcctctaactttctttttcttactgttgcttgcacctgtgccatacattctacacatacaagccatatttattaataataaaataagtatttacaatcttaatcaatttattaacaaaaggaacatgtacttgatataactaatggtgagtttaaatattttaatactttgcaagtcatcataataatcatcatcacccctaaccattacattgttatcattatcacgatcactagtgtcttcatcatcactatgaataataaaatcttctaaatcttgacggtcaggctgcacacggtccatgttggtcactttagttgggtcgacatcatcacagacatattcgacatcgtctagttgtggaagttgtgttggaaattattttagcaggatctagatttactaacaagtatgttggattaacagcctaatatgaattctaaaacaatgaaaaataaa

SEQ ID NO: 48570 - DNA, 2754 bp, Cannabis sativa
cactctttccctacacgacgctcttccgatcctccaggaccggatgggatgactcgagctttttaccaaaaaagttgggccattgttggggcagatgttgtagctaccgtgcagaatttttttgcttcgggtgagttgttacctggtttcaatgatacgaatcttgtcctcattcctaagaagaagaattcgattgtgatgggggacctccgtccgattgcgctttgtaatgtcttgcacaaaattgtttcaaaggtccttgccaatagattgaaggggcttcttgatcaaattatatctccataccaaagcgcttttatccccagtcgtttgatatctgataatattcttgtttcctttgaagttttacactatctcaaaaggaaaagtcaagggaagaaaggatatatggctctcaaattggacatgagcaaggcttacgatagggttgagtggccttttttagaagcgattcttgttaaaatgggcttccatcagaggtggatcaatcttattttggattgtggtcgatcggtttagtatcatattgtccatgatggttagcggtttggcccgattttggcttctcggggtattcgtcaaggagatcctttatctccttacttgttcactctttgtgctgaaggtttctcgaccctcattcagaagtacgaaactaacagatggattcatgggtgtaagattgcgcgtagtgctccaactatctctcatatgtttttcgcggacgatagctacttgtattgtcaagcttctgaggcggaagcttcttactttatggatcttttgagtaaatttgagttagcttcaggtcagaaggtgaatgttgctaaatcatcaattttcttcagtactaatacagatgaaggtatgagagatcgaattattagaattacttgaatggctcaggctgatgataatagtacatatcttggtctttcgagtaccatgggaaggaataagtccgcttttctgggcttcttaaaggacagggttcgaaaaagggtggaaagttgggatgctaaaatgttatctcgagccggtaaggaaattttaatcaaaattgtggctcaagctttgcctagctatgcaataagtctgtttcttttacctctgaaaatttgccgtgagctggaaagaattttatgtttgtattggtgtcattcttctcctaatcaaggcaaaggtataacatgggaatcttgggataggatggtggttcataagcactctggtgggatgggctttcggagccttcatgatcacaatatagctatgttggggaagcaaggctgccatcttctcactaatgaatcctctttggtatgacgtatttttaaggcaaggtattaccctcttggatcttttcttaatgcaagcattgggaataatcccagttatgtctggcgtagcatatttgagagtcaatccttaatcaagtctggtgttcattggattatagctaatggctcgttggtggatgtgttgaaccaaccttggttgatgaataaagataatccgtatattacatccactcatccagctttattgaatgcaaaagtatccaaattaatggttctgaatgagagaaggtgggatgaggatattcttaatgatcttttttctgatgttgacaaagatcttgtgaggggggttgtgatcagctcatcttgtgaatttgactctagatactggtttttcgaagcttctggtcaatattcagtaaaaagtgcttataagaggcttcaagctgtgaatggtagatgggcgggtggggataatttggggttgtggaggaagttatggaacttgaaaattccagcaaaaatctctgtctttctttggtgagcttgccgaaataacctcccaacatgtatcaatctgaaagtgaagcatgttgatgtccctttgatgtgccctttttgtcacctagacgatgagactgtggatcatgtgcttgttgattgttcattttctcgtcaatgttggcaacagttttcttctctctctggttctgctggtgtgtattttgtcgattggtttttgagcatggccagcagcttttcctcttctggtttgggcagtgttgcagtcatctgttgggctatatggaaagcaaggaatgagttagtttggaacaataaacagtcagttgcaaatgttgtggtgtagtctgcattagcgtattttgatcaatggaaaagtgcgaaaactcaatcttttgagagtgatttgcctactggtgtgatcacttctccgcgctgggatcctcctcgtttgaatacgatcaaagtcaatgtagatgcttcattttttgcttctgataagaggcttggaattgggtggttggcaagagatcatgaggggtggatcatgtatgctttagctgtggcacaccaggttgttgtcgagcctgttatggctgaagccataggacttaaagaggttctaaattggcttaaaactactgattttcaacaagttgtggtggagtcagattgtcaagtgcttgtcaatgctattcaaaacaaagtaactatgtattctccttttggtttaatagttgatgattgtgtctctttgatgaatgatttaaggagtgtttctcttaattttgttaaacaatctgagaacaaggcagccaactttttggctaggaatgcctgtttgtactcaggtcgtagttatagtagggggcttgtccctactgaattgcaagctattattgtagctgat

SEQ ID NO: 48571 - DNA, 1385 bp, Cannabis sativa
ttattaatgtaaacagaggtaataataaatcgagtatatcacaaaatccctgatgaaattcttgaaaatttccatctctctctctcgataacaatcttatttgaccaaaatttaaaaattcaaacttataatgatgatggggggatgtatgaatcatgattaaagttacacttgtaaattaattgtgggtcggttaagaatattatgtgtttgtttgtttgtttgttgcattgtaatttaatactttattatttgttttgttgttacttctttttctatatgattgaattgaagtgaggatgaccaatcgaccacaggtatcaaagatgagtaagtttgtcagtttaggggatagtgatagtgaaatagagggccaacaatgtcttggcataagaaggcaaccacaaatattagcctattgcctatatatataaacaatggttggagtttgtagtttgtatgtattactctgtattccaccacatgaaagaggcagaggacagctcagctaagccagcccaatgcccctggtggctggtggtggtgagtctttgagaccaacaatacatatagcgtgacttcttctcctcagtgaccatgattcggtgttggttggtcagggttcgcaccaccgacgccatttggtgtgtcccttcttggcttggcccccattatactattactacctattaccaaccccactactactattatttcttctttttatacaattatcagtacactcctcacacttataataggctgaccaatttatgataccaccatacaacttaaaaattatacaaataaatagttacggtaaattatttgaattttatttttgttactatttgaattttacttttgattttataaattatttaaattttttaaaaaatttacaagtagttttaagtagctataaataccatcctaacaaaaaaaaaatagagataattttcttattaattgactatttctataataattttcttcaaaaagaaatgaagacatctgcagaaataattgttcattgtagacaaatggcgattagtaattagtgcgaggcaaagataaataaataaaaaataaaaagtaagagtatgtaaattagttatctattactaaaatataattcatattacaaaatattttaataatgtgcaaaaattgatccaaatttatttgaacacttctaataaagtgatataaagatagtttataagtattttatataacaataaatattactattttatttacttttttgccattcattaatataattaataactctttacatgtatttatatatttaatatgagttttgtacctctttatcaaaaataaaattaattttacccctaatgcattagagcacactc

SEQ ID NO: 48572 - DNA, 1845 bp, Cannabis sativa
aagaagatgaagaagaagaactgaagaagaaaaaaaataaaaaacatatatattaatggagaaagataaagagaacttgaaaaacaaagagtgaaaaaaatatgatgaataggaagaaagaataatagagaagtgagattaaagtaaaatgaacggttattaatattgagggtatcaaatttttcatcatcaattttaattaaagaaaaaaaagactatcacaacataagtcaaatcacaattttatattatctaaaatataatacaattttagttaaaaggaaaaacaagtgtcagtaaagtgacaatataaagtcacattatacttttatcacatataaaaaataataaaaattgcttaataagtgctcaatacacggcagtatacaataataaaaaaaaacagtataaaatataatattatcgtgtattaataaaaaagaaagaaaatagaaaaaaaatagtatatgggaaaaaatgaatgatatgacatgaataaataataaaaaagaatatgaaattaaaaaaaataataaaatttaaaatatccgaataaaaaaaagccataaaataaatttgataaaacttttaataataagtatcattagaaagttatcgaagaagactttgttgccaacaaaaagtcaacagtgccgaaaactcgtcaaaaaaatcatcgtcacaaaaaaaaaattgtctaaaaaatcattgaaaaagtcaatggagttgtgtcgtcgtcgaaaatatcaccggaattagatgtctcaatttaaaatataagcaattctataacataatgaataaaaacaagtaacacgcaataactcaaaccaattatatattaaaatagaaacggttctatgacataataaacaaaaacaaattacatagaataactcaaatcggttataattaaaaatataatcggttctataacataatgaatacaagtaaataacacagaataacttaaaccgattataattaaaaaataaagaagaaatcagttcctaaaataataaaacataaattaaaaataaaacaattttcacaacaaattaagtaaaaacaaaaaacatataatacctcataaaccatttatagttaaaaaaaaaatgtgtgggaatcaattctacaaatattgaagtatatatctaaactgaattggttctataataaataaaataaataacacgtaatttaataactcaaaaatataagataaaaaaaaaccggttatattgatcaattagtttaaaatttgagacaaaaaaattaatttcgtaaagcaactaaaataaaagttacatagaaaacaattaaataagataaaataaaataaaaatcagtttgttaaattaactaaataaataatcggtttccaaaataactaaattaataacgagttacttaaattaattaaatgtaaaacaaatttttgaaataaatattcaataatcgttttctgaaatggctaattcaaaaaccaactaagacatgaattaaaatataaccggttctacaacaaaataattaaaaacaaatagcacacaatatctaagaaaccgattataattagaaaaaaaaaaaaaaaacaaataactaagtagtctaagttttcatcatcatcgaagttagatgctggagttgaacattagaatatgagataaaaaatcgattatatttatcaattagtttaaaattcaaaaaaaaaaactagttccgtaaagtaactaaaataaaaattacacaataaataaataaaaactctgcattctaccatgtttacgagttttatggcccaaaattcactaaacatgcatattgatactcaagaaaataatg

SEQ ID NO: 48573 - DNA, 1229 bp, Cannabis sativa
cgcactcaccctgatgcgcacgtcgctcagctcgctgcccagctcgctcgagcaatgcccaggccccggcttgcggaccctagtaggggtctcacaaaccagcccaccagaagaagtcgacgtcctcgtcgacacacttctgaggtattcgttcaacttgatttcgaattgccacaagttgacggctttttcccacgaagcttctgcctcgctttcgccttcccacaaaaccaaatacttcgtccttcggtttttcttgctagctcccaatatacgatgatctaggactttcgccaatttcttccctaattgcatccgaacagtaggaggtgctctcacgccctgtggcagatgactgttggatgttgtaacaaaactgtgctgtgtcaagcaactctacccaattcctctgacttcctgttacataatgccgtaggtattcctcgagcaacaggttcatgcgcttagtctgtccatcagtctgaggatgattagttgttgaaaattgtaaatctgagcccaataagttgaacaacgtggtcaaaaacttccctgtaaatcttgaatcacggtcactaattatgtcctcgggcaatcgaaaatacttcacgacattttgcataatcaactccgcagccacctccgtgggacatgcgtttggggcaggaatgaacacccatactttgagaatcgatctaccaccaccaagatagacctgcatcctgtcacgtttggaaatcccactatgaaatccatactaattgactgccacggcttctcaggtatgggcagggttgcaacagctctacttcctgccttcgctcagtcttatcctgttggcataccatgcacgtcttgacatagaactcgacatcctgatccattttcaaccacacataggattttgatagcaacgccatcattctggccacaccctgatgaccagcccactgagggtcgtgggtttctctgagtagttccttgcgcaaaccaccacagctaggtactaacaatctgccacccttggcataaagaagtccatcctcttcccagtacctcttcaattcaccctctttcgcttcaccctaaagctttttgtaaacgagaacgagcactgattgctccctcacctggtcgagaaaggttgtgctcacctgagacaacgccccaacaaaggcatgtacttgtttgcgattaagagcaatcgccacttgattctatgtgtggcc

SEQ ID NO: 48574 - DNA, 2128 bp, Cannabis sativa
ttttagataaaagtgtcatatattttttagtttgaaatgtattggtttaagaataaaatattaaggttttttaagtatagaaaatcaaatttcaatggatgccatcaatgtaaacacaacattcattaaaccaaacttgaaaaatataggccaaaccactcaacctataaaaatctattttctctccattatcaactttatttattttaacaagattctttacaatcgcatttctaactgaatcaagaaataaataataagactctttgccccaagcatatttattaaaccttcactatcaataatattcaactctaagtcatatacttttttagtgtctgaatcacttaaaacaaaacagtgaacaaagtataagacaacaactttcaacgcaagctcatcatcattgccaaacctttttctaataaaagcgttctccatgtccttcttgtttatttctttaaaactagtaaaaatcttctccttcaacaattttttttcttgtttatacctcaacttgtcacattgaccagaacaatcaaggtctgaaaccaaagcgaatttctcaatgctaaaccttagcatccgaccagtaacaataaaccacatctcattatcatttggttggaccacctccctcaacaacaaacggaacaactggtgttgcaaaacataagaaagatttcttaaaaagcatccaaaaacagtttgtccaaacattttcttctgtttaggggacaaaatagagttgatagtctcaatgatttgaaaagagcaagtagagatcacccgcgtagtatgaaaatcttcattactaaatttattatcccataactaaaaaataaaatagtgaaatcaataaaatagtaaaacaacaacaactataaaataaacaatacataaataaatgaacaaattataaacttaaagaaaacaaaaaattagggaaaaaaaaaagccaataaaaacagagcatatacatttgtattttaaaagtggaaaaagaaacccacaacatcaaaggaacagggaataaacaaaatataatagaaaatcctaaaaatcaacaaatagtcaaataatatataattcagcaaaaaaataaataaataacaaaattatatgaaaacaatcatatactagataaaaaagcctaaatagaaagtttccaacaaacattaaagaaaaatatggaaaaaaaatagatgacaaaaaaactctaagttaaaacataaataaccccgtaacaatatataaacaaaaaattaacaaaaaaatataatacatataaaacttaacttaggattgaagaaatatgaacaaaattataaataaacaaagaacatagaacatataaaaataattttaaaaattaagattgaaacccacaacatcaaatcaacaaagaaaaaaactctaaacccgaaaaattaatcaaataaaaaaataaatagataataaattatttgaactacaaatgaacaacaaaaagaaaacaataaaacaacaaaaaaataataattcagatatacctttctaggacgaacaacaacgaaatcatcgtcattatcatttctcttcctcttagctttcctagcatcactagatgtataatcaggaagcttagatgatggctcaccaacatcaacaacaactttggatttctgattagggggtttcaaaattttttgagcaaccgatttgggtttagattgtttaataggctttttattttttttttggtttcttaggagaagggaacaatgaactcgaacgagatcgagtaatagccattactcaaaaataaagatgaaacgaagaatgaacactctgaaagaaaaaaaaagaaagaaaaaaaaaagaagaagacgatgatgagaatgatgaagaagaagaaattcaaaataaaaagagaataagaagagagtgggttagagagtgatactgataactgtcggagaagtgattgatatttaacagaatggagggaaacgtgtaagcagttaagtgacaaaagcaaaaccatattttttgtaaaattttaaataataaccgtatatatatttaaacaaaatggtaaaaatgaaaactgaaactatataaccgtatatgttgaccgaggttttcg

SEQ ID NO: 48575 - DNA, 2060 bp, Cannabis sativa
tttttttttttttttttttttttgtctttttatctttttctactcattaacttttgatatatttttgagcttatacacattaaattttttatgataattaaatcatttttgagtaaggtaaaataataagtttataaacctaataattatgattttcattcaaaatattaacatggtgcagagtaattcgaggatggcatcgagaacaaagtactgcactccaaggatcaaatctttcgtcatcccattatccaattattcagttgaccccagtgcttttccaggtatgaatttgatagctctcccatattaccattcctgatatgttaatgtatgatctcttatattttttatttcttgtcctaactagcattgcccctttcttttttcctcttttttcagtctctttttttgaggtgagtttgccaactcagttaagttttttttttttttttttttttgagggaattaaatttaaaacgttattaaattttctgtttttttttcttcttttaatggaattaactgaattatgtagaaaattttgaaatgcagttacttggtgtagtggacaggcttaagggaattactagcgaggtggttgcatcagaatgcataagaaaatattacgaaagtggagggattcaaatgataaacgcaagtgatggtgatacccaacaacttgcacaattcggagcccatttcattgctgacactgatcaatcccaagcctgtaattttgctgcttgtgttccttccggagaggacacccctttgcaggtgaaacccttttacaaaccaataactaatatttctgcaaatgaaatgactaaactctggaaaagtgtttgtcttatgtttcaacaactttatatgacatttttcaggcttaatctttttaggtgagctatttactcacagtagataatctcgggcttaatattttgaataaaagtcaaaattgtttctttctttaaaaattcttgtttgctaaattaaagaaatggagctctagttttgggttaattgtttctaaatcttatttcaacaaatttaaaattaagtttagttacaaatataaaatactaactgattcaggataaaagtgaatgaaaattataattttataatattattttattttatttttttttatattacttacaaacttaaaattttaaatatttttgttacaagtatccctttaaaaaattattttttttatgagtattctaaaattggacagtactattgacataatattaaatttaatatatctaggcatattgacttctcgaatttatggtgaaattttgaagcacttatagaaattagatgcttttatatggacatgtgaacaacagagggcggagtggatcaagttcttgggaagttttgtaaacgttgaggaaagagccaatcatgtgtactccatcgtaagaatattttcaatcaatctttctaatttactttaatataaatatatatagattatgtgtcaatgtatatatttattatttggaattattttaaaataccaaaatcaaccaaaaatttatgttcttttacggaattttgaattattttttatttttgcaaattttttttattaaccgttgtttatacgattatttttaaaaaattgtaattttcacattgtgaaaaaaataatataatgttacaataatgttaaaacaatttaaaatcgtaaaaatgtaaataaaaaaaatcataaaaactgtaaaaataaaattatttgttgatgtatttgtaaattttctttatttttttttttttttttgagaataaacaatgttattataaattaaaatgagtcatttacaataacagagtaaatggaaggaggaaaattctcccaccaagaacaaacctcatccaaccctaaggcaaactttgccaaactatccgcaactgaattagcattacgctttacatgagttacaatagcattagggaaaaaggaaaggaggtaagatatgtccataactagatcactgaaggctgagatgcctgctgctggagactttaaagcattggag

SEQ ID NO: 48576 - DNA, 591 bp, Cannabis sativa
tatgttatactgtgtatttaacaatacgtacaatatctgcatgcctataaatatgtagacgaagtgtacatatagttaattacacgatataattattacaaaaaaaaacttacttttagtagtaactttttagttacaatatatatagattttttgtgactttgaatcataacaaaaaattactttttattataacatagtgtatttagatataagttgtcattaatttagttttagtcacaacaagtatcgtaagtaaaaatatatttattcaggctcgaccctaggctaacgcggactaaagcgtttccctagagcccaaaatatttatataggatacttttttgcattgaaaaaatggtatttttgtaaagttgtatgaaaagaggctcaataatactcacactttgcattagatataacacacacaaaatttcttaggcccattattacttagggtcggtctcctgcatttagtcacaacaaattgtaatttttgtgactaatacttttaattacagaccttttagtgataacataaatcttttcactcacaatcgtaaattctattgtgactaaaagtaaacaaat

SEQ ID NO: 48577 - DNA, 1996 bp, Cannabis sativa
tgtttatgtgattagaatgaataagtgtgcgatagggactagtctgtacttttctttttctgtatcattggttaactttgctaacatatccgtgaatgcattttgatccttagggatttgcttgacggaatagtgcttgaagttttgcaatagttctcaagattttgctacataactagccatctttactccctttgtttggtattctctagaaatttgattgactaccagttgtgaatcactctaaagataaatattttgggctctaacttcttgagccaattgtaagccagtaatcattgcttcatgttcaacttcattattggaggcttcaaactcaattcaaagtgcactttgaagtcgatgctattgtggagaaattagaatgattcctacttcagaatctttctcatttgatactctgtctacatatatcttccatatttctaactctgggataggttcttcaggattgtcatttattcctatgcactccataataaagtttgctaagtcttggcctttgatagagactcttggctgatattgaatgtcaaattggcttagatccatttcccattttaagagtcttccaaatgactctagcatttgtagtacttggcagggaggatgatttgttagtacatttatggcatgggcttgaaagtatggtcttagcttcttgaagcaatcagtaagtaataggaaagcttttcaataataggatatccaaactttgcacccatcaatttcttgcttacataatatactgaaagttgtacccttccttgttctcgcactagggcagcactaatagcatgtttggacactgccaggtataaatacagtggttctccttccaccggtttagacaatattggaactttagtcaagttctcttttagtttctaaaaggcatctttacactcggttgtccattcaaatttattgtttctgtgcaaaatgttaaagaacaggatgcacttatcagttgatttagaaaaaaacctgttgagtgctaaaattcttccagttatgctttggacatatttatgcttctagggtgaaggcatgtctataagagcttgaatcatttttcggattagcttcgattcctctggaactaacaataagccctaggaatttccatgaggaaactctaaatgtacatttcttaggattcaacttcataccatatttctagatgataggaaaagcttcttctagatattcgttatgctccatggaagtttttgactttaccagcacgttgtcaacataaacttccatgttctttcccaatacatccttgaacattttattaacaagacactgatacgtggctctgacattcttcaatctaaaaggcatgaccatataacaataaatgcctttatcattttggaagctagtatgttcttgatccaccatgtgcatcttgatctggttgtaattggattatgcatccataaaacttagaagctcatattgagatgtggcatcaaccatttaatctattcaggaaaatggaaaatagtcttccggacaagctttgtttagatctgtgaaatcaatgcacattctcaaggttccatttggcttggggactaacactggattagagagccagactggatatagagttttctagagaaattctatgttggttaacttatctgcttctgctcaaattggattaaagggtcttctcatctgacagactaggtttgcctttgggtctatgttcaacgcatggcagattacacaaggactaatcccagtcatatcaaaatggctccacgccaacacatcactatttttcttcatggttgatacgattttctctcttacattcagaggaagattctttcctactttaattggcttccctcgggctgagaaagcccttcccctgtcttctcatgcacggacggtacaatagttgcatacaaatgaatgcctgcattttccgtttcctttttcatagcgatcaata

SEQ ID NO: 48578 - DNA, 725 bp, Cannabis sativa
gccaactgttataacttgcagcaatagacacacggacttgacaggataagtataatcccaacacaaaaaaaaatagcacagggagataggaaatggattgaaagcttctagtcagaatttggcctggaaaatggctcatagtttgtaaagatgtaattgatatggaatatattgtcctgtttcatgaaaaaaaaaaaaaaaatacaacggcgcgaactacaatttattttctacttaatatataagcctaataaaattaaaatgtacaatagtccaaaaatttttatattcattaatatcaatgattcataggttacaaatgattacaaaattaaatatttcatatcaataaatatgaaatgaaaaatatatatttaatctacgtacaatatctttatttggatttaattggacatgaatatgtcgcgaaatataaactatgttttattcttctcaaaatgattttataacccatcatgattacatcattcaaggtttaaacccttggaggttcgataacccacttgttgccttggatgaaagtaaagctcatgaatggcttgatctcctcatcagtcaaaatctttgaatacttagcgcgtccagatgtgcttgatccaggtccggtacacttgtactccccataaaacacatcactgcaatgggaaaatgggttatcattttaattattatagaatatgttgacacatgaatagttataatga

SEQ ID NO: 48579 - DNA, 1024 bp, Cannabis sativa
aactcgacgttggagggtttaacttcgggggttcccatgatagggtttccccaatggtcagaccaagggatgaatgctaagttgattgaagatgcatatggaactggagttagagtgaaactcagtggggaaggagttgcgggaaatgaagagattaagaggtgtttggaattagtcatgggatgaaaagaaaccgtagcggtaaatattgggaaggaaagttgggtggaaaagagaagaaatgcgaagaaatggaaggatttagctcgagaagctgttaaagaaggcagatcttctgataagaatctcaaggcttttgtgagtgagatggttgaacgaggtggtaataagtaatatcttgaatcttctaattaaaatgttgtttgtatatcttaaaagatatgtttacataactatccttaaatgaagatgttagttttaaatttcgtgatatttttcaaatttgtgtggattttgtccttgaagcttttattagataccgaaagatttatattgttctttacatttgttcattaataaataatatatagatcttgaatctttctatttacagtgatctttttatatctttagatttacatccaataaaagtacagatatatattatacatgcatgcattgtttggttgaaagtatagaaaattaaaaaagaaaaaaaaagagtatttaactcgagaaactgctaagaaagtggatcttttagtaaaaaaatgaataataataataagggtaaatattattttaggctctctatattttacaaaagttactgactcatcggagtttctattttattaaatgataaattagattttatattttctaaaatagtacacttagttcaattttcgccaattaatttttaatataaccaacttctctaatacttatattgtaaaggggagttatatttgcaccccataaaattataaatacacctcattattaaaaaaaaataaacttaaataattttaaaaattactcttaatatttttttaaaatt

SEQ ID NO: 48580 - DNA, 2271 bp, Cannabis sativa
gggacaatgttctccaatagtgaacgatcttatcaatacaagcagtaaagaactcaagcttgcaaaagatgcagagcttggaggctgatattgtatttataggcaaagaatcttacaccagaaaagaaaaacagaataaagaaaagaaaacagaaaaataaccaacttggacagaaaacagttggacagagttaactaacaagctaactaacttctgttacatgttttgctttatcatcccccctcaaacgaaaaggtgtggtacacacattgagtttgttctttaaatataggaatctgtctttgctgagtgctttagttaagatatcagcagtttggtctagtgatggcacgtatctgacttcaatttcttttgcaagtatttgatcccgaacaaagtggagatctatttcaatatgcttggacggcgcatgaaagacggggttggctgcaagagaagcagccccctgattgttgacccaaatgattggtggggctggttgagacatgtgcaatttagagagcaaagaacataaccaccgaatcttagcagctgtgttggccaaggatctgaactcactctctgtgctacttctagcaaccacgacctgtttcttagctgaccatgagactagattaccaccaaaaaacagagcataaccgcctgtggattttttgtcatcgggacagcttgcccagtccgcatccgagtaagcttggagactcatgtgcagactcgcttttatatgtaacccttcatgaattgtgcccttcaagtatcgaaacaggcgcttgcaagcctcccagtgaaccgtagtgggagcatggataaattgacctaatttgttgacaatgaaggcaacatcaggccgtgtgagtgagagatattgtaatgctcccaaggtacttctgtacaaagtgtgatctgaaaatggttcaccaatctttaaagacaatgtatgagcggaagtagtgggacttgggcttggtttggctccttcgaagttgagtttagtgagcagatccgtaatatacttggactgggaaaggtatagaccagtatgatttcgcagaacctcaactccaagaaagtagtaaagactgccgagatcttttagtgagaatttagtatttaaggaggtgattaagtcattgatgagcttgcagtttggtccagtcacaagtatatcatctacgtatactaataaaatgatgagagagttggcagtgccatgaacaaacagagacggatcgaatttagaagacttgaaacccctagagaaaagtgtggccttcaacttgtcattccaagcccgtggagcttgcttcaagccatagatggctttgtgtaatttacacacatattgaggatgtacagggtcttcaaaccccggtggttgagccatgaatactatctcctcaagagttccattgaggaaggcattggagacgtctagctgcttgataacccagttataagagactgccaaggttaatattctgcgaactgtagcaggtcgaacaacagggctaaaggtctcttgaaaatcaattcctggagtttggtgatatcctttagcaactagctgtgacttgcatcgatctaggcttccatctgcattgagtttgaccctatgaacccatttattgccaaccaaattcatgtaggattgatatggaacaagtgtccatgttccattcctttttagagcctgaaattcagatgtcatagaagcattcgatatgggatcagcaagggcctgtttgagagtttttggctcggttggtaattaatagtgattcaagcaggggatacttggtggcaatatatgcttttggtttagaaatgcctgctttggatcgggttgtcatgggatgtgtgttggctgtgggagtaggctgtgtggtgagtggtacagttgggacatctgtagcagtaggtaaatcgggttaagaattagatgggaagggatgtgtatcaggtggatatggtaggggaacagtagtagggtcagcagatgtggaagcaagagtatttcttgttgctgcagtaggaatagcagctgtgtcattattcccttgattcatatggacaccagcagtagtggtatgttgagaagagctgcaagatctatgtgaggatctcatattgagaacctcagaggcagtagaatggcaagtattaatatgtgattgtgggaaatcagtagagaatgtagcagttggaaaaaatttaggtgtagtggacattactgttggaatttattttac

SEQ ID NO: 48581 - DNA, 1931 bp, Cannabis sativa
tgttacaaaccgtaaaattcaggtggtttagccgccagtatcttttttatttttaatttatatatttttctatgaaaataaataacactataaattaacaatttcaatcatatatattggatataatcaggtcaattcgtgttgatacatgtgtcgatcctaatccaactcaaataataatcgtaccattcaggtttgattcaattttaacctatggctactttttataaagttaatctataataatttatattgaattcatatattgttgccacccttaattttaaattaaatatattttgttcatctaacatatttttctcatcaacagggccgggcagagggtggggcagccggggcataggcctcaggccccataattttcgaggccccaaaaaaattaaaattagtatatatacatatataaaagttttaatatattaatatttaatttaacaaattacgagaagctcttgtggcacaagcggtaaatagagtgttatgtgtaccttgagatcaaggattcgatccttcacacatgcatatgtgttttgtttttgtatttcaaagtgatgtctaaaaggaaaaaaagataataagaaataaattaaatattttaaagtaaatttataacactactatattttaaatatttgtattaaactgtttaaaaaaatatattaataataaataatgtatatttattatgtattttttaaaaatctatatgtatgtaaaaaaattatatattcttttattattatttttaaaaaaatgctaaaatatataacacaaaatgttcattgtaattaaatattactttattgagttagcttgtacgacaaaaatttatttattacatagagataaaataattaaaattgatattatgttaaaatttaattaatatttatttttaatttttataaaaaaaataagacttcttttcaaatttcatcacaagcctcttcttaccttgagacggccttgctcgtcaaagagcacaaatttgtaaaacataagtcacttaaatgactttcgacataataactgatttgaaatgattattattatacagaaaaagaaattttttttgataaatactatgtttatatttggtgtgattttataataataataataataataataagggatatttgcagctaaaccatttaaacttaatttttttaatacttaactacaaaaaccaaaatttgatggcaaaacttactaaattcaagttccgttttgctctacacatttccattcaaaaatctcagttgagtgtcacattggattgttcacgtgtacacaaatgtagttcacgtgtacacaaatgtacacatgacaaatttttagtagttcacgtattattacttattaaaatattataataaataattaaaaattataaaaataaataaattataaaacaatatattatttcattttttttttctctttctctttcttttctacagagcctcatcgcctcatctcaccttgtcaccattatcaccaccaccattgtcaccaccgctgccactaccattatcacctccatatctattactctgaattgaggagcttgaagctctatttggacccttagtcacgcagtcgaccacggtttcattcaatcagcgtctaggacagtcgaatgaacatggccatggacatctttagaagaggaagcagagagggagaagagaagacgacgatttaggaaagaatggattggctgtggtttcgccattgacgaagatgagaaaccatgttcagaggaagaagaagaagaagaagacatgggtgattgggtgatctgggtggggtttgggtgattgggtctgggtagggtttgggtaattagggaaggtggaagaagaagggaattgcaaaagaagaaagagaaaaataaaaagaataaa

SEQ ID NO: 48582 - DNA, 810 bp, Cannabis sativa
attagttttgacttaatatttattcaagccctcactcaactaaatttctggtttcgtcactaaaagtaatgtataagtatataatgtgtaagtactataagactacacgtgaagtgaggacgtcgttacaagttattgattatttaccagtcgtcaaatatatgttaacatgcaaatgaaaccctaattaagatcaatgaatatatagcattcaagtatatcatatcatctatatataaacaagaatataaagattaattaatataataccttcacataataattaacgtttgagattaagcgtaggtgccaactaaactaatcataaataaataaaataaataacaaaaggattaggtatatattaatgctactacactacttcaaggttaattaactcttttaagttttttcttttacctatttttgactaataaaattttagtagagagagtagtaggccgggcaatcttttttcgattaataacccccacatggggacaagacaggtgtagttaataaaaatctgaactgaaaatgatatatgaagataagatatataattaattaattaattaatggacgttttcatatgtatatttacattgaatttgtctaattggttacaaacatttaaagcttttaggtttaattaaacccaccccacccattaattaattaattaattaagctcaaacccctctaattaaattacaactgtattctttcaaaaaaaaaataataaaataaattacaactgtatttgtcatgaataagtcaatagaagtggtcgtggtgtagcaagtggca

SEQ ID NO: 48583 - DNA, 1202 bp, Cannabis sativa
caaatatagttgaaattgagatccacatccaaggaacctgagcggaaaaactcctgcacacaatccgtcactttctttcccacggtatcccaataattcctgaaaaacgttcccgacatgccatccggtcccggagctttgagaggatgcatttggaaaacttgattcttgatctcatctactgtgggaataacatacaaagagaagttctcctcattcgtaaccgaaggggagattaatctgtccagccccacggggatgcaaggggcagaagattgaaacaagtcggagaaaaatttgttgaggatacggcctttgtcactctcactgtctcttctcttgttatcaccatcatacaaggcccagatgtgatttcttttccttcgcaccatggtagaagcatggaaaaacttgctatttcgatccccgtgcatcagccacaactctcgagatctttgtttccaaaccagttcctttctcttccattcctcaacaatctgactcttaatctgcttttcttcctcactataaggttccatcatatccaaggattgaatccttgaaagcttctcctcaagcatcttaaggttggcgtcattatccccgaaagacttcttcttccacacttgaagggcattcttagtgatcttcaactggtgcgctaaactgatatgacctcgcttatgttcttcccccaaccaagaatccttgatagcctcaagacaagattcttcccttaaccaagcttcataaaaccgaaatacccgagagccctttccttttctcatatcagtgtcaaggatgattggcccgtgatcagaagccacaataggcaaatttaaaacaccaccattcgggcaaacagagagccattcagtatccacaatggctcgatcaatccgttcgcgaatcaatctaccactagacctcttattttgccaggtatacttacaacctttgaaccccaagtcaatccctcctgaatgatcgagaaaggattgcagaatttctccatccgaatcagaaaaggacctccctcctatattatcctccctgttaagaagcacatttaagtccccaataaccgcccaaggctcctcccaatttttcatgtaattagtgaattcctcctaaaaccactctttctcagactcataagggggaccatacacagctaacaaagaccaaaatctctgacactg

SEQ ID NO: 48584 - DNA, 1194 bp, Cannabis sativa
atctgaaaagaatgttggaggaagatccgtcatcaaccatgcaccatgcaaccatcatgctctcgatttctacagcaatgaccaggggtcattgtgtgggaagttgacttgggtagcatctccctctataaaatagatggtggcctctccaagcttgcgttgcttggagcccctctttttgacggctaggatatcacttttaggctcatgaaagattgtctgagcatagcctaaacttgctagttttgcctacaatttggggtccgccaataatgacccctagctgacccgcctttgggggtggtataaggtctccattttgggtaacttgtgcctaacattggttgtcctacacataacgatgcaagtggggattgtacctccttataaggaattcaatctccctcctcaagtattgacactcgattgtatcatggccaaagtcaaagtgatatcgatagaatttttacacgtctcgcttgctcatctcctttttgatgggaagggacttcttgtatgggacagtgctctgagtggccatgtagatggtctcaggtttctccattaggagggtgaagtaggtgtacttctcctctttatctttctagtttcgtggcatgggagaagtgttgtaattcccctttttgccactatttattttggagttgttgttgttgtgcttgtccccaatgttcttgccactagaggtttaggcgacattgctagttccgacctgtgcacctgacaactcctagagctatagggtgccttgagactactgattgctgactttccctatctaggcttgtcagacaacttcctctaacttgataaagccatccactctgtcaaggaactccttcatattgttggttgagatcctttagatatctttctagaagtcactcaatggaaggatgcccccagtatggtcgtatactgaccttcttctattaggcctttgaccttggtggcctcaaccatgaacctttggatgtaatccttcaaaggttcaccttgttgttgtttgaccttgacaaggtcttctagctatgaaggtatctatcacgaggatgagaactaagtgtagaattctcagggaaattcattccaagaattgaatcttcctagagccagcttgaagtacctgttgggttatatgccctaaataaaactctttacaatctgattagt

SEQ ID NO: 48585 - DNA, 1681 bp, Cannabis sativa
acataatagtatttttgattgcaaattttctaaaaaaaattactacaaagtaaaactcccaatccattctatagatctatttttctgttttttggtatagttaagactcacatcttattttattttagtaaagaatattgggtggattcacaagataccccaactttattttagttttaaattaggaaggaaccactgatttagttgtggttgattattatgatttaataaataatagttttatttacagtataataagacttcagatagtgtttggatttgaatgtgaaacggattaaaaaactgaattattctatattacaaactgaaatgttacaactggaattttgaccagtaagcaaggataacatgaatttccacttctaagaagggcaatgagacataacagaacagtcactacagtgaatttgcccaaagtttctttgaaggaagagcaatattttattccataatttattgcacaatacaatttgtggaataaaacaatgctctattcataataaagccataaatttagaaaatatgcttctaaaatcttcttggtataggtctggaagttgaagctacacttttcccagaaaatccacctggcttcttactgggagaggaactgtttgtacaatggaatgaagcatagaaattaaacaatgatgaatgtactgagaaaacaatagcaactgaggattcatttcatacccatgatttgtctgtacagcatttctcttcatagctgcaagatttttcacctcattactgttcaaaaaaataaggtcaacagtcaaaacccaaaaatcaacggaaatctaatgagtttgatggtgaaataatgttcccgcaggaaatacgataatgaaaatgaagtacagcattagaaatgaaagccaagaaaaagaaaagtaaactttttagtattgggaagtacatattggatcaagccagagaagagagaaatcaatttcgcgaaatgaaacagactcaaataactctgttttagctcagcacaaaatttatctaagaaaatagagtacacaggcataccacttgagaaaatctaattttgctttcttcataatgttgctcttcacattggaaacgttatagctaggtccactgcctataaaagaaatatcatatgttaatgttaataacatacgaaatttattcaatcctcttttacatgttaggccaacagcttgaaaaaaggttatggtaaactgaggcttataaaaacaactagtagaactatgagaaacaactgtaagaaaacatatttacctccaaagaaacttcttttgcttgaaggaggaacctttgtacagagttgaacttgccgactttgttttcctacaaaattaaaagaatagaagtgtaaaccagagaaattttgaacaatattctcaatcagagtacatatgagtggctgttggaagaaaaataacacattccacataaatcccatagcacctatgtaggtaatataagaaatcaatcacatcacaaaccattcaatccatatatctctggctcttaccaggataactagcacagacagactccatcaatagagcatatcaaattttaatagctatagtacaaaaatatgagcactaggttaacttatagtcacagactagcaggtttcattattcagtcagcaaac

SEQ ID NO: 48586 - DNA, 4694 bp, Cannabis sativa
tgtgcctcgtaaataacacattaaagaaataactgccgaaaattgatttgaggtctatctctatcaaacacaaatgagaatataatgcaattcaaacacgcatacataaatagataccaacctggcccaaattctgtttctcaatctctgagagctcaacaagatcttcagttgtgacttgctctactttggaatggcagagaggcatagagaaacacacgtcctaataaaaacaatataaaattggagaaataagtaaggcaatgttaattagtcagaagaaacaaaagattaaaataacttccatccaataaaaatactaatataatgaacttcacacttaaagaggatatagtttccgcacaagcatgcctcaagtttacaagaaagaaacaagaagggcacatataaagaatagttggtttcgcatgagaaataccaatcaacaattctcattgcacacagtattattctgcaacctaaatttaaaaagtaagaaaagaggcacgacttacatgctcttttaacaatgctcggaagcttcttgttgattgggatatataagcattgcacaagcgtttggttctccccgggccatcacaaccagtaaacatcaccacaaaatgtgtcgtacaaactaaagtaattcaaataaaaactgctgatcaatgtcaagtcaagtttaagaaacacaaatcagttcaagaaattggacgcatacactattgacatacagaaaagaacacaattaaagttaaatcattcccctttatgcattaaatatttaaacacatagagacaccaacaataatatggcatacaaaaacacttgcaaagtttttaaatctgttgtagctgatggaggaagcaatgactcgtatagtcttccagggatatcttagtaaatgtttggtaagtaagcaaaataattccaaaagtactgcctcaaacctcaataacaacaaattataaagaaagcacgttatgatacaattaaagataggtaccataaaagatattacagatgccaccccgaagcatgaagtaaaggcttcgaaatgagtcctcccaggctagttgtcgttttcttaaaaagtccacttccactgcacaagaaaattctaggtaaagagagtagagtcttcaaaacctaatattgttaagggacttagttaactcacctctctcagctgctgatgaggtcaacactgatattactgaaggcggcaaggtagattgaggatgaacccatgaatgaaatattttagaacatacttgagaagttgagttaagtcttgaattgttgccacttttaccatcagaacaatcaaagtaggattcaaaagaggtcccaccagtgtaggcacaagacatgagtgctttatgaatcctaaagaaagaaaaattgaattgagcaacaagtaatgcaaacagatgaattgaatttaaatgtagaagaacgaaaaattgagcaacatgtaaacagataaatagaaggtggaaaagaacatacaaaattaattaaaaaatcaatagtcgacattaacatgtgcatgatttcgaagtttttcttttgacaatgaagtacaaaggtagatgaagatcactttatattttctctgagaacatttgacagatatgattacatgatcatgatgctaactttctagtttctagtcaataacacaaaaaaattatctgaaaacattagcaaatagaatcaactacacaataattcaaaagcagctatagatataaatgagtcttaagagaacctagaagacataacccgaatttcaaaaccaactccaacatgatctttttgatatttttcccatttaattaaatactcgaagagaggattagctttaggttttcaagaagttcatcttttatggtttgaaatttgggccatgtcatctaggatctcttatgaaacttcttggaaagagatcatattggagttacggatgatcagagcacaataaactgaatggggatagaaatctgatgctagttgaaggaccattttcatgaatacacaggagagaccatttagccgagtgaaacacagctctaagactaaattttagatccaatctcctaacatgaaatgctgttgctcacagctatagatgtacttaccatgatatatgggaagaacatgaaatccgcatactagttttgagagtaaaatccaagggcactttttggccaagtaagcagaacttgtccaaattagccattatgtgattgacacctctttcagaggaagaagcggacactccactaatgcccaaagtttcacgagcagctaatccttttaacgctttgttctattaaacacgttaaaatatctttagcaagcaaaatctatgagtgtttgtttgtgtgtgtgaatgtgtgagagtgagagagagagagagtgaaagaggaaacttaccatatcaacagttgcaaatccagatgatttgccatctcgtaatgaaagttcattcacactacgaaatgtactttgagaacctttttctgttgtttgagatatttgaaccacatcatctttggcaacttctgtagaaccagtggatttttctggactaccacaaccaaaaatacagaactaaaaaattaagcagcaaagcaagtgcctacatatcataacaatatacacactaccgaaatgcataccaaaaggattcgtgccttctcttagcagccaaattagagagcagagcgagattcttcaagctgctaggttgctccatcaagacatcctgaacaaagtaacaataagttttgcatgaaatcaacaacatttaaagtggacattaaaatcaaataaaacttttgaaagaatatacatttgtaatgtacaattgtgtcagttttacaaagtatacaaaccttagcattttcttttccagaagccgttttaaacctagacttctttgcaggatatagttcatccaaacgagtgtcaatgtatttagggttccttgacagttctggtttcttgaggctattactcccctcactataattacacaacagaaaacaagtgaattattcatgggttgaaactaacgttacggaaaagtaagaaaagcttgccttatagaaccaaacaaaggggctgaagattcatcaatgatctctaccacattaatccgcttcaactgctccccctgtcatatgaattggagtgataagactacgaaactgaattcacagttcacacacattttagtctcagtaactcagaaacttaccctcagttcagatggtgtctttcttttggccatgggtgcacccttgatagctccacgaccaatctggagtgaagggggtggaagagaactaggttgggcaacttctgccatacaaaactacagacaatggcagaaactcttcaattaatcactctgcccctacaaagcatcattcaatttgttaaaagaaaatatggagaacccgtcttttaatcaatattattcccccattccccatcatatcgatcaaaaactatgactaggtcaacttagtatatacttcctttgttggtttaacattccacagtattattttgaagtccaaatctagatagagaatgggagaatcccacacaaagcaacttaacagatatggagaggaaatgcaagagttaatgcgttttggattttctatagaaaaacataagatcaagctcctaagaatacaaagaaagaaagttcgagtttcacaaactacttgcccaagaaacctcattgaaattttgtcaaacacaataaacatcgcataaagggttccattaccggacaatgaaccagcatcagaaaatatactaccttgaccatcgaatctaactatatcgcttcgcttactacccaatacaatatgacccaaaatcatagattacgctctatactgaataagattaattgcataaaaaccaacttacgtcgatggaggaccgatatgcattcgaaaaccccaaaaatctctgaacgaaataagggatttttggaatcgattgggcccaagcggagaggtgtaaaaggtaagagagggagggagaaaagaaagaggaaaggaaagatggtgggaaatggtgaatttggggttttatttgaacaaaatttggaattccctcctgttacttacgccgttagttttctaacggcttagcaccgtttctttcttcaactttatggatttgtttggcgggtagttttgaaacaattttttaaccctaaatcaaacattaatgaaatgataaaacaataattataagagcacatttgtacccacgtacgacagtgctattgtggctacgaatcaaaatctcctgttaaaaattagtattgtgttaaacttatagacacattaattaatctaatttttattagatatgttaactaattttgttcactttattagaagtttaattcttttataaataaaaaaataattgatatgtcaaattttaattagtttaacacagtataacactattttttaactagaaatcttgattctctggctacttgatcatgcattttgctcttaagtggggtttagttggaatgaatgaaataaaataaaatagaaaagaaataacttttattttattcttttgtttggttttattttaaagtatttaaatattatttttattctaactatatttttattcc

SEQ ID NO: 48587 - DNA, 2584 bp, Cannabis sativa
acactggccttgattgtacatatcttgacggtcttcagtgaacaatctggtggctctgatacaactgtaatgcccgtattttaaaattggcaatttgaagaaaatcttattatattatatttataaaacctcgtaaaccgggatcctgagtttagaacacagtttaaaatacatttactaaatataatgtttcgtaatattttctttttaaaaattacaaggcagttataaaatataattcaaaatgttgtagaccgaagcccttcaggttgcactgcagcgatatgtacaatccttaccaaggctcaactcactcctcctcaagctttgctttacccttacctacacaaggtagcaaactgatgagtgaaccaactcagtaagatatgcataacatatatatatataagcaatgctataccgaatttatgcttaagttgtcttgagcccaattgttaagctcactaaatgattaagaacgttctcaacggaagtacgaccactgtaccatatgcaccagagcaccaactccatactcgtgttggtagggccattattgtattttcgagagttactaagtgttctaccacatgcacgatgtacccctggtactcgtgttggtaaccctgtaactaccctaaaaccctacacttactaacacccttataaatacacatttagcagtgctagtagtgtaaacaggtaataacatgcattcattcacatatacatactttatgctatcttacctcgtttccaggttcaggtgtgtcggtcagcctgagtggaactacagctcggcgctttatagggccctaatccacaatattcgaaattccaatgaggacacgctaaaacacttattagggacttaaaatcacaactaggaatagccctattgatgaatgacatggcaacaacctaaataacacaaaaatgtgaaaaactagggttggcaaaactgccccaactggtaaaccggttctccaaccaaaattctgatttgatggggtttcctggggaccaaccggccgaccggttgttactggttctcctgaatcggttgactaattcagtgtaggaaccaccaaaaatgtccccaacactacaaatcaacccaaactttccaataatctctaaaacaactgtatataccacaatagactcatatcaagcaacagaacctagcaatctacacatattcctaaattaccactagagagcaagatttgggttcttaaactcaaactttactcaagcatcaccacagccaataaatcctactcaattcaacttaaattatctcaattaaacttcagaacatcaaaccaaactctaatccataacacaacaacctaataccaaaaattcaaacattaaccttaacttgagcttgaagacaatgaaaagggagaagctacaagaattttaccttgatttaggatactcacaacttgctagaatctaacaattgatgtagaaaaattcaagccctagttgttttcctagagaaagagagagagagatttattttctaggtttcttctaaatgaaggaaacattagtaatatatgaaaatttaatttaaaatctgattattatcctcaaaataagctcacaaaaagacaaataagaaaccttagcaaaataactattttgtccctatacataatccaaaggtttagtgataactaagggtaattcggtcattttcaaaccccaacaatttcatgatactttcaatgtctaacaataatgcccatgctatctataacattctaaatcatatgaaagcgtgactctctaatggcccagcattgcgttccactgctaccgaacataattacggaaaaaatgagaaattcacataaataacataatagatatatattgaatttaaataaatctccacaaatataaaatcattaataataattaaatcacataaataaaccctaattatttaatgatccaacatattaaactttggtggactttacaaaaagaactcaatattaacttattcttcaacaattaacactatatcacataaaatatataaaaactaacttttcctctacacataaaaaataagaaattgagattcagtaacataccttgatccttctactagctctccaattgactaatcccaaatcctagcttgactcctaacaaaaattggagggaaatgaagaagaaaaatttggatttccccttgtgtggggttcagccgagaggtggaacaaggagaaggagagagagggtttgatttccaaatagatgcttctaagttattctaaaaaaaataaaataaaaaaaaaaaaataaataataataatgaaaaaatataactaaacgttgttgaaggatcgctctataggagctcacttcttggaagtttttagagtcctgctctagagtgtttttactcagacgataactactgttgaatcacagattcagacaacaccacctccacagtccctcgcaatggatccttcaaaagtgtgtgacctgttccaagactcggtacagattacgcaagacgatatcaccttcgctttgaaccctggggagattg

SEQ ID NO: 48588 - DNA, 1561 bp, Cannabis sativa
tagacatcattgatactcaataaaaatactcatacaaaaaataacgaaaaatagtaaaaggcaattaacttcttcaataattgatcatatataagcttgatcttcaaaagttacaaccttaattaagatattatattaggatgagtacatattattgaaagaaaaaaatacaccaaatttttcaatgacattttggttggcaaattacacacatacatatactactatacgtacttaattattaataatgtcacgtgcgttataataaaccctaccgactaccggccgccgccgccgccacctccaccgccgccacctttagcacttttgctaccgcctcttcctcctcctccgttattaccaccgccaccatacccgaaaccttcgccatatccacctccattaccacctcctcctcctcctcctcctccgccacctccaccaccactaccgctaccgctactgctgccgccatctccatcttctacattattgttattattattattttcatctccttgatcatgatcataaccattatctggattattatcatcatcatcacaatcagcattactaatcaactttctacgaatattgaaatagtaatatttattattactattacgaccatctgataataatttcatgcaaagacaggagccatttttgtctaatgacaataacgtggctaacattaatactaacacaaatatgataaagctgaaattagcaatagagaatcccttcatcatgatatattcgatattataataataataatataaaatgatcgtaatattaattatacgttaagtttatatatacatgatcagtagagtggttgtatatgtagtactatatacgttacacattgcatgcatgcatggatccacgtggacgacgttaatttgctgcaacaattctcgtgagctagctaccattgattattacaatatcactagtccgtgaccagaaattacagtatctgaccatataattaaatattgaaaaatcattgatacattttttatttctgttttaatatatttaggttgttttgtataattttaaaaaaattaaaaaatttaacacgttcaaaaataaattttaaataatttattatgtgtataaaataaaaaaaaatattgtatacatcaggctatttaaattctatttttaatatgttaaattcttttaaatctcttattttgtacagaatgtgttaatactaaaataaatagaaaatgtatattcgacccaagtatccttaaatattctatttagttatataagattttcaattgtaatgacaataatattaatgccgacatattatttacttttattattaaaattaaatgggagaaaatattagctggcaaattctaggaatgctagaaaaatgtctgtagctagctgtgtttttgttacaaaatataaaatattaaatattaaatataaaatattaggctaatgattcttcccaaaaaaaatcttaaacataactgtacaaatttacaaaaatttcctttgaagttgtattgctgatttgaaaaca

SEQ ID NO: 48589 - DNA, 1045 bp, Cannabis sativa
tattgttaatattattttattttatttacttttggtgaaggaaaaacacttataaactttgtgcaatgtatctgaatctctttataacgaatgctttctccagaagaaagtaattaaaggacctaaaagcatacttttgctgactatggacttttatggttgttgaatcagtgaatagagtcgatatatatgtaaaaatatacaacatacattaatggttaattagatttttgttacctaaatttttatatttattaaatcatgtttttaaaattcttaaagtcattaaaaatatttcttaaattattgaaattgttttttttttttatgaatcaagtaattttcattactccaagaaaatttgtacaacactacaacattctccaactagagaatctaaataatttttaatatttacaaggcttcaaaccaaattctatctatattggacacttttttttggccaaatacaagaaattctactctttgtaatgttctttacttgtgctatgattatatcgctttttacaacttttacctcccaaaaaacggagtttcgggagcaccacagtgtgtacaccaaggctgttagtgcaatagccaaaactcctcaacggaacttgctcaatttagcctttccaagccatttgatcacccctagcaatgttcttttgctcatgctccatttcagctagcttttcacttgatttatacatacctgcccaacatgacattcaaaaaataagtgttccattgtttcaatttcactgttgcaaaagagacaagttttatcaatttcaggatagtatttagctatcctgtcctttgtcttgagccggttaagcatgaccatccacataacaaaactatattttgggaagtttagccgactccaaacaatgttcagcagatgctctttattttttgtagcaatgagtttgagatagccttgagaaatcacatacttgttgcacatattctttctttcatctaaatcgtagagctctttcactctctctttcaaatccacaatctttctccaata

SEQ ID NO: 48590 - DNA, 2557 bp, Cannabis sativa
aagagtcttataaactttaagctttcttttaccaattggccttaagttttgtggcctacccgtacaaagcatttctcttatgagtatatttcatacatgaattcacaaattaagaaagagaaagtgagtaatatgttggaatgagatgttaattaactgtgaaaaccaatcttcaaacactcttcgaacaatacaacaaaaccacacaaaaaacaagaaataaagtattgatattgatgcctgaaatctcataggtgatataacaaacaaataagaaaaatccctttcaaaatcacaaaaagaatggacaaagaataccggcttgaaaaatggaatctgcactaagattatcttcaagattgaagatggtgttgagagccagaattagaaaaaatagaatctgcattaagattaccaccaagtgtgaaacaacggcaaatgaaaaaaccaatagtgactggtttggtgttgagagccaaagatgctaacaaatacaaagtacaaaaatttgttatgtttgtcaaaatacaaggtaaagtaaaataaaaacaaatgtttttgtaattatcaaaaaaaaaaaaaaaaacgatttgttggttttttttaatcttttatattttctttgtatttttttagtaaatgatttttgtatttattattggcaccttaaggtgatcaatgtcattatcgatatggtacctaataattagttagtaattttttttttgtcttatgttttaattagcaatttttcttttgtattttgtatttttattttttatgaactatctttgtactatttttttggtaaataatttttttttatattattaatatgtggtactttaaggtgttcaatatcatatcgattcacatacacaataatattgattaacaatttttacattatttattacattaaaatttgtaggaggtgatggtatgctaccttttgtggtgtttgacaacttaatgtgtctattaatattttcgttattaatgtgtacatatttttattgacttcgattattattctatttttttattattatatttaactttgcatgaacatctccaatgagatatgtaaaaaattgtgctatatttggccaaaaaaataagactttgttatatatttgcatcaatttttagcattatactctaatgcacaattgtaaaacttgatgtaatttcttttttgttatgaatgattgttaatttttttttttttgtataattttttaaaacttctgtgagtttttttttttgtataatttttttgtacaatatttcttttatggtgaattattattaatagaactttattatttgacaccttaagatgtccaacactatacaaatttgacacttaataattggttagcagttttctataatattcactaaatcaaaatttgtgagagtcaatattgaaatgcaccaataacagtatgtcaccatttatggtgtttaacacttcccttagtattttccttatcatctctaatagattatgtataatttaagcttaaaaaatgagcctatattatatttggcccaaattttatagtagtgcttcaacgcatttagaataaaattattctttttttgatagaaagatgtacaaaaaaatcaataaaagcattaaatttttattaaaagtacataaaaacactattaaatatataactaaaatgtaaaaaattattaattgcattaatatgtggcaaaagtaaacaaaaaaaataatatttattttgtggaaaatttaattcatgctacattttgtagcaaatttggcacaacattcagtatgtgctaaatttggaccacttttctcacattttatttttcatttttctcaaaaaaaaaatctctcatttttttactcaattttcagacaccatcttgatctttcagcggcttgctaaggtatggtctaaagactcttttgatctttttctagttattgggtggcatctgtggaatgttcgaaatactgtggttcatggggggtatggcccacgggcagggaatctcttggattggtgtgcaaaatttctaagcgaatttcagcaagctaatgggatagtgccggaaaaagacaaggggaatcgaggcaggtggacaccgccagttgtgggtgtgatcaccattaacgttgatgcatgtcatcgaatggaggataaatcagcaacaactggtattgtgattcggggcaatgatggagttgttcagtatgctgtgccacggttctgccaataactacttctccattaattgctgaattgtacgctataagagacgggatccgtacagggatacaacgtcgcctgccgaggttccgaattgagtctaattgtcttcgtgcggtacaacttattttggacaaagaggaggggtgtcaagatgttgatggattgttacatgaagttaggctattaactcaacatccgtctgttgctgagattaaatttgtatatcgtgaatgtaatcaagttgctcatttattagccaattatgatttagtgaacaaagttagcgctatgtggattgg

SEQ ID NO: 48591 - DNA, 1552 bp, Cannabis sativa
ccatgaatttctcataaactaaaaatttctcataaactaaaattcggttatatagaaaaattcggttatatagacaaattcggttatatagacacactttatatagaatagatattcatatataaaaagataaaaattattaatttaaataataataagaaaaaataatttaatttaattctatatttattaaatatataaaatttaatgtaaatttagactataaaaaatgtctaccatatttaaaatataaataaataattataaaatttatattttaataaacaaaaaaataaaaattaaattattttagatattctaagatatacatttaataaatttgttaagaaaaaatccgattgaattctattatattttttaaatatataaaacttaattatattataattttatatgatatatattaacgattatgaaatacggaattaaatttatatcaaacacatatataaatgtaatgaaaataagatcaaaatacattcatttattgattcgtagagctttgatctacaagcctctaaatatggaaaagaaaatcgaaaacaacattagaatcagtaattgcatttccaagctctctctaactcttttatatataattattgtaatactagttaaatgttacgtgcgaggcacgtatacttagttttatgctaggtattttttactttatttaaaaataatacaataaataattaaaaaatatatatattattagttattgtttgaaattatttttaggtatattaaatagtgatattgtaaattgtgtgtcagtatattttataagtaaaacatagttgtgtctataaatttatgatttacatgtacattgttattaataataaaaagtacgttaatctcaatatatatactcatatacatactcatatagtagttatccttgacgtgaaacttttgtattttttttaggaagcatgggttctcccccttaagcaactcaattgatcatatactatctatatgataaataacaaagttaaaagaattcctacaaaattaattattatttttcaattagggcttgccaaaccctataacacttgaggagggaggaactataatatctgtgtaggtaccactcaatctcagaccttgtgggagcataccataggccagatcgtttggacttacccctctagattagaaaattgttaatattagaataagcatcacttgagcagtcagaatatactttgtaagatttaaaagtggaggttcatcaggatatttttctgtgtgcaaaaacatcaaacctagttgaactgcaatagaatatttcaaaaccacaaggttaaagaaagtgtaataattcacttattaaaagaaaagtgcaaagtttaattttgtaagtaataacctggagaagattcaaaatctgcttcatcatcttgttgaaatagagcagagaaatatatacatataagaatacttattttcatgtcgttataagtcatattatggaaagggccgcaattaaatgggggttcatagttgaaagtaacacaaa

SEQ ID NO: 48592 - DNA, 1660 bp, Cannabis sativa
tagagcgtctgcccaaagttgtgctctgcggcagttactatgtcctttaatggtcttatctatttttcctctctttcaactactttttagcagttatcttcaataaattgcaactttctgcagttcttttctgcaatttcagcatagttcttttgtgcttcctggtaaacgttctggttttgtcatttttttgctgttgttttcgaatctctggtgcctttatcacatagtctgactcatggaccccctcaaagataaaatgaaatcacctctcaatcttactgaggaagaacaatcagtttttgagtttgattttggtgaaccattctcttctagcccaattggccacaatgtcctctatgcccgaatcatgaccactaagaaagtgtggttgtctactctccaaaggcagatggcagagcattgggatggtcgctttcctgtaaagatttctgaagatgatgatttgttcatgctaacttttggatgtgaaggtgataagcaaagagttttggacaaggaaccatttcactttcagaatcaccatattgttttattctcaccacacattggtgagaatgtatcctcatccatccttactcactcccccttttgggttcaagtgtatcgattaccttttatgagtaaaactaaaggtttggctgtggcacttggaaacttgattggggaatacatcgatgtgtttgaggactcactttttgaaggatggggccctttccttcgtataagagtcaaaatggacataactaaacctttacttcgtgggcgtatgattgccttgtcacaagttggggacaaattctgggttgagttccgttatgagagactacccgagtattgtatggaatgtgggagaattggacatccttataacaagtgcatatctttcctggaaaagcttgacagaggagaagaacctgaacttgaatatagaccaaccattaaaggttctcccttaccaacttcgggttatgatagatacagaacagactttggaaaaggaaacgcttggcctttgctaactcgtctagcacgaacttctatcactgctgctgtcccctctcttgttaagcgctcacaacctcaaccaactgtcctttaccatggtgaatcttcacaccaacaagcagcaatgtcccaggatttgcactctcatgttgcatggccatcatctacttcatctgtaggaatttcacccactgcatctatggaacctccagcggtgtcattgtttaatcatgctaatgctgctgcacggcaacataattattcctctggtgtgactcctgctgcactaccaaccacggcagcaacaactacttgtgctctacaagcaaagtcctcttcacccttgctgactacaccatctcatggcccaacatcaacttttaatggtaaatctgttctcaatccccaactagaaccacaagtggtacaaaagttttctaagccagcatcatatgatgatctttctaacatttatgtcccccctactggttctcatcattgtcaaaatattgtggccacttatccacctcaattcattcctaaagcacataaccacatcacacacttaaatgctacaatccccaatgccacggcttcctcatcagtaattgtttctgctatagcagctacc

SEQ ID NO: 48593 - DNA, 1938 bp, Cannabis sativa
taaatctgtttgtgatcagccatgagttcgaggagttggaggtgggtagtacatgtttgggacatactagaccatgcgggttgggtctatcagtggatgtattttgtattcccgaatttagccgtctaggtcacatgttaaagtaacttgtaatgttttgtgaaaatttttacaggataccgaaacatgtgtaatattttggaatggtttgtaaagtttaaattataacaagttaggttctcatttcgtaagtaaattaaagtttttattttgctcttatttctagtaatcttgattatgtttaatgaaatcatagcatgcttaattattagggctttataaaatacaactagtatttggcttctttgaggttctgggatccatgggaacaatttctaatcaaaaggatgcatcaaaatagactgtggaaagagttttgagctcgccggtgccaaagaagacgactacgctggcgtaactttgacgaccataatttgggtagatatgaggtttttttacatcttttttttttgtagatttcgattctacatattattttagggcgcttggtcaagtttgataattttttgaatttatctagaattattgtgaattatttggtttattttttaaattaattatgaaaaatacttaggttgcttcaaaaaatctaagtttattttctaagattgcttatatattataaacaaatataaaatttttaaattgaatttttggtcgattttgtatttttcatgaattatttattttatttataaatttaattatgaaaaatatatcggttgtttagaaaatatttaattacgaattatttattttatttatggcttattaagaactataaactgtttgaaaatatttagatttagtttttggtcactcttgtatttttcatgaatttatttagttaatatttaaattaattataaaaaatacttaggtgatgctaaaatagtaaaccatatttttgtaatatcatttactgtttatgctatgatatggaataagctttataatttattaatcactgtagatatttattgtgtttatttgtaattaattaactaattaattaagttttaattagaataaatagtaaaaatagtgttcattgtgtttatgaactgttaatatgatgttagaatataattatattatttgaaattaattagagactatgctaatatgttttgctatttttggttaattattttatattttatataatttaacgtataaattaatagataattatgggtaatattttgtacatatctttaagcatattgagtgtattttatggtatgtataaatagttaagaaacatgttagcttctcattttggtaaataattacataattgtatattttgttaataaatagtattttagtaaagtttcacgtaaaaagtatttgtatgagttcatattttatgttaaaaatattcatttgagtacatcatatgtattggtgtgaatcaaagtgatacatgattatattttgtatttcatgcaagcaaaattggcttatgcaatgcgtattttatgtaagtttttgtatgagtctacaaattcatattttgagtgtattgttgtatcattggattcctaggatcttgttctgaataaggaaattaattgaggtacttgaagtagcaagaatgtgttcttaacaactgcagtaagaagagtggacatctatgcacagggtgtatgttgaagcatataactttattgtggatttgatgttcatgttcttatgagattttgtattatgagttgttgtttatgttagtatgtgattgtgataaaagcttttgactttttgtgtgagaatagcacttataggataggttttctcgtgcgtgtgttagcatagcactggtaagatatatttttggctgcttgtatgggttta

SEQ ID NO: 48594 - DNA, 2195 bp, Cannabis sativa
  modified_base (1336)..(1337): a, c, t, g, unknown or other
cattgtaagttgaggtgtgtgctgatgtggtgggcgtgtgagttggtaaaaaaagtttgttttgttagagtctcattattgctaatgtgtaaaaagataataaaatatataagaggaatgttctactcttctgatatggaaccctataattctcaacatggtatcagaccaaaaacaaacaaaaaatctctatagccaccatcttgaggggatgttgaaaatcccttattcccacattctaacatgttttgattaatgaagtattctttcttgataaaataaaatataaaattaccatatacatctgagatgagaacagcagcatgcttagagtagggagagccaataacataggagggaagaccaccaagtttctcaacatggcctgctccactatgtggatcaaggattggagggtctgagcaacacagatggcctgctccattgctccactgggtacgtaattaccatgtttatcagtttcagatcaaagaagaagaaaagaacatattaagaggaacagaacttgtatatatttcttacacaaaaagttgacaccatttgaagaatcaaaatccaccacaaaattggggagcccatgttttttggccaccactaacagattgattgatttaatactgtgaaatggtaaatctaagttgggtgttattgttattattatacaagaaaagatattagatatagagaatgaaagagattggtttggagcatggttgacttttcaacctcgatggctgaatgaacaagttgacgggtcctcaatttttccgcttcattaaccgatcaattaaattattggtaacgggtcgtgtaagaaagataatattttttaatttttatatacaataatatttgtaattgatataaaatacttggaaattctaaatgctagggcctatttttaataattgttatatatttagcaatatagtatgaaatttgctgtttaagatcacttcctaaaatctttacaagtcaaacacaattattaaattagttaaataattaaatgaaatcaaactattattaggatatagattacaggtggttccacatgcaccccaacatatataagatatagattattggtagttctactacatgctctaaacatgattaatgaatgtattcatacacttatcatctgcgtcataaatacttaaatttaatttttaattataaataattttttatatttaattttttgcggttagtacttaagttatatttttagaactttgtaggtacctgaccattaaatatcaagttattatcattttcttagtggtatatttaaattattttttttttaaannaaaataaaaaatttaatgactttagtcaattaagaattgttacgtgacaatttacttaacaattaatagctaggtatccacataagttccagaattataacttttgtattgttaccgctaaaaattaaacttaagtatttatttacaattaagaattaattgaacttaagtatttgtgctgtaaattactctaattataattttggaactaacttgtaaaaagcctagagttgggagcaatctttgaaactaattacattccaagttctaagtctcattatacaaataagaattttcttggttcatgattattttttcgtaatgacgaatgtagggaggggccagagggtgttgtgccccctcccccattttttaaaaaaattacatataaaaaataactaaaactaaaaataagcaaattttttatttttatatatgtattggccaatttttgagctcatcatatagatagcaatcaaaagctcatctttaaatatgaaagagagtagatctacatggaaaaagaattagggaaagaaaggcccacgaataataaatgggaagatcatcattcatttagagcaagcgaattatttatgatgaagatgatggacttcaacagaatgattcagagttcttgcattatgaataattgattatttaactgtagaaattaaaattatccttaaatgatgaaggaagaaataacaaaaatatatatatttttttgttattatgaaatatttatgcaataaaagttgatcaagtgagtgattattttttttatcacaatgtgtattgttgttatccaataaagtttcaaagaattgagagtactgtacacaaaaatacaattaa

SEQ ID NO: 48595 - DNA, 2462 bp, Cannabis sativa
cataaaaggttattagattgttaaattattaatttttttagtgtccatcaatgggtattacccattaagaagtgttccatacatatatatattttaagtatgacaacatagattttgattattcatctaaactaactgaaaataataagtaatttgattagatgttggatgtattagatttttggacactccatccaatattcgatctgatctgattggatatttaaaaataacatccaatctgatccaatcataattggatatctaatgtttggtggcaggttgtgattggatcgatcggttaagttaagaatataggataatatgcagggactgttctgcaatattctcatttccaagccttgtggatttctgtccattggaatattcccttgcagctgtcctcatcaaattctgttaagattgtgtcaatcattttgtgtaacaaacttgtatacgtgtctgccagtgattagctcaattgtattctcctcttttgccccggtggctatataatgaaatttactctgcctctcattcttgagcagagatattcaattcatccctattcttaaacttcacttggtaccagagcataaatctttggcgtctgccatggccgatcctacctctgctcctcaacaagtcgaaggctcagggacacctacgtcggaggcatcccaccagtcgagatcgccaactcaagcagctgcttcggttcagactgctgcgatgagcccactaccggtgactactcccttcggtagcacactcattcaaccatttactatgaagctcgatagacacaacttccctctatggaagaccatggtatttaccataattcggggtcatcgtctagaaggattcatcaatggccaaagaactcccccaaaagagttcataatctcaggtatccctaaaacccctgaatataaggtgaccactaaccctgactttgaaaactggcttgttcatgaccagttgggaatggaatggctatacggatcgatgacggaaggaatcgcatcggaagtcatgggttgtcaattggcgtttgctttatggtcagcattcgaaaacctcttcggtgcgttctcaagagcccacacagatgatcttcgaaccaaactccagacaacaaggaagggctcgacatcgatgacgttacctgaaacaaaagcgaatatgggctgattcgcttgcccttgcaggcgaaccttatcccgagaggcatcttgtctctaatgttctatcgggtctcaaaatagaatatctatctattatctctgtaatggaagtcagatctgaaacttcatggcaagaacaacaaagtattttgcgcagcttcaacaaccgactggaaagactcactgccgctcctcccagtcacaaaaattcagggtctccatctgctaatcttgctcacaaaccaactggtccaggaggttctcgctactcaaatgattactctcaggaaggtcgatgtgcaaaccccaacttaggctctcgaggaaggacatgaagtcgtggtaggggtagaggaggcagatctggaggtccgaaacctacttgccaagtctgtggcaagtatggtcactcggcagcggtttgctacaatcgttacgatgaaaaaaaatttatgggacagcaactatttggagaacaaaaccaggagaaataattcaatgctcttgtggctacacctcagattctcaatgacgatagttggtatgccgatagcggagcgagcaaccatctcactactgaagatggtcaaatgagcaacaaatctgtgtatggtggtaaggagaagatcactgttggtaatggtaatcaattacctatctctcatgttggtgttggtcacttaaaaactaactcccaaactcctttaattcttaaagattttcttcatgtacctagtatttcaaagaacttaataagtgtttctcaactaacagctgataacaatgtatcaattgaattctttccctctgtttgttgtgtgaaggatcgggcaacagggaaggtggttctacaaggagttcttagagatgggttgtatcgtctcaacacttcgctcctaccgaaatctcatcatccttgtttacagtcaactaagtttcagtccgtgtcgtgtgctggtgttgctactacagcacctgcaaccaataattctagagtccatgagtctgtcttagatctttggcatagaaggtttgggtcatccttctagtgctgtgttgagtcaagtgttaaaaaccactatgtaatgcctaatatcaatgaaaaattaaagttctgtgatgcgtgtcaatatggaaagtctcactgtttgccatttaaaaattcttctagtcgagctactgaaattcttgagttagttcacactgacctatggtgtaaagcccgcttagtttaatttggaaattagcagttaatctggattaattatgaaa

SEQ ID NO: 48596 - DNA, 1121 bp, Cannabis sativa
attttttcttggttggcttcaatttctctcacatttactatgaagcccagaaattttcctgaggaaactccaaaggaacatttcttcggattaagcttcgtattatacttttcgagtatttcaaaacatttcccaagatcctttgtgtcatcttaactttttattaactttaccagcatatcatcgacatagacctccatatgttgttcgatctggttgtcaaacatgccattcaccagtcgttgatacgtcgctccagtattttttaatccaaatggcataactttataacagtaaagttgacaaagcttgtatattcatgatcgaggacatgcatctttatctggttatatccagaatatgcatccataaaagtcaccagcttgtgtcctgctattgcatccactaactggtcgatcctaggtagtgggaaacaatctttaggacatgctttattcaagtctcaaaaatctatacaattcctccaagtgccatttggtttggggacaagagctgggtttgagatccatgagggatagaaggcctcgtgtgtatgaagtcattagtcaacagtttgttaacctcttctttaagtgccccttgtctctcaaagtctaatggccaccgtttttgcctttttgctggatagttggagtcgatgtttaaatgatgacaaattatattagggtttatccctatcatatctgagttgctcccgacaaactgattatggtttgcctctaaaaaatcgattaattgctattttagtctctcttccaaaactttcccaatgtatacacattttgtgggattatttagatctaaaataacctcttccaactcttcaataggtttgagcttgttattttgtcttgaattttaggatccagatcttcctcttcccttttgccttcttctattaggataccatcaattgatgattggctctcctattttgaagttctattcgatagcactattgagccaacaattggtcacctcggactactcctactcctgcctgtgttagaaactttattgataagtgcttaatcgagcttactgcccccagtccaattagtgtaggatgacccataaatacattgtatactgatggaaga

SEQ ID NO: 48597 - DNA, 1490 bp, Cannabis sativa
  modified_base (544)..(544): a, c, t, g, unknown or other
ccgatggatggtccgatgggtggcccgatgggatccgatggtgtaaatagggtgatgtaactgggggtattttagggatatcataaaaattgccatatcttacaaatactagttattatttatttagaaaaaaaaaaattaaccaaatgtaagcataaaaaatcaaatttccctttgtaaatttgatatttgacctccaaaatttataacacattcttgatataattttgaggagtgttgaaaatattttcacatattcacaataaagaaaacaaaaaccatatgtgagacataactttgttatggtttgttagaatttgggattaaagtgtgattaaggtgtatggagttctattctaaaattaattggcaatagaaggagaaggagtagtccattcattttgtatatgtatatggtaatttatttccacacattagtaatgtaggattaactctaatacaccctcttcacatttgagcccgaaaagtgtaggtataacggacaactttaagagactacaaggtcgaacgtgatatttgaaanaatcccacaaggccaaatatattgagaaatttgtaagtgtgtacacgttgggaaatttgtagatttttgaaacaggtcaaagaccccaatattgaaaactggcacacattgaccgaaaggtcccgaatgaaagttaaagggggagacagtggaagttttttaagtttggcttgtttttttggaccgacgactttggacgcacaacggatcacaaacaactctttcaatggctcgcctttttagaccgatggcactttgagcttataacaagtgaccctggtatcatgttagaatttgaaatgaaagtggctaaggtatgattaagatgcatgaggttctatctcaaaactaatagacaatgggaggagcacctgcatttatcttacatataataatttattttcacacattagtaatataagactaactctaatatagtcattttaaagcctctccaccccacccaaaactggtggtgaaataaatcaaatttaacatataataaataaagtattttgttaatattaatttcattaatgtcggactttataaaacatttttgatataatattattttttaaaaataaccataataaagttattaattatcatttaatatgtcatttattaataattatttatgatagtttacttttgataccattttcatcttaaactattattatgcaagcaatggattgaaacacattataattataaagagtattgttattagatattagtggcacttagcatttttagacatgtcgatttgcgattggctagcgatactctctaaaaattattatattaaattttatgggacccgatacttaattgaactaatagtgttgttgatacataagaaagtgctaaacaccactagtagtacgttttagcatttttcaattataagtattttgtaaaagggtaaataccattttgg

SEQ ID NO: 48598 - DNA, 1418 bp, Cannabis sativa
tcttcacatgtttaatgactctagaccaccccgcgaccctgtaaagggaaagggacctacaatcactcttggggaagggactcagttgctttaccatgactaaagagtgtgagattcagaaggcgaagaccaacgaactactctacactcaaaaaaaatttcatgatgaatggggtgcttggtgtaggtaattctcatgggtgcatggagatgtgtttaacttaagtaatcaattcaattctctccacacatgtcactctaaggaagactatttcaaaggaaatattcagtatagtactacgagaaaccgctcatgaagcaaacgctcgatagacaactctgtcattgtacgagataaattcctatagttaccaataaggccacacgaccatgttgcaaccataaggcccaggtcgatcaacgtctctgatcaacttggaagaagaaagaacctacgaagtgacattagccaggaacgacaaattgatacacacatcaccactcgtgatgtctgtagtgccaaattcgataccttttgttgccttggtaagaagtattacagccccaaaaccaattgagtttgagctagaacaagagagacgttcacctctctcagatcggatcaaggctttggagatcccctctaaataattacctacaacgattcttagtggcaacaacgaaaccggcacgagcatgacttgacacaaagaaatatgaatttgggcacgaaacgatacgacacgatgctatacattggcatagcacaacacaaaaaaagtggacttaagcatgacatgatactataagctcgaaggcacaacacataagcacgaataaaatagtccaaaaatatgacacgttagaaatttctataacaattatacatatgtatttattaataaatatttatattctaatcattctatttaattttttatatgattatgtgtaatgtattgttgaaaatttatataaaaatatttgaaactataaaaaaaatacatattattaatgattaactcattaattgtaaaaaaaaatagtggaaaaatgaaacctgaattcgagctcgtataagaaaataagctaacctatttataaaaaatgataatccaagtaaaacacagtacgaaaatattgacttacgagttgttttgtgtcagacctatcgtttaaattgttggcacaacacgacacgatttatatttttttagggataattacaccacatactgaaatttccaacttttttacttttatactgtggggcagaattttttttttaaaaaataatgtactttttctcaaaaatactgtatacgttttatactgtgtactgtgttaagttttcacgattgttccatggttattttttagttattccactgttattttaattgttatgttttgttgtt

SEQ ID NO: 48599 - DNA, 1331 bp, Cannabis sativa
aacataccctttcctagggtatggccggccaggtcttggccaacccagggctacatcccaaccaagaagggccactcagccagactcctacagcatcagatctttttgtgcaagcacagttggaccaaataagagacatgataaagggcttggttggcccaaaaccatcagaccttgaactagataggtcaaggggctctccattctcagcatacatcaatgccttaagttcaagatgccagtatggaagatttatattgggcaagaagatcctctcgcacacatcaagtactttaagatgcagacagatctccaaaaagttactggtgatgtgtggtgccagatctttccggtgactttcgggaacaacccaacaatggtacttcaagctggagcggtgtcaaaaaggggaagtacaatacctcccccacgccacaaaaacaaaaagagaacgaggaaaagtacacgtgcttcaccctcctaactaaaaaacctgagaccatttacatggccactcaagctactttcccatacaagaatccccttcctattaaaaaagagatgagcaacagggacatgtctaagttctgtcgatttcataatgatttcggccacgacacatacgagagtcaaaacttgaagagggaaattgaattccttataagaaaaaatatacaccttgttaaaaattctccctaaaatatacacgttatataatcatgctcattttgataggttttgtttcttttattgctaaaatttagtatttttacccactgaactttgaccaatactaaattttctcccgttcattaaaaaaataaaattttaaaattttagttttctaataattttgaaattattgaaaaaacctgataaaattattaactttatagaaaaaaaaataagtttacttgaaaagcttaaaattattactaaaaaaatagaataattatcaattttgttaagaatacccctgaacttttatatttacagaaatttagtcattctattaggttttgtcctattattccgtttaaatattgatgtgtctttgtaaactggcaactttgccccctaaactttgacgattatcaaatcgtacccccttaaagtaaaaatgagaaagattcaatgttttttaaataaatcttaaaaaattaatttatatcttaagaaaaaaatcattttaaatgattaaaaaatgaaaaataaattaaggtggcatttggtaataactttgttttctaatttttaatcacaaaatgaaagtaaatttttttttttgaaaaataaaaatgcgttctgtaaccacttttgtttttcaattt

SEQ ID NO: 48600 - DNA, 836 bp, Cannabis sativa
tttgtattttaatgttattgtgctcaaattctgctaagagattgtaattgtaaaattatatatatgcatgggtgcactatatggttgtgttcatgtgctttgtattttaatgttattgtgctttgtatttggcacgtgtgagtattaatattagaaaatttgagaaataactatgcttaattttgctatctatttaaaaaaaaaaaaaaaattatttatttatgaattatatggttgagattattccatcgggttaagagagaagtaaaaaaagttggttttgagttaaaaattaagaaagtgatttatgatttatatatattgtatgttgcatgttatattttgtatgttgtatatgctatttcaggtaaagtgaaagactatagtgagttaattaaaaagagtagtttatatataagttgagatttgagaagttcttagtaggggtgctcattcaatccaatccgtcctattttgctcatagtgcatccgatccgcagaaagtgcggatttcatattttggatctaatacgcacaatagctcaaatccaattcaatccagtccgcaaaaatgtggattggatcagttattttagattggttacttttagtatataatatttataaaaaaacatattttgttttttcaacaaaacaataaaacatattattattatttcatttctctaacaacaaattcaaaaaaaaaaaattgtatgtataaaaaaaaaaatttaatttatttttaaattgtatgtataaaaaaatattatatataagaatggagtataatttattaagttttttttttaataaaaaaaaaacttaataaatta

SEQ ID NO: 48601 - DNA, 736 bp, Cannabis sativa
agtaaatctagatcttgataaaataagtttcaataagatttacatgagcaaggactatcggtggattaccccgaggtggtagttgcgcgttagggttcttgacccctatttcaatgggaatttggataatgagatccgtcgctgttggatcacatggcttatttgatgaagaccttccagttagaaccattgtcaaccaaattgaagagaatcaaaaatttgatggatggaaggttgtgttcatgtactctcaatgaaattaccaaattgttgacctcacttttagccaacggctctgagtctttaagtcaatgaaattgaattaccaatcatgaataaaataataataagcaataacaataagaacacataaatttatagaggttcgatcccgtaataatggtaatagtctactcccctttttgttgtattacttatagaatgattaagatcacaaggtccagctaggtgagtttcttaatattcttgagaaagtttacaattattttagtagcgaaatagttctctagaaagttgaaattcagatctctaacaataaaataactctactatttatagggaagctacgagggtttgttacccaaaagtacagagaaataatcaagaaactgaatgttaattcccaataatttctcggttgtaccaaaccgatcccacaaatataggaattttaattaagctataatcatggtgatatttaaggaaattatattgg

SEQ ID NO: 48602 - DNA, 1184 bp, Cannabis sativa
tcataaaccaaaaattctgttatacagccacattttatataaaatagatataatgcaaagaaaaaaaaatactaaagtagattctttcaaaggagagaggtttgctggaatgattttcaattattgagatggtggtagaaatagagagttaggagaattgtaagtggtacataattgatttattttatatgaaataatgtccacaatattatacatatttcaaatattgtctactatatatttgggtttgatatagtgacatgttgatgaaaatattaaaattttgatccaacataatcaaaatctttattacatttgatcaatcaatgttatgcaaatcataaaaaattgtacttaattgactctaacccaatacatatctaatttatcgaaatgagagaagcatgcataattagtggaagtagtatatgagagaagcattgaaagataaatttatcgaaatacaaatttaaaattttatattgtcaataatttataacacttactatccaataatttaaaattatacatatttacaattaaaacaataatttaatcaatataactttattagtctcaattatgtatataattaattatttaagtaattaaatttgaattaaggtggcgtttggttggaggtaatggaataaaatggaatggaaaggaaacaattttcattctattcctttgtttagttgcatattaaagtattggaatgtcattccaatagagagacctttctaccattttggtggaagtatttcctatgcatgatgagaaaaaatttaataatttttttatcaattttaaattttattccattctattcttattcctatgatttcattcctcccaaccaaacaccacctaaattcaataaaatacagaaaaccaaatgagtacttactttcactttttttttttatcttcttaagaaagaaaaaaagtaggattcacatgaaacaatccatagacaatttcgtttcagagaagaacttcatttcttgcccaccgagcaacatgcatggataaagcctatgttatagagtatataacttcgatcataggtatacatattaatttctaatcacataacttcataataattctgtaaaacttttgcataatttccttttgattgagtcgacatccgttatattcgtcattcaattcaacgaatc

SEQ ID NO: 48603 - DNA, 1400 bp, Cannabis sativa
aacaaatttatgtgatcagttacaccagattgaacgagcttaattaatatgtgtataataatattaattgtttgatttggtcttattggttttctctggttgaacatgatcatgtttagtgaaaattactccatataaatgggactcattccttttttaattaattaaagaataattatggattctccataaacaagttgtggagtaattaatatattaatttcgaaaaaaaaagtgccatgtggatatattggtgatttgtaaagtaataatgtggactttagaaaaactttaaaatatatagagaaatattttattgatttggacactaatttggaaaaagcacacacaatatttctccagtatttgggagccacatacccacttttgttaagattcttttgctatgtatatgtagtgggcatcttagctgatctgatcgaagtttttttggatctatttatggtaattggttatggtatatggacgtcaatgctacaaaattttatatacgtactaaagaaagcattaaatatgtattatatttatattcatatattatatacactcgtcaaacatataaattacgatctttcacttcttttaagggttatattctttttaactttagtttagtttaaattaaactgtgtaatctttgatgctgatgtgtgctactaagcgatcctgctgtgtggaacatttttgtgagaagatagtactatattaatacaaatttgataaaacactttttttttttcatatttatagtcgatttttcagaaagaaatagaaatatttattaatggataaatttaaatggatcaaatctgttatatgaagataatgttattatttggaataagataaatgatgttacatctcaaaactaattggtaataggatgagtagttcatttattttatatacacattaacaatgtgagactctctaacattctccctcaagatggtagctatcttatttgctcaccatcttggacaattcgatcataagcagctcttttttaactcactattcttaatcacaagtgactaaatctttttgctctactttttgatgagagaagagtgttttcggttggtaagacttttatacatgtcaaaccaagagtaatgtatttgaccaactggtaattaactagttgcgcgccaattttttctttcacggaccataatatattaaaataatgagttaaaatggtaaagtgaagaaaacaaagctctttcttcatattagcttatcctcgatccatgatcgatggtaattgtcgacgaggttggtgcttatctattgtccttgcatgtcggtacactacaacattcaacaccattagcgacagatccctccgccgctgttggtgtcctttctggccgcta

SEQ ID NO: 48604 - DNA, 983 bp, Cannabis sativa
ataaaactaattttgagggctctttttgacttaggagagtgtttggtgagtttatgggatacaaattaaaaccacatgcttacacaagcagaaaagtgccgagtggagttaatatgagtggctgagttggcatggtctctcttttcaaagagctaataattcactattatagtatctatgctattaaggtgcttataagtggtatctcatattgaattataccaatagatctcatttagcatttctttctaaataataacaattttcacacaaaaccttcaaagataaaaatgaattatcatcatattgcaaaggaaaagaaaaattgataaggtagttaacatggcatgtctgagtgaatcagctaaaacagccaagctgtctaacattacgaaaagtcttataatagcatatagaccaacgaatgtgagctcctataggagggttaagtagatcgaaagaagacaaaataagaaattacgagtatgagtttgtttagtaaagccgtattgtattttatataatatttttatgtgaaattatatgttattttaatttttatagatatatttttttttttgaaaataaaaattattttattaaacgaaaatttcttttactaaactaggcaacaacttaactggaacagtgtccaaattgaacagacgatcaaggtgagatatagatacttaaatatataatataatataatattttaatataaattaaaatttaacataatactatataaaaatatgatgtataccctaatttaataatttaaattgtattttttgcccaattattagtatcattattattctcaaatatttattttggttcctaaacttttatttatctaatagtttgtttggtaaatgaagaaaaggtatcgttagaattagaataaagtaggaaagcataacaacacatgtgattattttgttagcacataataaataactatgcctaagatataccaa

SEQ ID NO: 48605 - DNA, 1376 bp, Cannabis sativa
ttgagattaatctaggtaattaggattaaaaactagtaacataccctgacactcatctaatgtaccttgagacccatctaaataccacgaaatacattccgtgaaagtacaaaattatgtcccaatttttataatcctatttaaatatagattatagattttgatgtaaaatttaatgtaatatttaatatccatttaataatttttttatgaaaatataaaataatacaaaaataaatataaaatttaataataatataagttatttaatgtaaaaagtttgttaactaaaattaataataaaatattaaaaataatataataataaatataaaaatataatattttttatgatgtaaattttatatcctgattaaatttaaattactttttgttatatgatatatttatattataattttacatattattaaaataaaattttaacaaagtaaattatatgaattgagaaattgttagataatggagaaaagaatctgagtatacttctggcagagggaatagtttacttattccacgttcttcttttcttagaataatattaatatcttccctctttttcattgtttaagaaaaagaaaatagtgacttttgttttaaataatgatatagtactatatattttctcaataatataagtatccttgttagaagatataaataaaataaatgtagggtaggtaggtttattgacatttgtgaatttttatttgtctcagtggttgtgtggttgttgttgttggtctcctaaaagaagtattggtgtcacttatcaaaaaaaaacttgtattggtgtctcttttttaggagagtaaaaatattgactcaccttcccaattattgatccatatctccacaattttgaaatgtcaaattgatttactaaaaaagcaagtgaggttaaaatagatgtgtgtgggcgcaatagttcataataaatgttcatagttttcgcggtgaggatgagctcttatatatttgagaagtgttatttacatctaaaattacatatccaaagattttttttctcaatttctttttcatagtagtattaataataatattatttttatatattttaaaaaaattctaaataatttatattcttgaaaatagaatttttgatattttaatttatcacacatatttaaaaaaaattaaacttacttttgtaaagtatttaaaatttttaaaatattaccaaaaataatattgcaagtataacgaataccaacataaattttttttcaaaaatattctatcacgtgtttttgaaggcaaaaattgacaaaaaatttataataggaagttcacaatagctcttatcaatatatttttgggaaatttacatggta

SEQ ID NO: 48606 - DNA, 1117 bp, Cannabis sativa
  modified_base (413)..(417): a, c, t, g, unknown or other
  modified_base (1078)..(1078): a, c, t, g, unknown or other
tcattcttattgttcagtttttttaaaaataaagccatttccctcctattgttgttgattttttttctataaatttttgtcattatatcaatggttgtaactcgtctagtctcatcttctccagtagtaaaaaaaaaaccctaaaaaataagaaaaaaaggtttgtaaattttccatgggtaagaaaaatttcttagaaaaccccctagccttacatctcctattgtttcgaaaaggaaatcagtcgttgattctttagaaaagagaaaatcaaaacatttgaaactgatcattgaggtttcatgctggaagttgttttattaggatctagatttactaacatgtatgttgattatattctataatttaacaccctaaatatgatttcctaaaacaataaaaataaacacatnnnnngttaagaaaaccttacattggtggtagcagaataatatggctccttccactcagatctctaacccttgttcctttctatcataaagtaataacaagatttaagactggatctcctttaggtgtcggattcttaacaatcttccacattatgattgagtacttgacttgatatgagtgggcatgtactctatcactaaaggcttcaaaatatatgaagagaaagagatagaggagaatttgaaatctatagaagaaggctctcaatttctagttgtctggcaaagttagaaaactaggttatgaaagattgatgagaatgagagtcatcttattccttatatagtatttcatctaatgattaggtttaaattatatagattaaataaataaataaataaataaatggctaaataaccccttaagtgggcggccacttagtgtggaccccactagtgataattttgtcattttatttcacaattcattttttcctttcacaaataccatattttaactataaatcttttttaaatgcaaaatctatttatttaataattaaaattaattatcaattaaaattttaatttaacttatttattaaatagaccttacaaagtcctcttacttaacaaataaatctcaaaacctcttttcttcacanttaagcctttgcttagtgaaaatttataaataagacata

SEQ ID NO: 48607 - DNA, 4622 bp, Cannabis sativa
ctttccttctattccttcatcttggtctctcagcccaacgaagacttctcgccggaaaatctgactccgatcatcgtcgatcgcttcctccagtctccggtgatacatcagagccgaatccgtcggatttcgattcgaagtttgggaaaatcattcaaacacaaagtttaggtaatcgctgagattttgggtatttcatttatggattatcgtttattagtgattggattctgagaaaatattaaacacagagagaaaggttttaaggtttgtcgtttgggtattattaataaaatagtgagatttttttgttattctcttttatgatgtattaaattttataattagcgtttggtagggtttcaatttcaatctttcatactttttacttattgtgccaatcagtgaatatatatattataaatatattacggtttgaatattatcgctattattttacaactaaaatgtagttagttttgttaatttttttttatttaagtaaataaataaacagaaattgattaatctgattttgttgtaattttgggttcaatgaacaatcaaatctctctctctttttgctgtgaaaatgggttatggagagatttgatgaacagtgaaacactgaagtttgtcttccacaaaagagacatggaccccttaaatgcagaagtttatgttatgttatgaaaaaacctgggttttctttctctatttcaattaaagccaatgcttttcattgattttcgttcccgaatcttggaaaaatgaattcaagagtcaaatgaaaaataattacctattatatacaataattattttcatatgttaccactctgaccctgtatctcatatatattgttttgtgtgtactatattttattttatttatttctactgagaagtgagaagttcttttctttttcttggtataatttagactgtaaaaaaattcatggggatggatagtgatctccattacacgtggatttgcttgtctcttgccatttctccaaggacattaccatctgcaatttcaatcttctaattatacatgggaataaaatatacattaaagtatacaaacaaaataatgtattttcccttctttctttccttatttaatttattttatttttttatttcggtgggttagatttgtagttggtttagtaaaaaaggcattaaaaatccatgaatgaatcttttgataataattggtagcaagtgatcccaagattgcttttgtttttcattctaagaaaaagagagaatttttttttttttttttttgagcttgttttgtcaaagtttaattttgatatacttccattgaattcgctttcatgaaagtgagttgggatagaagaagaaggtaataagttaagtggggttgtgtttagagcaaaccaacttccagcctagccgaccatggcactctcgtgagagagacaaaagaaaagaaaaaataaaagaatccctttatcctacgcactcctctttcataatatcctacacccattaccttcttccttccccttctctagtccactctcccagtatccccaaattgctgaggggaccccttaccctgtaatggcagtttatggggtaactaaagccaaagctacaatgataactgtttgtgcacgtagtggcatttcccgcaattctctgtgaccccatttcaccatatgtcttataaccccttttcccacctgaactccttcccatggcctgatctccctggattcggccttatccttaggaaagagcaatacccatttgagtttatgagttgtaatactgatattgatactcaatcagatctgtggttctgtaaagatgtatgcttttctcatctttccctttttcttttgcaggagtttattctttgcttttcctttttagcctggcttaaattgcatctcacttttcttttttgtttatgcagagaaaaggatcttcttttttgaggaagcctgtgtgttgccattgaatgcggaatactagaaaaggcaaagaaggggtgtcagatgattgctggtttaattttgtgaattttcattatatcttcctcttttgatcaatgttgtctagtttggatattgtttgatggatgtatgtaaatcggagcgagcatttaggaagcacataacggtggagactccacgaccaccattggttccggcagaaaagaataatgtactcaccaccggccgccttcgaacgagggaagtttcttcaaggtacaagtcacctactccctcgaccacgccaaagggtgctcggcgttgcccatcacccaatcttacaagaacagcatcttcacccacttcttcttcttcctcttctcatttggtatctaaaagagcaatatctgtggataggaagagaccttcaacgcctccttcccccttaagtccatctacaccggttcaggattcgtccgtagatatgcatttagcgtccagaagagttgctagttctcggttgccgccggatagtttatggccttcaacgatgcggagtttgagtgtttcttttcagtctgatacaatttctattcctgttagtaagaaggaaaaaccagttgttacaaatgctttgtctgaacgtactttgaggtcatcatcaaatgtagcacataaacaggttgaaacatctgtttctagaaagcctacacctgaaagaaagagaagccctttaaaggtggggaagaatgtggctgatcagtcagagaattctagaccagtggatggtttacatactcgtttgatagatcagcatcggtggccgagtagaacaggtgggaagttgtcttctaattcattaaatagaagtatggatcttggtgataaaagtgtcagaaatctttccacacctggacctggatttgggttgtcttctttgagaagaacaccctcttctgatgttataggaaagcctttacaaaaatcttcaagtgatgctgcaaggctattatcaaccgtggaaagttgcagagcagggtttggggtgagtttagttgatgataattcacttcatacatctagacttcacaagtttccctctacaagtttgccagaaagacccaagtctgcaaattctgtagccagatctcagtctttgcctactcgtccaccctctcctagtaagacctcgttgatatcctcctctgttactaggggtgtcagtccgtcacgtaacagaccatccactcccccttctagaggaattagtccatctcgaataagggcttccggcatttcgaatcaacccaccaatccaaattctgtgcttagttttattgctgattttaaaaaaggaaaaaagggttctgggtacattgaagacgctcatcagctaaggttgctatacaatagatatttgcaatggagatttgccaatgctcgctcagagacagttctttatgtgcagaaagtaactgccgaggtaggattttggtttcagtagaaatagcaaaatctgggcatgcatttatttattatgttagcctttagtaatgctattgtatcatcagtgttggtagaacttggcattgtttgcaggagtgataagaaaactgaattagcaccataactaaggatgcagtaatctgtttttgttttaagatatttgcaatccataactaatttgttttcttatgtaattatgttgtgaggggccttgtactctctagataaatatttcaaaaatagttcagtttgtttctattgaagaatggaatccttttcagtactggtttgtttactatatttacatattgcatagttttttattccaaattttatttgatggtgtagagaactctattcaatgtctggagtgcaacactatgtctgtgggattcggtgattcggaaaaggatcagtctgcagcagatgaagcttgagctcgaactgaactcagttttgaatgatcaagtaatgtttcttcttcttattatgttacatgaactttattaattttcttcatgacatgggcacattttctagtcaagagaatttcagttgaaaaaaggaaataattgtatgcttttaggaggctggtctgggaattcggttgtatccacgtttattcatcctggtgaaataagcaaatgatttagaaagtaatgtcatatacgcacaatttttgggcaccttttcagttttagtctctttgttttattttcctttcctttcttcagtctatacacatctgaacccaaaagtttacctttacatgtcattgtgataccatttctaatctcttgtttacctgatgatgattcagatgccctaccttgatgattgggctttgcttgaaagagatcacatgacctctttatctggtgctgtggaagatttggaagcaagcactctccgtcttccagttaccggtgtagctagggtatgttagtttaaatgaagtcacctgatttggtctgttcgggtaataattactgatatcattgtacacttcttatttttgcaggcagatattgattctttgaaggttgctatctgctcagcagttgatgtgatgcaggctatgggaacatctatttgctctttgcttccaagggtgagctcatatttacaaattacattaca

SEQ ID NO: 48608 - DNA, 1165 bp, Cannabis sativa
agattagggtttctttcccttttagcttttagtttattttagggttcttctacccctatgggcgttgccggccagatctaggctggtggtgctcgggagctttgcttcctatcctttctgagcaaagatggaggttcctctaacgggtcttggcattggtaagtggtgaaggcatcaaacctcgttctttggggtcggatccattgcgcctgctttttcaggtgagtgcccgccgatctttgtggctgggcatctttgttgagaggccgcatgcctctagttgtgggttgcagggtggcgatggtggtgggtttctcttggctctctacctttcgattttgggatggcattttgcgttggccctttttggtgggaacttgggctttggagttgtcttttttcctttttttaagaactcaatgggtgcctgtgggttactatttaggcgtcctacctctgatgcacattggctagtagttagcttttagagtgttgttgatgtagaatgggggaatcgaattttacccaaagggatgtgcttcccttgtctctacaccttcatcgttcaaaccacaatgggagactgagagtggacttttatcgtcaaaagatggcgatgctcctctacttttgttgggcttgttttggactttcatgttgcttcctttgcgttaggagggtgaccattgaagctgtttttctttatgtttatgtgtttactttgtttgtttattttagctttgttagttctttcggtgttgttctccttttgtccttagtagtgttggtgttatgcttttcatggggattttatccttctttttattcctgcatgagccttgagttttttactcattttgaattggtgtggttagccaaccgttgtcatctccttgtaagattgtgagttttccattaaacttataaagttgttgccctttgatcaaccttggataaagtttccattttaaaaaaaaattcaaatctttcaaacctcttcaaaagaacatgaaagaaaaagaataatgaggaaaagacgcttacacatcagacttaaaatttatttttatattaaaaaaaagagcattgttattaggcaccagtggtacctagtaccttctcgacatgtcgcattgtaataggctagtgatactctctaaaagtt

SEQ ID NO: 48609 - DNA, 1409 bp, Cannabis sativa
caaaattgacatattttttagtacactattggagtaatatctttcttaagtatgttaaaatataacaatacaccacttttttagcactagattggagatgctccaagatgtaaaataagtaaaaaaaataattcattattattgatggtcatttaatattttattgagaatatacaaaaaaaaaagaattattttttaattttttattatttaaataatagtaatatggtaaataaagaaggtaaagttttgtaaaagttaatgaatcataataattagtgatattataatatataaaattgtgatatttattgtgagtcaaatttagcacaatgttatgtcttatgttaaattcgacacaacttattgacacactttttagaatactagtggagtagagtttttttattttaaaaaaaaaaaaaaaaagtatggtttttttttaagtgtattaaaatataagaatacatcacttttttagcatcattagagatgctcttattaaaatgtgtaagtcctcatccattcaaataatctttggggcccaaccccaagtcctaagattaccttatatactcttgtaaataagggctcatatatctcatgtagaactattctcatatcacatgttaacacactttctatcttgtaaaaattcatttactttgataaaacttcctatagtctcccacttaatttttttttaaaaaaaatattattatccaacaatgtcattgaactataagatcaagaataaacaaaagtgaccttcgacttgaacctttacatattcactatgatctaaattttactagaataactcataatcttgaactttgtctttaacatcatacaatgcaccaaccttttaaaggtgtagtcatatgcgttaatggtcatgcacgtctattctagtatagtgaacgttcaagaaattttgtccaaaatttcataagaagtagccccactcccacatttgtggacataagtgagtctatcaagagtaatcatgtaacttggtactctcctccacttggagtataataatcattaagaaattctatttactaaagtttatattgcttcaggaattcatgcttcaattttcatacaacaatagcatgatctcactcttattacgtcataacttgttattattcattgaacctacttcctcggatgtccattctataggtcaagttaccattatgtgtcacttattaatctaaggccaaaaaacaaacaaaaaaaataaaaataattatttgtcattttagaattaatgctactttgcgtcggtttaaaattggcatattttctatttgtgttggtttaaaaaaaatgctaccttgtatttattaattttaacctacgaaaaaaagccaaacatcaaaaccccatttacacat

SEQ ID NO: 48610 - DNA, 795 bp, Cannabis sativa
tcgttccaactttgagctttaactcccctggatttaaatattaccaagtttcaagcaactacaatgaagaacaaacatggctagtatatctagaaccaacaatccaaaagtatttgtccttctcaaaaacactggattcaaaaacaaaagcgttacctttgttcgagttgttcaaaagtctgggatatcgttcttcttaatatcccctcttatcacaatatgaacatttgagggtacgactatccattgtttcaatatttccagcaatgtcagaagcgtcatactcaattactatcttccttttcttgtctacaattcttgagggaagtctcctagtaggcaaagtctgttcgtaagcatgcaattctgcatctagcttacttatgtcagatgagttaaaattattgatcatataagatacaacaaattgattacactcaggtggtagactattgagtaagaattgaacaatcagtggtttcgacaaggaatttcccagcatttgtgctttcatgattttcatgtgaaacaccattatatatgaactgattctctttttaggagacatcttcacatgatgcagttcatttgcaaaggcatgtaaatggtgagaggatgtgggtagtccattttgacaatacaaatatcaataaacagaaataaatcatttgttctataaattcatacacaagttcagaaaataacaagtatagcaaatatgtttgtaaaaataccaaagtaaaacatacttaatttttttcaaggttttcaacaaactgatatagtgtcccgttt

SEQ ID NO: 48611 - DNA, 1434 bp, Cannabis sativa
tcaaccatgattccatctttttcgacaatgtgacctagaaaagatacttgcaataaccaaagcacgcacttcttaaacattacatataacttgtgatctctatgtcattgcaaaaccattcaaagatgtttctcatgctccacttgagtctaagagtatacaaggatgtcattgataaacactatgacataattatcgaggaaatccttaagcaccccgttaaaatagccataaaggttgccagcatttgttaacccaaaagacaacaccaagagctcataataaccaaatctaatctgaaatacaatcttcgaaatgtcttcttcttggattcttaactgattataaaccgagtgtaaatccatcttgaagaaaactactttccttgaatttgatcaaacaaatcatcaatttttggcaatggatacttgttcttgatcgtcaacttattttattgccaatagtcaatatacatctaaaggaatccatccttctttttcatgaatagaaccggagctccccagggtgacactctgagttgggtaaccctcaactcaagcatctcttgaagatgtatttttcattccgtaagctctatcggagccattcaataatgtgccttagaattcgattctgctctaggtgcaaaatcgatgataaagtaatatcccactgtggggatcatcctagtaactcatcaggatacatgtctagaaagttctttactatccaaacatccacagacccaaatgttttgggtttgctagagtcaatcataactactaggtgtgcatgatcctgtagtaggttcctgatcttcactaacaaaaagatcatgactctaatcccaaactgattccacaaaaaccgaaggttcttcatcatctaactgagaagtcaactccttatcttttgatccatggtaactacgtacttcaactagatatccattctcgaaataataccatagtttgttaaactaacttggttgactccaaaatcaaaactagacttttaagcaatgctcgctcgctagattgataagagggaaatagttattaagttattatatgagagatacaacaaatttatagtagttcactccttgtattgagaaagtaatagagctatgtctactttgagtttttatttttcatgagatggtattacagaaaaaggttaagtgtcaaagctcgaatttctaaagagagaagctctgaccttgtgggtagttttttgaatgtgaaaaatgagctaacggggctctccttttataggtgaaggaggcccacaaaaatagggaaaaaatacaagttagttatttttgactatagatgaatatctaatggtgaaaattaacttttggagttgacagtcattttttggagcctgacaggactagccgcgagtaacctggagcttatttttgtaact

SEQ ID NO: 48612 - DNA, 2247 bp, Cannabis sativa
catttataaagtatacacatggcaatcaaaatataaataatcacaaagagcttagagtgagctttccaacggtatatagaacttccaaaacggagttcgaatcacaaagtaatgcatttttaaagtcaacacttgaaatagcccagaaactcgagggcaggctacggcatgcaaaagccatgctgcggcacctgggaccaactcccaggtctcatccaaaggggcgaaccacgacatgcgaaagccatgccgcggcacctgggttccaaacccacgaaaccagcaagcttacttcgaatttcagcagccaaacacaaccatttcaccccaaattaacatataagtcaaagttatagccaacaaattaccaaaattaataaagggcattaaaatacatataacatgcatcaaaatccaccaaataccctaaaaattccagattacacaacatgaaaaaaatcaaagctccaacttgagcttaatttcataaaattctacttccaacacttataaaatcaagtcaaacacaagcttcacaaagctaatttcagagcttaataactgagtgaaacccaaataaaatcctttaaattctttctcaagccaacaaaaacaaacttagaagattcaagcaccaaacatgctcacaaccacaagaatatcctctacaatcacaaacatgcacctcaaaaacaactccaacgatttcatgcttttaaacactaaaatacagcagcaattctattaaaatttagcaagaaaactaccttaatccatttccaagccaaactcaacaactttcaagtatcaagctccaaaggtagcaccaaatcaagctaatttccaacaaaaatcaaagtttgggaagaaaataggtttagggagagagagaggggtcgactgaagcaagggtaaagcaaaatttcattttccaaattgtaagaaaaatcccattcttttgctaataattcgaatgcccgaaaagacaaaaatgcccttatggccattaagcacacccatgcacaatcaagggtaaaaaggtcatttcatacataaacattctcaaataaaattcagattattcacacataattaaaattctaattattaatccaaaaattgtatttcggccccgaacccagttcggcccgaaaactcaattgtgagtatactgcgccaacctatcagaacacacctgaaaaagacaacacatgcatactatacaataatatagtcctataagcacgttagtaaattaatttcactattttaccctcctcgagtcaaaattactaaaatgcccctggctctccaacggggtcttaacatgtcataaatcatgtaaattcacatatattaaattatataataatataattgctcaataatacataattatgtaattagggttttgctaatctatttcataattttagggtattacagcttgaaccagaaaaaacctgatcttcgccaacaacttggtccaaagcaaggggattcaatccatttgcgaatagacaagttagagaataagttcaagagacatcaagtcggggagctaggaagacaatcgggatgtgattctgttgaagaattcaagtcgaaagcttcagggtcaaagaggaaagaagactctaaaaggtcatccaaagataagaaacaaaagaaacacgacaaatacgtacccatttatactgtctatactgagcttaatgaaactcgggaaagtatccacctctcgcatgaacagaaggtcgtttttaataaaccaaagcccatgaaacacgcgagacgtaaaagggacccaaccagacgatgtgaataccatggagatattgggcatacaacggaagagtgtcatcaattaaaagatgagatagaaggtctcatagcgcgaggacacttccagaattttgtgaagggacaggacaatgtccatgaccaatctgatctgccagtaacccaagcgaccagggaccataaccttcctttgtaggaggaaaggatacatcggttatctcgggaggagaacatgttacaagaaaaattggacaaggggcagttagtctggacaagcaattacataaaagtattgcgaagtaatcaaatacagctcacaatggctgctagagctgcaacatagaaaagtcggttcaaccagtggcagttaggacaaataactgaaactaggatcaattaacctagaacctgggatatggcaggggtgggccttgggtatcgaaa

SEQ ID NO: 48613 - DNA, 909 bp, Cannabis sativa
ctctctctctctctctctctggtcctaaaagaaaaccagtggaaatcaagcttttcttctcagttcagctcagttcttgctaggaattttcattagtctaaaatcttgaggtaagtttctcttctagtttatagtgattttcaaggtttagattgagtttttgttggggaatcttgtgatttcgggtctgagtaattgttgaggttcagagtatgattctaagtataaattaggtttgttcaattgttaattagaggattttcatggctgttaaagttggaaatgaaagaattgatgcttaagaactcaagtttgctcattcatggtgttttctttactttgatgaatttttgggaattgattgattgtttataatatttttgtggtatggaactgttttggaaagtttgaataggtttggaggagatttggttggtttttggtgtgaaaaactagagttttcaattctgccagcagagaaaccggttaaccggtttcacaagtactatgaaaccggtcaactgattttgccagcaggggaaaccttaagtttaagcttcaaaactggtttctgttcggggtgtttcccagtgcttagaatagaatattttaatgatgtttgagttattttgaaccaggggagagttagaatttgttcggttatggaattagggttttttttggaatatggataagttgtttatcaaattttattgtcgtgacataggacctgggatcgtcgagctttattccactcaggtcggcccgcatgcctaatttctaaactaagataagaaaagtttttatgcaccgctaagtggttaaataagaagcaattataatcgttagtacctcgattaagatcgagattaatgatatgtatttgttttgactcgactgtgatcgagg

SEQ ID NO: 48614 - DNA, 1207 bp, Cannabis sativa
aggacaagaaaagatgttccattgattcctcccctaaaccacacaaagggcaacaggtgccttcaatgtgaaatcttcttccaatcgcatatctaatagggagggcattagaaagaaaaaaatcacaattagccaaatatataactatacaataatatttgaaaatattatttataaattaatatattttttttataaccaattttaataattagaacagcgcctccacaactttttagagtccctgattggtaccaattgtggtaataataggtaatttcaccattttaaggccctgatagttaccttcactatttatgaggaaaacctttataaagccttctactgacagctaacgttccaacaaattcctgcattcagaagaatcacagcactctctctcttgtagagccatggctgatactgcatgcaattctcactctgctgttacggaaacagatactcaatctctggagagagttttcactctcaaacaaggcgaattaatccactacaattcccagaacgacgtcgttccatacaacgaaactacccatttcgtgtcctcaaactgtctaactactgattccagttccgggtcatctgattccgaacaaacaattcaagaatctgctgtgattcaggagctgagtcttgtctctgatcttggttgccttaaagaaagctcgttctctgattcctttgataaagaagttaaagacttcgaattgggaaacgacattgagcagctgggttttcctttagctgtggttacgggaaagaaaccgatattggaggaaattgaagcctcgattctcatggcaggcgatgctttattgactgatgaaatgagaaatgatttccaagatgaggtgaaagcaatcgattctgatcatattaaagttcccggaaacgacaatgaatttggcagtcgtttgaagatgatcagcggagatccgagatgttctttggagattcaagtggttgatgaaaccgccttgattggaccagtatcagtcccgaggaagacggagtcgattgctccatccaaatcctcaaagggtcttgtgagcaagaatagaaagatagagtttcttgagaagaaggtggcgagaggctctccaagcaggcctaaaggaaggaaaaatgtcgttgtgaagaaaggagaaagaagcaagaggttgtattcaagggaagaaatggaagc

SEQ ID NO: 48615 - DNA, 1605 bp, Cannabis sativa
  modified_base (236)..(237): a, c, t, g, unknown or other
tcaacaatcctaccgtcttcccagtaggatttaacccaactcaaagcctccttcaaggacaacgcctcaacaacaacagggtcaatttcacctcggagtttgattgcagtagcagcaaagcacaacccagcatgatctctagcaatccaacccaacccatgactcctttcgccaaaaaagagcagcatcacaattaatcttcaactctcccccctcactctctacttaagtctagnntataatttacataacctaaggggtcttatgggaacatcatctataaaagtggaaagtgggtatatcgtgggtatatctaagtatatctaaaaatatatctaaaaaaaaaaaaaaaatatgaaaaaaaatatgaaaatggaagaaaatggaagtaaaaaattaaaacaagtaaagtaaagtgggtatacaatgtaatttcttcacaattgtagtgtctcaatacaaatgtaaactttgggctattttctagaatatgtgtaagtttctaaaaaagaaatcacttgattttcatatttattagtataacaattaagaaagtgttgttggtaagatccaataacaataacaagaatagagattatgccttaattttaatttattatttgacaaagaaggtattggtttaatttattaatatttatttttgaaaaaaaaaataaattatatttgcagtgcttcacatttcctagcattttaaaaaacgactttttaatgaagaaaaaagtcaaacaacataaatgtactaaaaatctaaatcttttcgattcatgtgaatgtttttgtgtttctgaaaaaagcccttggcccatatgacttcttattaaagtccatttcccaaataatgatagttcaaagcccaaagtccaaaatgcaaagcccaaagctatttgtctaatgtttgcgagttaagtataaatttcatggtacaagatgcacttaatattcttccaaaaaaagatgcacttaatacttgagcatttccaaaatgtaattcattcactaatccacttacattttttagagaactgtacacttccatgaagaattacttattccataagtataatcactgtaatttaaaataagtttgactcaaaataactggttttcctatgtttgtcataaataaaatcatttaacaagttttgttgaaattattgattttttaaaaataaagtaatactgtagactatttttaatatcaaccagaaaatttaaattttaattttttttttacttttttttttttttactgtgggttattaggaattttttttttaaaaatattatgtaagttttatactgtgtattgtgttaagtttttggggagaaattattttagatctatttaaaaataataaaaattatacatttttattgaccatttttttttttatttatttttactttttgtaaaaaaaatttcttattgacttatttttagattgttctagaaaagacatttacacattgtggaaatataacttatttttagattgttctagaaaagacgtttacacattgtggaaatatagtgtaatattacaagaacatgaaaacaacattattttttctctaaaaatacta

SEQ ID NO: 48616 - DNA, 1202 bp, Cannabis sativa
gtttataaacacattaacacaatatgattcaggtaacttgtttaggtaacttgtttataaatgaatcttatttaaatatgccaacttattaatatattaatagcttgtttaacattgtttatgatatatacaacatatttataacttatttgtaatttgttaaagttctaaattaatttcaaaggatcaaatacgaattatacgagtcaacctaaatacgacttgtttattaaacggtcaggcgaatcatgtccaaaaataacccgtattcatttaaggtaagctcaaatccacaaactttcaccggcttcaacaatgtcttttgcaaaagcaaagtatgaagccattacaaacaccacatgtgatattatatggttattgtcaattttgaaagagctcaaaattaaccataaaggactagcaatcttgcattgtgataataaaattgctcaacacattacagctaatctagtctattatgaaagaatcaaacacatcaagatagactatcatactgtgtggaaaaaaaacttaagagggaatcatcaaagcaatacacatttctactaaggatcaaaatgttaatcaagcctttgttttctctactcagttcaacttcaacatactcacagacaagataggattgcaaaacatcactctccatctattaagtgtgagttagttgagctgatgagtgttagtttgttacaaatagtggtaactaattaattactctactccgctagtatataaagctcccattgcactatgtttttcactcttgtttagtattaatgaaatctctctttctctcactagctttaacttttttattctactctaccacttttttttttcttctcttcaattgccttactaaatatttcttttactccagttttatatcctaacatagggtaagactatacaatgtagaaagctagagagagcgatgacaaagaatatgcaatcaacaaagttggttataactttcaatcgatgattttttttttttttttctgaatcgatgaacaaataatttaaatcttatttttttttttaattttcttagtgttttttttttattatttaagcgtttatatattacaactatattttatttgggactcgaatccagaatctccaagacacacacccacctatagccactgttttttattttcttagtcaaagaaaaatgt

SEQ ID NO: 48617 - DNA, 2148 bp, Cannabis sativa
cttacccgatatttccccttacgaatcatgggactactgactgtcacagagttgcgaagagtacacacatcataaaaccatatgtcgtcaactatcaccacccaactttaacatgcacatgaccaatgcctatatttgataatccaagcattcttttcaaacatcggatcttgaattaacgacgtcattgtataacgcaaaatgatgatttaagattttgtttagtagttttagttaaggacatattaacgtacaacctagattactttatatttttttgattttggattctaatttctataatagaatttgatgggatatgcttttggattatacaacttgtaggagggtactagaagcgagcttgaactaccactaatgtaagtgcgagtggattcattgctcacctgaaccctcttgctttaattcagtattcggggtcaagatcagagaggagctccctattggcggtaggagaaaccataaatctaggctcttcaagacctcccttctcacttcagcaattttgaagccaagtttgatatcgttcgttatgttgcatctcttctgtttaataaaatggaagcaaaatagattggacatgataacacggctcgaaatctgtttaaaaataaacaatttagatttttcttaaattattatttttgggatgatatggctaactcgtttattaaacaaattatttttgagtgtgacgtaaataattctaaagtgacacaactatatataatatattatatttattacatgtaaattaaatagattaagttagttaaatgcatatatcataaatatattaaaagaatcataaacatgtgtgtcataaaaatattgtaaacatgttaaaattgtcataaaaaattattgagttgatgtaatttgttccaaattaaatattaaccatattataattaacagattatacagattgtgttatgtcaatccctttgtaagcatattgagtttgggttttaagttttaatacgattaataaatgagttagttttatattaataattccttttattacttaagtctcgacacaacacgaatatgacttgtgaaaacaacttatcatattcttacctatgtttttttacctctcaattgtaagcatgtgatgttgtgctaaagtttatgacgttcagcgtagtaactctattagctagagcactctcagcatcttcccattagtaagatttacctattttatattttactttaaattttacattaagccatatattaattttctttactaatactaaaacctcaataatattaatatatacatatatactcatatatacactataaaattaaagttagaacctaaaataaatcgacaaaatatgtttaaactaatggatgataatctataaataaattaacttttaaagatatgctttaaaattaaaaagtaataagttaaaacatttaatttagtgtgctttctttaaaaaattaaggcactcacaatagatgttttataatattctttaattattttaagaataacttactaaaaacacattatatgaattgtattttcatttatttatttatcgcatattgaaatggtagcaatattaataaagtttaaaaccgatgcaacaaattatagtgtcggtgtatacactgatgcaatcaattgtgtcgccggttaaacgacattgacgtcgtattgattgatgcaaaaattagctcatttgggaaatagcttatgtactaattaatgcaaaaaatcgaacttgctatagctatagagatttaataatatgaaatctctctgtcgttgtggttcatacaaattaataacttgtctgaaattatatattaacaccaactccacgtttatatatatactacgtgtctttaaacaagtggcccttgttcacaacttgcatgatactatactataattacgtagttaaatagtatgacatgcatgttttggcaacttctaattattttattaatatatactttttaatattcaagccactttctcttttgtatcaaactattattggaagttaaggttaaattaatacctcttaacagatgatttaattaattaattaagtgaggtactacggccgaagtacagtgcccaattgtgttttc

SEQ ID NO: 48618 - DNA, 2713 bp, Cannabis sativa
cgagactcaaagtgagtaaaccagtgaaggagaagaatatcactatcgctatggaaagaggcgaaaccattgttgatttctttaatggaatcaaattcacatgggttttggtctgttcacaatccgaatcccaaaatttcaactatatgaattccacgattcgatcggaagtacgatggttcgagcttaaatttcataagaaacatttgaatttggttctgaaatcttatctgccccaaattattgctgaatcaaaattagccaaacaggataagaaaaccctcaaaatctttacgattgaaaatacttacgcaaatctcgccgatatttggatgccaacgaatctggaccatccatcgaattttgagactctggctctggattcggagacgaagaacttcattatcaatgatcttcagaagtttttgaagagaaaagattattatagaaaagttgggaaagcttggaagagaggttacttgttgtacggaccacctgggactggtaaatcgagcttgattgcttccatggctaactatttgaattttgatgtgtatgatttggagctttcgaagctcaataacgattctgatcttaggagagtgctcgttgcaatggcgaacagatcgatattggtgattgaagatatcgattgttctatcaatttcgaagatcgaaacagggctgtaacagagtgtgaagagaataaggttcgatttcttagtactaatcttacttgttgtcttacaaatttatttgtattaatcttaattttatgataattgtgtgcaggtgactttgtctggtttgttaaatttcatagacggactatggtcatgttgtggggacgagcgtatcataatatttactactaatcacaaagagagactcgacccggcactggtgcggccgggtcgcatggatgttcacatccacatgtcttactgcacccctgatgggttcaaattgctcgcctcgaattacctcggcattaaacaccatgtgttgtttgaggagatcgagcggcaacttgaacccactgaagttacccctgctgaagtagcagaggtacttatgaagagtgacaataaccctggagttgctttagaaggtgttattgaatttctcaaagtgaagagaaaggaaaatgaagaagctaagttgaagaaagaaaaagaagaggacaaaccgatagagaaggaattagatgaaggaaataattctacaaagtttaaattattttggcctgtcccggccaaaaattaaaaattattttaaaaaagtacataattttttttcataattttcaaaaataccacatatttttagaacaacctggacaattgatgtagtaatcccatgctggaaagttggaggtcatgggttctaaaaagaagtggtcttgaatgtgaatattctttctacctgcgaatgacaaaaggaaaaaactgtaaaatagggaggggtaaattgtaaaaaatataattctaagggcaaataaaaaaaataaagcaagtaatagcttccatagttaatcaataaaaattcaaattctatcaaaatcatttttatttttaatatttaaagtttatcttttgtctcattaacaaaaaaacagagtatgcctcccacaactttaattctgagtcattactggtactaatactagtcccctcacatttttcttaaaataaaatgctgaagttgttgaagaggttgtaaagggtgactaccttgtaaggcattgttgatttggtgggaaaagcaagtggagaagaactatgtaggctatggtaagttgatgagaaagaagaaaaatgtatgaaatataggaattacgaacaatcatttcttttacagctaacattgcataaaaagtgcaataaacaactttattacacagctcaacatgcacttattaattcggattaatctgtgaaagtaaatatcaattactttcatatatattgcattttagtttttttttttttttggttaaagaatccaagttcaattaaaacaaagacaaatagatgggaatcatcacaaggagatttccctttccttgaaacaaaccagtcatatggctagaaattctaactttcttggctagtccatcagcaacaaagttgaagtttccgttaatagaaaagaaattacagtccgaaactacatccaataaatctaaaactaataaagataaattcaaaaaactccaatccggagaatgagttttctgagccaacaatatagcgtcaatatttaccttgatttgattctgatctcgaggctttacccaactctagtcatcatcttatgctgcacactaggcaatggagtatagtcatcttttatttgggcattttttcattattcaagatacaacttttttaaattaaccacatcattcacacttggaatcttcttgttccaaataatttcattttgagctcgccaggtagcctaacatatcacaaccaccatgtcttgcttctccttccctacccattctctaacctatttgaaccaaacagaaaaattgactccaacaacaactaccaaaccgacaccaagattagctaatctagacattgggcagcaaacaaacaaactgagaatacgcataatagtctcatcatcacacaaacaatggagacaatgtctttgtattgtcacatgtttcaaactaagttaatacatcgtaagaagacac

SEQ ID NO: 48619 - DNA, 1122 bp, Cannabis sativa
ttagggcacaaaatccaacacaatcctcatctacaaccaactcgggtattcattggatgtcatggaaaaggctttgtcaccacaaatcaaaaggtagaatgaacttttaaaatttaagagactttaatctgcacttttgggtaagcaaggttggtgtctgttagtcaattctgaatccttagtttcacgtgtgttcaaagccaggtattaccccaatggcacgtttatttcggcctctttaggatccaacctgagctatgtttggcggagtatccttgaagctcaaaatttggtggctaggggggtttgttggaatgttggtaatggtagttctatctcggtgttaggagaggcatggctccctgatgatgctaacccaaggattatgtcttcacactcgggcctaataaatactaaagttgcaaacttgatgaaaccgggcagattagaatgggatgaggtggtgctgaatgatctttttgagccaagagatcgcaatttgatcttgcatattacgcttgacacaccaacaacccgtgactgtctggtgtggtttagagaactttcaggagtgtacactgttaaaagtgcatatagattgatgtaggagctaaaaggtgaggttgatttggtggagattgtggagaataaattctggaaacaattttagagtctcaaacttccttctaaaatgaagaacctggtgtggagagcaggaagtggctgccttctaacgatgctccagctccggttcaagcatgtaccggttgaagctaagtgtccagtctgttctatcgaagatgaatctattttgcacgcgcttgtaacctgtcctgctgttaagacaagttgggatcgagtgggaatagggactgtaattcagcaggaagaatcatttttggcctggtgcattggcaaattttagcgactggaaaaagagaaaaaggagttgctggtggctttgtgttggtcaatttggaatgcgagaaatgacaaggtttggcaagataaaagagtttgggtggatagctgtaacgcccgtattttaaatttactaaactcgaagataactttaatatattatatctttataactatatggatcgggatcccgagtatcaa

SEQ ID NO: 48620 - DNA, 1397 bp, Cannabis sativa
tttcaggctagggatagaatgtatgcaatgttagactcaataattttaaagaggagaaatggagagggatcatttcaagaagatttcttggaatcattgcttataaaacacagcaaattagaagttgatgaagaagatgataataataataataaactcactgataaacaactcaaagacaacatactaactcttcttgttgctggccatgataccactactgctgctcttacttggctcatcaaattccttggacaaaatccactcgttttggaacaactcagagtacatataataattacatcaacaatattcaataattaaaaaaaaataaatcattaatgtgttttgtttttctttattattaattaggaggaacacttagaaataaaagcaaagagagagagtggcacaagtctcacttgggctgaagtcaacaacatgccttacactgctaaagtaatatatacaagtttttaattaatttacaaaaatggcattaattgttccaaatatttgttttatacctattttttatttgattttattttaggtaattagtgaaactcttcgaagagccacaattctaccttggtattcaagaaaagcagctcaagattttgaaatagatggtattaattgacttaattaatttctacacatatattattagtttttttttaattataagtttaatttttttcaggatacaaaataaagaaaggttggtcagtgaacttggatgttgtttcaatccaccatgacgagaaagtttttccaaatccagaaaagtttgatccttcaagatttgatgtaagctcttataattattattattattaattataatacaaatatatattaagaaaattaagtaattaataaataataataatgatatgcagagtccattgagaccttatagctttcttggatttggtaatgggcctcgtatgtgtcctggaatcaacctggccaaaattgagatctctatattcatccaccacttggtttgcacatacaagtaagattttcctttattaaaaattaaacatatgtcatatacctaaacactacaacaaagacaatttttttttttttagaaaattaagctacatacctcttttaatttgatgtctttaatttttaacatctatttcaaaatctattatatttactttttttttttataatcattctactaattttatccctatcactttacgataattttcattcatctctaatcgaaattttgcttaaactttcccataaacttacacatctaactacaaagaatagaaatttattatgttagaaattatatcttaatcatgtgagtgtgaagataatttaggtataatacttataaaaagaggtatttatgaattaaattt

SEQ ID NO: 48621 - DNA, 1289 bp, Cannabis sativa
  modified_base (45)..(52): a, c, t, g, unknown or other
tttctttattgatatttaaaagataaagattacattgaaatggannnnnnnntagggcataaaacccaaaaatatattgcaggggcggtgctgccactacacccatactttagagacattgctgcttactttgagatgtgtccaatacaaatcaccccaaaaagtataaagtacctttcagaaatatttgttttatatgtggagctaggctttccttagcctactttatttgagattggatattactttgatctaaagtctaccacaaagcagaaagaattcgatacttttacttcaactaggttagccatcagtggttgggtgacaccaatagcacatctatgtccaaagttggtgggtatgcccagaactacttcattgcttcgaacattcatgagatttgacaccattggttccagtgggtgcatttttacaagctctccatccctacattatagataagggatagtgtgaatcataccttgtccctccccgtagagaagaggaacataatcaggttagccagtgtggctaagttttagaggtatgaactgtaccctcctgcatctggaattacgggggcccaggccctatcagttggtgtggatagagccccagcttctaaggaggtctgtcttcgtgatggacaagtccttcacatggacgatgatatgcctcaacctcaaatagctcgaggtttgaagaagagagagagggccctccactaggactaggcctgttagggcacagttggtgacacttcactttggattaggcctagaagccagagcactacaggacccactcacctcttgcatgcatctagaggcaagggcaaggcagtttttgaggattcagatgattcctcttctaagaatgatgatatttgatagttgattacaccatcttttatattcttatcttgcattgaatatttatgtcttgcattctgactttgctactttccttttgtagatgtgtctttcaggttgaaaggtcttattagtggaccttcagatgagccttcagattatctgagggccaaggtggctcggaccactcgtgctatagatgctacaagatcatctcttcctcgtcttcctctatggcctccaccaactgagcagcccatgatgcatggccttctagtgaggaggcaacgacctttaagtaagggcaccctgaagtctagttgtggagcaggctccgccacgggatagagaactatggaggcagctcggaagcatctagagagagcctttgcttctgtggatgatgagctttaggag

SEQ ID NO: 48622 - DNA, 1207 bp, Cannabis sativa
atgacttgttactttattacaagggagattttaaggctgctactttgttgcttcggggtttcaagatttttttaaagaactcaggtcttgaagcaaacaaaaggaaatctgaagtttatatggcaagtatgattcattctgaggctgatagaataattgacgtgtttcgattttccagaagtatttccttttcagtatttaggcatgaaaacctattcttaaaagctatccaataccgactgtgaatacttgattagaaaaatgacttctagaattagaacttagagctctagaaatctttcttatatatgcaggaagaattgtgcttattaactcaatccttttaatgatcaattcttattgatttgaatttataatttttcctaaaagaattgttacaagaatagctcagatttgtagttctttcctttgaaaaggaaaagagaagtctattggacctagaaaaattccttgggtaaatttttgtaagccaaaaaataaaagttgtttaggcttcaaaaatattgccttatagaacattagtgcaatgggaaaatatgtttaggctatctctttaattaaggataacttgtgggttaaatgagttaacttggtttatataaaggataaggacttgtgggagtatgaggctcccacaaacacaagttggtattggaagaaagttatccatgccaataacttattaaaatcggtgttctctcatggaaaattttattctatataagttttccatagctgatgtttgtataaagctacaacaacctcttaatccttggagattcaattttatttcggataggttttgtatcccaaagcattgtgttattatgtggttggctttgaaggataggctcaatacaagtgagcggcaaatgaaaataggaatcttgacagaaaatagttgcttgttttgtggcaattaagaggaaactaataacttgttctttgattattgttacagcagacaaatcttgaaagatatctaggttagggttggttttcaagggggtatctctcggatttatacatgtatgttaacttctacaatttactacatttagaaggtaagaaatgaagttgtttgggagcaaaaatttcaacagtaaagaaggttgtgcacaccattgtaaatacaatatgacataggattttatatactcacaaaaagaaaatgagtagtaaacat

SEQ ID NO: 48623 - DNA, 1299 bp, Cannabis sativa
tggaagagttattgcccccatgactgttaatgaagctactatcttagactttgtggacaaaacttggaagtgcaaggtgagtgttgtggctttgaaggattctgctctcagcccgaattgctttgagcttgggtttgctcgtgccgcgaaccgtgactgggccctagccaatggaccgtggtgtgtccggggttattctcttattctccaggcttggtcccctgtcaagtccctctcggtgaagcttgagtctatgcagatttggatacaagttcatagcctcccacgggactatttttctgtagacaatggcttcattttgggaggaagagctggtaaagtcatttcagtggatttggaggaagggcaaccggccctatggaaaaagtttttgagagttctagttgagttggatgtcaataagcctctgttctcgggttgctattttgaggttgctttgggcggtaataattggattcaattcaaatatgagaaaataggcattttttgctataactgtggaaagcttggtcaccaacggaggggctgctctctttcttctccgatcacggttgtcaatagctccgaaattccttatccgatgtttgggccgtggttgtcaaccgagtcgacttacctggatgttttttctggggctttctccttctcccctgctatgggagcttcgcaccggactggttcacgctctatcaggtcgaggtcgacggcaccgttggccgtaggtggcagaggtggaatttttgattgtaatgggaagggggtgcgggtctcgatgaaagccgtgaaagagaccgttcggaggcctgagcaactttctcggtccaagcaaaccaagtggattcccaaacggtcgactgtcgtaggcgtgcctggcgtttcccgttcgggtaatagggccgtacttggggaagaagaagtggggaaagtgccccagaattttgctcgaattaacttgaatagagttgaccctcatttgaatttggctctaaattcaagtgattttgatgggtcaaggaagttggctattgggccggccatctcttcaactgggccgagtccaactttcaaaagaaaaggaaaggctcttgctaagtatagtgaaccgtgcaagtcttttgggcccaagttgggttttaattcctcatctcctggtgggaccggccctttatttatgaacaacttaagtgaaattggaaatgggcttggtgtgaggcctattactactcttgggccgatggccaaagaaattggagttcctaattgtgacaattttaaagg

SEQ ID NO: 48624 - DNA, 1240 bp, Cannabis sativa
cacgactaaacgataatttcaacagaatcgacgaaattccaaaagtatttccttctcaaattcgaaacttaagaaaattttgcttgtctgtcgaagtttcatttctattttcaactttggaaatatctttgcttaagctaaactgaaacaaatctctcgaggtgagaaatgggtcttcagaaacaaactcgaagactactagctcgtcttaaccctcatattttttagtacattagagcacaacatacagtgcataaatctgcgaccttaaaaactgcgtgaagtggaaataaagtgtctttagagattcttgttggaacttgttttactatgattttaatttactaacatgtatgttcaatatcccataaataatctaatattctaaaatataaaatcataaaaaaaataacaaataacacatatagaattaggaaaccttacaataataacaacgaaatatatgactcattctgtttaattaccctaactcttgatttcttgttcaatatatatgtatattcgcaactatcatacatatagtttgaatttaaatataatgttttctgtttttaaaaggaaaaatcttttaacaattgcaatctttatcattttattattgtaattttgaggcattatgactttaatactaatatataaataatttgtgtattttttttaacattttttgtatgttaatataaccttttcttaaaaaatatttatatgaattattctccaataataaaccaataaaataaaatattttaatttaattataaaataataataattatgtgaatgtatttacatgtggttttagaaaaggctctaaaagcattgctactagacactagtagtgttcagggtcgactctaagttgaaatgggtcaaagaaaaaataatttttttagacccttattataagaataaatagtatttttattttatttttttaaaaaaataaatattttttaaaagatgcgtttttttatttgagcctctaaaataggtgggctctaggtacgggcctagcccaccttaacttagggtcgatcctggtggtgtctagcatcagctaaaggatgatctaatgtgaacattatctataaaagtgggtatattttaaagaatataaaaatggaggtaaaatttaaaacaaacaaagtaaagtgggtatacaatgtaatttctcatcttgtggttggttagggatactccatcaaaattattgcaataa

SEQ ID NO: 48625 - DNA, 1891 bp, Cannabis sativa
cactaggtcctattataacatataaaaaccctagagatagcaagtgaccaatcgaaaaacttttcaaataagtccaaaatcatgatttggacttaaattcatgtcatataaagattatatgatttgctatatttataacaaaaccgaaaaaagtaactagcaaaagtgaaagtaaatttttctaaatttaagcaactttccataaagagaattctttctcttttatgacaagtttcctaaaaaaaatcacctctaaacataaattttttaaaagaaaaaaggcaaccagttccatgaaattaatataagaaaataccatataattcaaaaataaattaaataatattttaacaactaaattgctaaaaataacctaacaatttcatcgtcctcttcatcttcaatgcaaatatcattgtgttgtcggctattagaagtcattccttacaaatatgagagacaataaaacttaacgataaagttattagtttttatatcttttattaaaacattaaattttacaatggtacgttaaagcacaatgctaaaaattgatgcagtattacaaagtcattctttgtaccaaatacatcacaattttctaattatccagtaatttttttttggagggaaaatacaatattatcataaattaaaaatgagagtcatttacaataactgaataaataggtagagataatctctaattaagaacaatcttcatccaactctagaacataccgaaccaaatcgtgagcagtcatattagcatttcaattgacatgagtaatagtaactttagggaaaaaagataaaagacttaaaatatcaacaattaaatcatgaaaagatgaaaattcaaaaaaaatattcattcaaagcatttgagaccaccaacgcatctgtctctatttgtgcaattagcaactgtaattggaaaacccgaactagactgtgaaagatggccttagcttccatctaatgcgaatcaaagttgccaatagtcagctttgaaagagcagccatgaccaaaccacgtgcatcccgaacaacgacaccaacatcaattacattcttgctagcatctacattcaacttataatttttagaacaggtggttgccatgacaagtgggatgttgattgtaaggtgatatcatgtgtgatggtagtagaggggttgaacttgtgtttggcagatcttaaattttttaaataggtaagagaaaaaccaacaagttgtatagctagtgtagtctttccaccatgaattactgtgttcttctcagtccaaatacaccaaagaacgcagatgatgagtttcatttcagcctttgtgtaaagagtggaaagatggacaagatagtctcccttggtcatgacagctaagagatcctaatcaagaactaaaccatgccatatagaacgagcatacttacatccaaacatggtatgtccaatagactcccaagcccgataacagatcgaccatgtggcatatgtaatgacctttctccgtactaaactcgtagccacgggtagagcatcatgaacaatacgccaagcaaatttttttaatttttttttttttggcaaattaagggaccaaaagtagctccaccaggatgaagaagcagaactggaagagttttccacatctgcaataaacccagcaaggtgaagaccccatctaattgtgtattgacccgaattgtgatggtgctaaataagaatatccagatttgggaagaaactcaaaggcaaagtcaatagtcttcccacatctaaatgggaaaaaaatcaattatttatgtatattttatattaattatttttcaatttatttataaatcaattaataaatttaattaatatttttttactttaattca

SEQ ID NO: 48626 - DNA, 1010 bp, Cannabis sativa
  modified_base (402)..(402): a, c, t, g, unknown or other
aacatgtgatgtgctaagctatattatcaacaaaagaacataaatctcatgcaaattcacataacattgcttccaattatatgaacataactttttaatgttggtgagaatcttacatgacaaacagaaacgtccaaaaccaattacaacccatttatctgactcattctacaaatattatattttggtaataaagaacaaatttgcaattgggttgtacatctcaatatcactttgactttttacattagttagtgtaataattcataattaattcactatattttatcgcctagctctctcaacgaacattgttattaggtattagtggtgtttagcacattctcggtatgtcacgttatgattagctaatgatagtctctaaaaactattatattaaantatatgggacccgatacttagttagaccaatagcaatattaatacacaagaatgtactaggcaccacttgtaccctttagtatttctccaatttctaataatattggatggtcttattttgtagtctgtttacacaccttattttcatcaaaaaaataaaattacagagcatatgaaacaccataaatggaccacaagactgagcatggaatctttttacagtttaaacccttttaagattggtgtgaaacacgagtagatatgtagggcttggtatttttaataattttggataaaaaataaaaaagattattaaatgtgaatattaatggcttgacattgaaaatacagatgcctcgttactcttatttaatactcacctgtatttaagcaacccctttgacttaaatcaaatgccagcaaggttgggatacttcactagtgaagcacagcacaatgtcaaagctttaattaattttgccaataatcttgttcaataaggttttatgattgttaatttgctaaaaatgaaaaataatgatgtttcttaaggtttaagtggatatatatgattaccaaattgcaaattgggacttcaccttatcata

SEQ ID NO: 48627 - DNA, 667 bp, Cannabis sativa
gaaggactctctgcactccttcattcttctcagtgacaaggggcccttaagggtgttgctatctctcgcactgctccttctcttactcatcttttgtttgcagatgatagtattctcttttgtatggctacaccgtcttcttgtgtagctttgaattcagcccttcaaacctattctcaagcctcgggccaaatgattaactttgattaatcatccattcttttttcttccaatactactgctaatgtccgagatatgtttatgcatacttttcaattagtggataagccttttatttctaagtatcttgggcttccccaatgtttttctcgtgctaaataccaatctttttcatttcttaaagacaaagttttgtcccttatccagtcctggcatcacaaatggttctctaaggctggtaaagaaattttggtcaaggctgtccttcaagccattccttcttatgctatggcttggttccgaattcctaccataatttgcaaggaatttgaatcgattgtgtctaggttttggtggggctcttcccctaatcgtccttcagttcattggaagagttggtctatgatctgtcagtctaaatttgtgggaggaatgggttttaagtctttggttgatttcaaccaagccatgttagcaaagcaggctt

SEQ ID NO: 48628 - DNA, 1517 bp, Cannabis sativa
tcaacctcaaacattaacatcttactttttggattattgaatatccagttgaaaccttcaactgcccaagccccatcatacagtacaaccacaaacacagttggatctacaaataaaaatgaggaaaaaattaattctgatcaaacatatgtcaagaaatatcgcgaaaagcatcacaatatattgtggaacatttcaacaactatatcgtgacacattgctacttgtcgataaaggtcattttggacttccccaaacacaacgtctaaatatatcgataaatatcgcaaacaacatcgatataaatggaaaaaattgtcaaaagagcacaaaactacaagtatgtcacgacatacatcgctacatatcgttaaacttcattcctaaccttcaacacactatcttatcgttatatgttgttaatatcatcgctaaagatcgctaaacttgcaaaaaaaaccaaaaaatgcaaaaaagttgtagttcgtatttcagtgacaaaaatggtacataaaaataaggatcgtgaagatctatttatatcaacataaatacaactaaattcaacaataattattaaagaaattacatactcattattttttgaaggaattttttttctaaaacttttggtttgaaagttgtccaaccaactccaccgttatgtaaggtggtcgaacggcagtagctccgacgactgatggtccaattggtagagtgtgggtgtggtgtgactttcctagagagagagatggaaagtttgggtgagtgttggttttttattttataagggtaaaattagatgaaaaattcaattgttgcatatttcgcatgatgcaaaataggatagcatagtttaagtcccttaacctactttaagcatgcattgtcaaatttccctatgtaattatactttttacaatatatgtgaacctcaattggtgaacaataacatataattttctatataaggaaaattcattcttaacaaataaaatggaaaataaactaataatatgagaaacttcaatcataaaagttaagaagtctcacagcctagccctactaataaagactataactatcttttcaagtgtgagttaacattcaaattacaaaataacctcagttgttaaatggaaacctaaattaatcaatgtttaagattatcaggcagaattcatttcgcttttgtactgggggttggaatctaagtccatgtataaaatagtttaaacacaatattagtatttgtgctatttgattgctaacaataagttgggttgaacatgatgatgaaaaatatgagtaattattgtccgaaaaatcgaactagggcacatggatttctcgggcacatacaaggtgtcgtggggccccgcctaacagagaatcattacccaaataatagatgaactactgaagaaataaggatgcgtcccatccgaaaagccctgtatatttcgaaggggcctacttctcaaacattaaagtatagaggtatggctccatgaagg

SEQ ID NO: 48629 - DNA, 1505 bp, Cannabis sativa
  modified_base (1446)..(1473): a, c, t, g, unknown or other
ttgcttgcatgtgttataaatgtacatttcattgtctgtactataattttttttaattactttgtcttagtaatatcatttatttatcatagaaaatatatgatatgataacagtataaaatctgatttttgcaccaaaatttttaattgaaggaatataatattatagagaattttattgagtttatgactacaactaatttataatgatttaaaatttaaactggaaatatatattctactgttattataagattttattattgttttatatacactttataatgttattaactaaatattatttttataattataagattgatcaaatatttggtatagaaaaatagaacttactaaaattatttttctaatttttttaattattttttctaaattattattattaatatataaaacaaaacattaaaaaaatttacataaaaaaaaagcattaatatacacgtatggttttttttttttaaatctattttttgtcttacatataactaattaaagttattaatatgaatacaaagcttcacacccaacaaaaaaattctactttttttaaaaaaataaaaaactatatacatgtgatcaaatatttatgttaattaacccaatatcaacaaaaaaatatcttaaatttaaacaatataaccatgaatatatataatatttatattaaataaccaattaattaataaaaatatcttaaacctaaacaatataaccatattaccttattttttaatataaaataataattttaaagtataatttttactctcaatctcacttttgagatttcaaaattaactaaaatgaagagacatgtacctcccttgaagattgaatattcattcattatttttttttaaaaaaaatcaattattttaagttatatattattgtttaaataaaaaatataataaatcaaatcagaatttaaatttaaattacatatatttttacaatatagagtgaaaaatataaataaaatcttccttttttaaaaaaaaataatttataataaatacacaaaatatgagatacgatccataaaaaaatattataatatgtaaatattttaagctaaaaaattaatcgagaaaatagactaaaaagattaaaacaatgtgtgataacttctttttttaaatgtgacactttaaaatctttcaaaatcattgtatttttttatttttttattttttattaacaatattttcaaaaaaatagttaatatcaaataaaatatcaatattaataatattaacaaattaagtaaatataaataaatttatttatttattttaaataaatatataattttattgttcaattaatattcacacatataatttaaaatttatataaatagccatgcgaagcgctgcatgtttactagttaataaatatgttaaatgacaatattatttnnnnnnnnnnnnnnnnnnnnnnnnnnnnagttttgacatttaaatggttaaaattggaaa

SEQ ID NO: 48630 - DNA, 608 bp, Cannabis sativa
cgaaacaaaaaaagggtaaagaaagaacaagtgatcatgaatttcaacaaaattattacaaattggacaataagaaaaagcaatagacagttgtaacctttggagtttatctctggtcaacaactgagagtttactatctatcaaagcatgaatctatgcttcaaaatcgagaacctccatactcaagagtataatatactttctcaacatcaagaatagagttacaaaaattgctaacattaaactttctatttacaacagcaacaaatatcatggaatgagagatagtctatttgagcttgaggagttttttccaataccaactcgagttcccttcagtcatgtgttgccaaaaaatcttgccctttcaatagactctttgcacttgagtttagaaaaaatatctcaaatgtatttattgatcattgttttatttcatttagatacttgttttggaagataagactttatcctaggaagcataatgaatcttatatttgttatctttgttacctcatattttcaattatattattgtctattatatttaagaaaaatcctcaaattattcttgaaaataatatagttctctctctctttttttttt

SEQ ID NO: 48631 - DNA, 978 bp, Cannabis sativa
ttacttggatcataaattctaatcataattgttgaacgtgacctagtaattaagagcattgagacacttattaaagtgtttaattaacatctctaggacataacgtattataattagttagtgattttatataatttttattaaattaaaataagtaagacccgatattaaattgcaccagtactgatattacacctcataatggtactaaacaccgtgagtgctatttagtatttttctataattagttggcgtaaattaatgagagatcataaaaaaatacctgtggtgcttataattctaaagtgtaatatgattattggtgcaattaagtatcaagtctcatataattaatgaagtaattttaaggagatatcgctaataaattgtaaagtgatacctctagaaaaagattaagcagcactagtatccaataataatactctaaattaatacaccctacaaaagttaatgttgacggcttcctaaaaaaatgcacatgtaaaattaacaagtcaaccaaaagctttaagcatattgctatgggatttttcttttcttttttaatattttttttttatgtattatcaaattcatctgtgacatgttagtttaattatgctctgaaaaatttgtaaaaaaattttgattataaataataattgttatagttgatcattttgatatatgcttgaatgttaaaatattttttatattaataatttatatataaatataaaaaaaaaattattcatatatgaggtcgtggattgtattataagaagaattaagatcactgatcatgaataaaatagtgagcgagggccttgttggataacaccttttaaaacagatatcctgttggccattttatcaccaagtaagcttttataataggataggaaagcttcttgtacctatgctggttcatccactctgatgccattccggtttacaatagataagatattgttttgc

SEQ ID NO: 48632 - DNA, 1187 bp, Cannabis sativa
gggcataaaacccaacagaggccctagaggaagggcatgcgatcggggagatgttaacccaccgtaggctgcttaggattaggaaaatatgtttgtagcaatacatgccagaattaatgaaaaagacgaagagattagatgcctgaggaagcagggtacttctgcagtgcctagtcctcaaatgcaggtggctcctacccttgttgtgcaggcgagaccggttgctgctgtgaacgagatggaatcgctgtacgaaagattctacaagcaggcacctccagtctttctagaaggtcctgatgtgaggaaattcgatcagtggctaactgttattacacgaatttaaaactttatgggtgtcaccaacaataatatagtgtcttctgccacattccaattctaggaagatgcccttgtctggtgggatatggtggctctgactcgggatgtcactaccattacctgggaagagttccaggaattgttcaatgcaaagtactataacgaagcagttcgtagcgcgaagagaaaataatttatccagattactcagaaagataatatgagcgttactgagtataattcttagttcgatagtttggccaagttatccttgcaaattgtgccaactgacttcattaagaaagaaaaatatctagattggttgaaccctaaaatcaaacacaatctgatgatcacaaccgatgataacgccacctatgttgaatggtgaagaaagcactgcgagctaagggtgcagttgagtgcatctaggagtcccgagagacataggttgttgggggagccactgctcctcctacctctggttatggtaagagtagtagtgactcgaccgctgatcaaaaaagaaaggcaccatcagcaaaatgtgggtcaaattagaatgagaggttctgagggaactagggtcgtggcaaccgacagggtggttttgaaactcgatacacttatccagaatgtcccaattgtaagaagcatcatctgggtgagtgtaaagggtcagcatgtttttagagtggtttgcctggtcactacaagagggattgccctcaacttaagaaagaagagaagaagatagcagcaaagcccgctctagcatgggtgtttactcttactcaggcttgtccagaagctagccccttagttgttacaggttagctctcggt

SEQ ID NO: 48633 - DNA, 2314 bp, Cannabis sativa
attttagtgatacgtaataatcctgatagagctagtccctcgtgacctcaagaaaagaaaaaggatgatgcgtgaaaccatagggcaccaagtcccatcaggtatcctgctgaaaaagcctcacaatgccagggaaaacctcactacagtacctagggactgaaactaacccatttgcacgtagggtatactttgaccacgtgcaagggtataggctccacagatggagtaagatggtggggaacaccgcaacatgcttgtaaaccaagggaggaggaacagccagcgcagcactgagatgtctgatgagcacatcccatggataatcttatgcgaagagttgaatgctcaacaaggggacctctaagattattaataactagagccatgatagactatcccaacgggatgacatgaacggaggaattctagatgaattagcagccttgaaaaaagacttcgttgaggtctctaggagacaaaagggcaacgattatgaatctagcaatgaggaccaggagccttgtgccaagaacatgatggaggcagagctcctaaagaacttcaaaatgctagaaatgacccaatataccagagacacagatcctaatgatcacctcttctagttcaacaaagtaattaccactatacgcatcagcaatgatgctaaatgcctttgttttccttgcaccctcaggtggtcaacgaagaaatggttaaaaaatggagcctagctccgtgagctattggaaaaaactacaaacaaactttaaaaggcaatatgtggctaccaggaagataaacgtagaggtaagcacgttaacaaacaccaaataactacccatggaaactttgaaaaactatttaagtggttcaagggggaagcctccaagaccaagaaagtagatgaggggcagcaactagccctactacaagctgagatccgacaaaaaaaaaattggaatgaattacagagggaaaatgctaaaagcttgcaagacttccaaaagttggcacaaaaatacataaacttagaagaagctcagatgaccactattggaggttattatgcaatggtagctccatcggctgcgtatgaaacatagtatctgggaggttaacatctggtagctcaatagttgtctggagcagctagaccttccgacatacaattccaagccccaatggcacatacgctcagggttcgaatgtaactaaagattttttttttctgaatatggagtgcctaaaaattctagtgtcactcctacagtgtattgccatatcctactgcatccactactcttgccataagtgtaacacccaataagaaactttcctagagtaaaagatcaagcaaaggtattattcacactaatagtaaaaaaggaagaaaggaacccagatacaaccctcagtatacccagtacactaaatggattgacacaaaagggaatgtcttcctagccacccaccaagttgtgcattatacgaagccaccactaatgttcaaagattgttccaagagagataccaacaagagatttcagtatgtcaataatattggacatgataccaataaatgtagtttattgaaggacaaaattgaaatttcatcaggttagaccatctccatgagtgggtcaaggttcgactagcccaaaggagcaactttcacaacacatgccctgatgggatatctaggggttaccgcaagctctagtagctcaagtccctcccaaaattgtgtaaggtctgccaactgtagccccattagcacctggtctcaaataacccttcaggcaacccaatgttcctcctaggccaaatgaatggatagaaatgatcttaacggatcctcacataggagaagtgactcgtggagaacaaaaaagatacgtctaagcattggaccatgatgatgaggttagggaacaactcaactactagcataatgacccaagctcatggagcaagccataaccttcactgaagaagatgccgagactgtccactttccacaccatgactcgttgatcacagagacattaatttccaacaagatggtggctcgtatccttattgatagtgggagtttggtcaatgtacttttcaaatccacttctagcaattggtttcatggattaagacttggccccttatgactcccagttgtttgggttcaatggagagaatccagagtaccttcaaatactgcacattttgtggtactggattgcctcatggaataaaatgtaatatttggatgtcttgcctaaatggacatggaagaaattacttccattcgacactt

SEQ ID NO: 48634 - DNA, 769 bp, Cannabis sativa
ttgagtcaaatgagctctattcagttttgttaaggtaaaattagacaaattgcctcttgcaagaagggagagtttcagctcaaacgtctcacatgaaaatcgtattttacattttttgaggccttatcaatggtgtttaaggattttaaactagatctagaattcttaaactgagctttacaaaatgagaagaaattaaattcgagaattttaaatttttacctgaatttgaaaaatacttgaagaacaaatagaagtagatcgaattcttagaatctcgggtctctctaataggcgtttaaagcatatggaaaatgtgattagagaaatcttttatttatagcaattgatatcctctattcctttgccaataaggagttaatttaaatttaaatttaaaaagtaagataagggaatgagagagatagatatatatatatagagagagagagagagagagaaatttgataccttttctctgttccttcctatctatctttaattgtggaactccccatttcaaaaaggaatagggatttgaaattcctactcacgctaggaatcattgaagaatagaaaacaattcctaagattgtcaaaagattctcaactggtagttttgagagaaacgagcttagttcaatactaaaacaaagtgaatttcctgacagttttaaataattgggtaatgtattgtcgtcggactctataaatgtaatatcccagaaattaatatattattgaattgaacatattttattaaatatgt

SEQ ID NO: 48635 - DNA, 1048 bp, Cannabis sativa
tttatatagcatcaaatgcttacaaaaactacaattctcatatataatagttagtttttaagtagattaaatgtaataaaaaataaaattgaattatattaattataattatgtgtagtaaatttattctacaaaaaagtagtgtagtaatactaattattaagtagcacatgtaatttttcctatatatatgtatatttttttacaaaaattttatacatataaattaaaaaagtagatcaatgttttcaatattttgagtaatattcaccccattaatatgatttgatgatgaattatttttttacacagtttacaatatgtatgcgcattttttaattgtgatatttatcagaagatgaaaagacattattgatctcattaatgaataatttgatgataattttttttgcattaatactaatggtgataaatattaaaaaaaaatgaaaagacatgattgatcccattataatgaataagttgatgatatatttttttttattaatttgatgataattttttatagatagtttacaatatgtttgtgtatttttctgagaggaacgaatgtaaaaactcttgtaaaataataaaaaatagattgaaaactttgtggttttttttgttaataaattctatgtacatccatattattgatgtcgctttgcattgaaattatttgttttgattttctttaacaatttaaaagttagaattaaaatgagtaagcatgtagaaataatatctttaaaggatagtttgataaattttttttttttttgaagaagtttgataaatattaaaagttagaataatataaaataaattaaaaaattagaatatacacaaattaaataatgtagaatgatagaaagttttttaattaattggttgtaatgttatgttcttgataaatgttaaaagttagaataatataaattaaaaaaaattaaaaataaccacaacaatttatataaagttaaaattatagaaagacataatgctaccttattttaaaattaaataaatcaaataaagaagaagt

SEQ ID NO: 48636 - DNA, 1130 bp, Cannabis sativa
aaaattaaatacttttatgcataaaaaagagtagagtagagtagtactagtaggtaagacataagaggaggatggaggcacctaggagaagatgaagatgatgagaggtagccagccgataagcgacagggacccagtcgagtagtccggtccggtcagacccggtacgggaggaccccacttgtctcacattcacccttaccgcagcaacgcattacacatgacgatcgacggaccaccaccaccaccaccctttctacttgtggccaatggccgcgccagccagttcgattccagctctcttggtcagcgattgcttcacacgcgccaacaccaccgattgtgacgtctttcctctcttaattattattattattatataatttaatgagtgcattaatttcttttcagtgaaagaaaggaagagagagagagagtaaaagaaagaaggaaagaccgtatacggaagaggaccatacggcttgtccgacacaaccacgggtacccctgggtcccacttcactcgactagatcccactctctctctctttcttttttaacgtcccactatttaacctctgtcacggttaaaaagacaagcaaactaaattacattttttccttttcttttggtttggaagaaaacaattttttcttgagtactaataggaggactaaaatacccttgttattattaatttttttgtttgtttgtataattgccctcactatgtggcaataatcaaggaaaaaatgaaaaagatgatgagattctcgtcagctggtgaagtgaccttattgttattaggtggtgtttagtttattggtaattgtaattgtaattttaattataataggaatagtgaatattaatatgattataggcgaatgtgtaaagtgtgtttggttgtgtagggtaatatgtaattatattccttttaaattaaacggttggttgagtacatgaatcttatatattattttaaaaaattgaaataaaaatattttcttatatatttatttaatgttaattatatataaaaataaaataattatttattaattagtgaatattaaattcggaaattaccctgtatactgtttttttaattcttttttttttttttcaa

SEQ ID NO: 48637 - DNA, 1146 bp, Cannabis sativa
tcaccaacaacatgggctaacacagcaaagaactatccaatcaacccaagttttaataaaaccaataaaacttaatgtaagcccaaataaaagtctaacatattttgcataagtagtttacaaaataaattacttaagaagttttgcatcgttacagaaaaatttaactaattaaaaatacattatcatttatatatattatcactaaaaaattgtagcattagctataaaaactattatttataataactaatgtgtaattgtagtcatgtgactaaaacaaaattaataacaaacttctatctaaatattaactttaagagaaaaataaatgtgcactaattattatcctatttatatcatctattaatttatatatatatatatatatatatatatcatatgtaggcggatctacattttgggaagagcaagaagtatctatgattacaatgatcttatttggttgagtttctgctttctgcgcttttaactttcctaaaaaatcttctgaaagctataccaaaattagtttctattaaaatagttttataaaattaaaaactgaaattcactaataacggaactaagtaattttggaagtgcaaagccaaaaaatagcttttaaaacccaagccatgccaaggccaatgaagattgtatcatatggctaccatatcatattttttaaaatatgtgttagataaacactagaatactatataattaatatgttgcatataatctaaaatactatattaattcaataatctagaaacacaattaatctattgagataattgagaaataatagagacaatgggtagtgcaatattaactaagtcatctttgagatctctaaaatagaagtagattatctcatcacaacataaaattgcaatagaataatatgtatttatagaattagaaagggaacctaacaacaaataacctagttggattgagtttttatgttaagcttaagtccatacttatgtttcaactataaacttcacagagatgctaaacctattaattatatagatcacaaaaaaaaaatttaaaatcccatagtgtaattttgtttttttttttttttttttcaatgagaagtagggccaaccaactagacaaggtgacttccat

SEQ ID NO: 48638 - DNA, 1107 bp, Cannabis sativa
aaacctccccctaaaccacttctaagaactttaaaaatattatcgaatggaagcttaatcctaatactagaactagatcctgaagtcaactttgattccataacaaaaaggagctagggctggtactgcttcacaagctgggagaggttgcgttatgccctgggacaccccaatccctgggcattccaacttatgagactcatttttccaggtggggttgctaagcaacccccgccttgtccataggattctcaacagtaggcacaacagcatcatcacttggggcagcacgagctcttttcaaaagacttctaacataaccccccaacttgagtattttaccttgtgtaaaatcttttcacccaaaatagcactggcaatgactctaggaggaagattagctccaggccctctcacctcataaggaagagcaataggggagaaaataaatcctttgcccttactaccaaaaatctgagcaataccaaggttaacagagccttttacaactttcattttgtcagcagtagtgataatagaagaaccataataggagtagagggaagctcaaaattcacattttgaaagccaagtgggaaagtcgtaatagagatcatagaactcagagcaccaagagtgaaattgctagaaaaaatagctctatcctcaatagaagaaccaacatttagaggaacaataaaagaagtactactagtaggagttgcagacacaacttcagaggtgtaaaattggttcactacttcttgaagctcctgttggtattttatgccctaaataaaacccatttcaatctaatctgatttgttattaatgaaagattagaaagcttaaacggatttttttaaaagaaagacctaacataaacacgaaggtagtctctataacccgaaataggaggcacaattgattcatcacaagttttaaggaacttgggacatttgttataggtgtaatccataagaccacaaaagttttgaaggccctcatatctaaaagtcaaccatttggtcctaccaatattcctaaaatgaatattcattcttctacgaagaggcttggtaacattgttggaatatgttttaccag

SEQ ID NO: 48639 - DNA, 996 bp, Cannabis sativa
attaattattaaggattatgtattaataattatagaatgcatattttagaaatgtattttatatatcatatatgtttctatgctattttatatttaattacttaatttctgtgattgtgttcggaagctgtggaaagcgacgttgggcctagagagtcgcattttataatttagattatcggggtattatcgttaaatggtagaggcgttagaattttcgggatctttttatttgactattttacccttgttagtcataatagtgaatatttatctttattatagttaagggcaaataggtcatttcatgtggttattattattatttctttttggattttagtagcttttaggggctgaggttatatcttattttagcaattactatatttggttttatttaatttaaaagttaaattaaaaagaaagaaaagaaaggaaattaaacaaaatcatcaacctagaaatttctaagttttcctctccctctctctttcgaaccccaaggaaccagctgagaatccattccttttcaagcaattttgtgtaatcttatttgatttgtgaagcttcacctcaaggtatcccatcctagccttctttccctttaatttctttgttgttgtttttagttttgatgcaagggttgggattttggtactgtgatgttggggttttatgctatgatattcttaagttaaattatgtttattttatagatttcaagctgtttttagtgatgtttgtgttgttaaagcaaggttggagtttgagaacttcaactttgagctttaatggtaaaattggattttgaggcttttgttgagttcttttggttagtttgagtttgtttgggtacatacaggtatactggagagtttcacaaagtttgggattaaattgagttttgggggttggaattttggttcccagaccagaaccggaattccggttcctgggagcctgagtcaaccggtcgaccggttggtcccagga

SEQ ID NO: 48640 - DNA, 1843 bp, Cannabis sativa
  modified_base (1805)..(1818): a, c, t, g, unknown or other
tcatgcccatgttttttcccatttgtccaccctatatatacaccctatatatacactattttcagatatttttttcttttttttttaaaaaaaaatggaatctttgtaggaatcattccaagtttagaagggtgtggataggatactctatatggagccatagtataaggattttggaccaatgtttaagagaattaatggaatagttattatattattgatattgatttaaaacccaaaacttactatagtgatgtgataattaatattggatattaaatgttgggttggtacataataataaatgcaactactattttggaattttataactcatttgaccgactagctttatgttccatccatatgtgtgacactaatgaggggacaaagtttaatttacaagctattttaagttctctctatagttttgtgtcacctataggctatagctcaatattgaaaaaataattcatttgtcttcttcttcttctaattaatattaatattaatattataattattattaaaaaaacccctctactttccaaaaataaaaaaagcttgcccttttcatggcatttgaacttaaggcatatagttcctaagagcaaattacaatatggtattgtatttgttataaatgcaataattcaatttaatagtgtcgggttcaattcaagctactgcgaaagaatttatcgaaagagtggaacgagctttcttattaaaagctttaagtgaattcttaaagtaaattagtttaaccaataacacttgtctttgtagaagtagaaccaaaattttacttggtataattacaatatgatgatatatttaactgactaaagctagctgagatcgagaactttcttatcatgcagctcctttgcttcaaccagcatcatacttaggcccgatttggatattcttttgtttttaattttaacttttcaaaaaaaatttcttggaaaaatttctaagttaattttttgttaaaataattttttagagctcgaatttaaaacttactaattacacaatcaataggtaaaatgctttggagctttcgaagtccaaaaataaattttaaaagcctaaccaacaagattttgatatcatattgtcgtgtatgttatagtataagatacatttattgtgcactataatttttcctttttttttttggatttcaacattaatatttttaattttatatataattattattatttttttgagatgatataattattattattataaagtgtatattttaatttaacttttgctgttgtatttgaaaaaaataatggtatatttagtgtttggtactgcatcaatatagtcaatgacattttgtacaattcttaagagtatttttttttatcatttttataaaaaaaatttatcaaaaaaacaattttattatttgattgtagttatcatgttctcatttatttaagtcaatgtgtggagaaaaatatataaaatttaaaaacagactaatatattactaaaagaaaaaggattctaatacttgaagtggataggtagttgggaaatatggtgactataaaagaatatactaacaacttgtattaagcgatttggaataaaatttattgaagaaatataataaaaatatttccataaatatttatcaaaaaatatgtacatccccataaaacttctagctagtaatctatttcggcttttagaaaagaaatttaattcaatttttgtattggaggtgtgtttggatatgaggtggtaattatatatgaattcctaatatcttgttnnnnnnnnnnnnnngtaattacatgggaaaataatattt

SEQ ID NO: 48641 - DNA, 815 bp, Cannabis sativa
ttttcactcattccactacaatagattgctgatttggcattgttgggttgcagcccgaaagttgcagagaacaatttaatagcttgcatcatgagataaatgcttttaaaatcccctctgcagaataatagcacatcatcagcaaaactcaaatggtttaaccccagatcagcacatctctcatgataaccaaagtctttcttctttcctagcttcttcattattctgctgagatattccattccaaggacaaacagtattggtgacataggatctccctgtcgaagacctctcttagcttcaaagaatccatgtgtagatccattaaacataagagaaaaccttggagtcctaacacaaatcatgactaaatcaatgaatctcccaagaaacttcagagcatgcaacatctcctctagaaaatcccactctacagtatcatatgccttttgcaaatccaacttgatcatgaattttggtttggctaccttccttccataacttcaaattagatcttgacagatcatgatgttatgtgctatatatctaccttttatgaacccttcttgattaagcgaaactaaatcagggaggatattctttaacctggaacagatcaacttggtagctatcttatataacacattgcaacatgaaatatgtctgaaatcactcaccagattagggctcttgactttgggaatgagggtagtgactgttgaatttatttccttgagaaggctccctgtttggagaaaacatctaacaacttcacatatctcaggcccaatcaactccctagaagggtcgcaact

SEQ ID NO: 48642 - DNA, 5246 bp, Cannabis sativa
tgcaacaaagaaaagtcaattaaattaaaacagatcacaccataaaagacatggaaatacaatccatcaacatcataagactgattaccttgatttcattggcctcaaaaatcaaagaatttcggtgagcctcagaaaccattgaatctgtaatgagcttgaaaaccttcttgctcatgtttgtttccataacaaccatttttcctgaagcatatattttgcttattccaaggtctgctgccattctccttacatagagcttctttagtaagatctccatggaatgaggctcttttccatattggcgtcgcaaattctcagtaaattgcatcaaagtccacatgtctttcccagctgcgttttcggcttccttaataatttccaagggtttctccagataatttatgtaatcagaaggaagatgaggatttatgtttaaatcaacctgcaaacccattaaatcagctatttagatgagttacaagaaccagttgtagtattaatacttatatatgtacgtcttttacactgtaattttcacaataatccatttcaaaagcaccactgaacccatagtgtctccattctgctatagttttgatcataaagatgttttctgggatagaaaggttttattgaagaaaaaaaaacaataaatgcttggagctaaagccattatgacttttgctcacgctcacggctaagtaacacgtaatagcaaagtggtaatacaaaatatttaagttctcataaactcttgtgcaaggagaaaaacataccttcactgaccagtatggaacagaaactacacggtgttcatcaacctggtaatcaaaacaattacgaaagaaaaggacagaaagtcaataatcaatagagcaacatttcaagcaattcatacagacaatcctatttgacgacagcagcgacatgtctgtgtttgtcattatacagttaaagcatgtacatttaaatatacaaaacaaacaagagaattcactttgcaatgaagaatgttaactagtgtaatatgcacaatctcaaattagaaatgtgttttttaagtggatgataattacaaggaaaaatagaaacaagagactacagctgataaaaaaaaaaaaaaagactcactcaatccccagatcataccttcgacaagctctcgaagagcatttcaaagaagagatcaattccaacatttccaacatctccagtctgctgctcaccgaaaatgttaccaaaacctcttatacccatatctctctccgcaagttgaaagccttgcccaagttcacggcattcctcaagggcttcgagtctctcctaaggaatggccacaatagtcaatttactgaaaacccaaattgtaaacacttgtagttgtatctagaagacagaccatatagacaattgtaaagttactaggaatggagaaatggaaacttttaacgatctggaaacatgtcaaatggtataaatataatgtccctaaaactaaaagcatttagaaagcataccagagcttgatcagttaagagtgatttgtctggataaaataagtgtgcatgagcttccttatctgctcgtcccactcttccacgcaactataaacaattaaaaaagcaaaggcataaaaattattacacagaactcatgtatatgtgaggtgggttgagaagctcaggaactatcccataaatgatagtagtagatcatatatttcagaaaaacaataagcacatgttgtagctgaccttgaaactagaaatgtgttacttgtgcatcaggaataaataaaataaataaagaagaagctgacttggacatgagtaatgcaactagcatgtatgcactgctttgaaaaatctccaactattgtaaactcgaaaaaagttcctaagtgactaataagttattataatctgccatagtaggtttccagaatataggtttaagaatcaatctttgtctcttccaaatacgtcactcattagtctcatttgtaaaaactgaaagatggaaatcaaaaaaggaacctggtacaactgtgctagaccaaattgttgaacatcctgaactatgatggtgttggcattttggatatcgagaccgctttctactatattggtgcaaatgagaattttgatatccccttgtgcaaatttctccatagtttcctccagctgctttgagtattgctgcaagatcaataataaatccacttaaaaaaaatataaatatattataggcactaaatcttatgccagttaatgcttaaaagatagtacctttccatgtgcaatagctatttcaacatcgggaaatgactgttcgagaaactccatcacttcctcaagccctgaacgtaagaaagacattgaaatacaaatcaagaaaaataaaaacaaggagataattgatgtacactactgaacttttttccattaagagggcgtttcttttgcttctctgaattttaacaaattaatctacagccagaaagaaaaaagataacaataaagttttatctttcacaatagcaaccacatgggatttaacaagtatctaaggaccaatataactccaatgaaatgacacaaaactgaaactatggatgtaaggttcaatgaataacataagactgtatatgagtaataaaagggttacctttaatacggggcaaaacgtaaaacacttgcccacctcgatccagttcatacttaattgctgagattactttctctttactgtgtgctgaaagatgggtttttattggaactctttcagggggcggagttgagatcaaactgaaacgaggtgaaatgcataactacaacttttagcactaattaccttcaagttttgagattccaaaatttagtcagtcctaaaaccaaaattacaacacttgttcccatacagaggcaaaataaggaagcgttcataaacaatgatattcacatggtataaagattgtattccgaacaactaacttaattatgtgcatttggatcgatcaaagataaaacctacaactattattgtttctcaaatttgcaaatataacaaattctaatgaactgctggatccagaattcatatcttaattcacttaattaccatgataagttaattacctagcatcacgaaacccagtcaaggctaagtaaagcgttcgcggtataggtgttgcagacaaagtaagaacatcaattgaagttttgaacgaagcaattttctccttctgttttacgccaaacctctgtataccagaaataaagtagagcacggattccttaagtcaacatggacatgattccttaatgataaggcaaatagatttaaaagtacaaacctgttcttcatcaactacaagaaggcctagattgctatacacaactcggcttccaagaagtgagtgagtcccaacaataatgtcaaggtgcccatttttaatcatttcaagatgttcatctttctctgattttgtctgcatgaaggaacataattacttacatttgactctgttaatcatctcaaatcatcaagactcctcaactattaaatgaactagttatcattttcaaaatagcaatacctgaaatctgctaagaagtccaaccctgacatttgagtacatagaaaacctttctgaaatgacatggtagtgttgtttggctaagacaattgttggagctaaaaccatagtttgcttccctgctgatactacacagaagatggcacgtaaagcaacttcagtcttaccaaacccgacatccccacaaattaaacggtccattggggtttctctctcagtcaaatccttgtcaacatctatgaaagccttagttaagaggaagacaccaaacaagggtattttctcagcaaagaattctataaccgaaaaacaaagcaaacacatttccaaattagtagcagaaagtacctgcttttgatctggtgtaggttgataaggaaactgagctgtgaattgagccatggcagaggtcttagggtagggagggcgtctttgcttgagcctatgtagatacaactccatcaaatcaacaaccattttctgaactgcaagctttccctttgtttttcttttctcccaaacagtcgtatcattcaatttgctcaaagttcgaggctttttcgtttcattaggactgtaataagagataaaaatcaaccatttcatttaacagtagcaatataagtcatgacacaataatacaactcaaaaatggcacaaaattagcggatttgagttcagcatactggtcaaaataagttaaacccgattaaatttcaaattaaacacaagttaacctactaaaatcgaaaacgccatgtttaacacaattaattgcatattataaataaattataaatatgctactgctgacataaaattagtcaatgtattaatctattaaggaaattatatgatacatgtttaaaatgacaaatttgaacccatatagatcaagaatattaatgtgtctgtaagattatcatgagttacacccaaaacacgacacgaattcacgaattaccatcaattgattcaaagaactgcaataaaataaacaagtgaatacgaaagcttacagattgtaacgataaagaagacgagaggcctgtttgagaggtaatttagccattccatcggcgtattcaatgaaaacatactcaatcggctcattagatcctttaggaacatcaaatttaatacccacaaatcgaccaacaccaactttcttatgcacaacgtaatccccagaacgaagtgagtaaggatcgaccttatagttaaaggaggagtcaacaaggccatcctcgtccttgttccgttgactggtggagcctccacgttgcttgagcttctgaagacccctctgttgctgctccttcaccaattgaatgtacttatcggcctccgccgcgtccacaagggttctagaaccatctcggttgccttggtcacggcgaattcggtggttgaggagtgtaatggcgtctgggtcgtggtttagggtttggaatggagtttgggattggggttggccttgttgggaatgggtggtggatatggctttgggttgcgagaaacgataacaatggaattgtgcttggcttagggtttgagaagggaagaaaagccttctccatctccagggagtgagactggaaatgtcagctggtgttgacagtagagaagccattgaagaacatga

SEQ ID NO: 48643 - DNA, 3045 bp, Cannabis sativa
atgatgtggtctctcggattgttgatcgctttgcttcgagtatgcatatgaggtatcttgttcggactatattctacgagcaggtactcgaagtcgagtccacgtgtcaccatcatgtgataccacgcagagtgcaaaaattgggataacattaggttttactttaatctaccgtcattttaggattactattcacctaatagtctaggattttaagtctttgtgacaaattgcaacttttatttttgatgaagaatagaacctaggttaaatgaattatatgcttcattgatttgttgccttgattagtctatctctatcaaaattaaagctttatctaagttaaataaattgcatacttcgtggatttattacttaggtaaaagagttaattattaagagtttcgccttgattatataaaatagggagattgagataattgactgcttcagcgttatcagcaagataaatagtttgtttggaaactgaaatacattcattgataagaattaggaatgattattgatggtggtgaataacttttaattagtttctcatatcataatctcaatattaatttgtttcttttatttttattgttgctattttaatcttaaacctaaaaccctcttttctaactcttatcactaatttttgaataattgaataaacatagtcctcatggattcaacccgtacttacttttataatgaaataattgatagaatttgaaataaatattaaatttgatacggtatacgacacacatcaaattccaagcacaacaagcaccaccatcacattccaagccatccattgaagattttattaattccttggccacgagttcaatacagtttcaacagacaactaaagccacattaaagagtttggcaaattctatgggctaaatggctacatctatgggaaaaatatatagaagcaaaactttatgaaagaatgcctcctcaacctattgaaaatccaagagctcatgctaataatgttgagaattggagcaacttatgcaccgccaactccacctaactcatccatccaatctcctcctacaccattaccacaagtggatgagattaaaccttctaaggaagcaccaatgcctaaaccgcctctacctatttatgttcctgttcctccattcccaagtagattgaggaagacaaagaaagatcaaattgacaaagatatccatgagacattttgcaaagttgaggttaatctaccattacttgatgttattagacaagtacctcgttatgaaattttttaatggaattacgtacgagtaggaggacgctgaaagaggacgaaaaagtaagcgcgggggagaattagggctatacataaatttttgtaaaccacccaacccgaacaactagcccaaaccaaccgagataacccgacgaaaaatgcaaaccaaaaaacccgacgaaatataacccgcccaatcagcctgaattaacccaattaagagagttttctttcatgtatatatatttttattatatataatctatatgttatataatttatgtacatatttataaaaaaaataaaaagttcaaactactatatttttttatagtggatgatttgaactttaaatttaatatttatatttatctcattaagacaataactaaaatacaacaattaaatgtgagaaaaataaaaattagtgctcggtttggacgggttaacctggctaaattgatcaattcgttgggcagattgaaacttttctttttcttaattgggaatgttgcacttatatttttgtaaccggatctttatattgggttaaatgtaacgtaaaccgacaaaaccgaccgacgtacacccctagggagaatgtgtctacgattatccaaaagaaacttcctactagaagtgaggatccaggaagctttatgatcccttgtactatgggggataagttggttgatcgatgtatgttagatttgggagcttcgataaatgtaatgccatattctatttatgcttcgctgaatctcgagccactaaaagaacttgagttgtaattcaattggctaatcgatctaatgtctatcctcgtggagtagtagaggatattctcgttaaagaaaaaaatttgttttctaggctgatttttatgttctagacatggaagattactctattccatgcacgacacctatgttgttgggtagactatttatgaatacatcgagtatgaaattggatgtcacgtcagcaacattaaccttggaatttgatggtgataaaatatatttcagtgtacttaaatctaataatattccaactacgggaataatttaaagtgaatggtcagaagttaaaaccatattaggagtcaacagttgaagaacaagatgcaataatccatcttgttgacctagtgtatgtggaagaatgttgtgaccaaatcgaaccatgaaaaaaaattgtaagttattagttttagtttgatttcaaaaacaagttagatttagtttttaatcttttttaggaaaaaaagagagaaaaaaaagagtgagaaaaattagaaaagttacattagtagaaaaaaagatagatattagaagaaaatctcaaaaaaatcagaaaaaaaaagatagatattagagaaaaaattattagacgaaaaaaaattaaaaactcagaaaaaaaaagatagatatttagaggaaaaaaagatttagaaaaaaatttcgatattcagaaaaaaaaaaattacagaaaaattatagaaaaaaaaatattttagataaaatttagaaaaaaaaaatctgaactaatcgggaaaaaatattttttaaaagatttgaaaagaaaaatatatttgaaaaaaaaaaaagagatgagggtgatccttattctgcatcaactctattttggagacccgtcttactcaatgtgagtaagaagtggaatacaaaagcatgaatacttaaaatagaatttgatggtgaaacactcaaattcaatgtgttagattccattcataaatacataaagaa

SEQ ID NO: 48644 - DNA, 2603 bp, Cannabis sativa
aagagggacatgtcaaagttctatcagttcttcaatgacttcgtccatgacaccaacgagtgatagaattttaagaaggagattaaattcctcataaggaagaacaatccccacatgtgtcgttatatgtagaatgactagactcaggcacaaggtgcccagaatgaagatccaatgccaccaccaatggtaagacacttaggagtcatcatttgtagactccatattgcaggcaagactagcaaagctagggagcgctattcttggaaactccatcacgagcccaaaagccacatcttagcagtcgaagaaagaggctttaagcaaccaaatcttagagagttcacgatctctttctcagaaggagaggctacccaagtaagtttcctacacaataaccgctggtcattactacacaaattgggaatatgattgtggcgagatgcatggtggacaataaagcctcctccaacattcttctcaaattaacatatgaaaagatggggctccaactcgctaatttggtaccctacagtcaagtgatgtatggcttctttggccaaggcatcgcaccaatcaagtatatcaaattacccctcacagttggagaaaatccaaccccctaaactttgatggcgtagtttgtcataattgatgttcccttagctttcaacgccatgataggctaaccaaccccatacgagttgagggtagtaacatccatctatcacctttgcctgaaattcttaacaaggcatggggtgggatgtttaagagaagaccaaaaaatttcccatcactgttacaacttcgccttgtttaaagccaagaaagagaagatgcctgccaagagctttgaagaggagcccagcaaagggcaatgaagtctagcacatagcagggacgcatacatagatccttacttttgggatcctgtagacagcttcgaacctatagaagagttaaaggaagtggaggttgatcccatttctccagccagaaaactaaagatcgggaaaggtttaaagccagaaataaaatcattattgataagatatctaagggaaaacctagacctttttgcctggtcacatggagacatggtctgaatcgacccctctgttataactcatcccctcaacattgatccaaactttttacatgttcaacaaaagcagaggttgctggacaaagaacacgcccaatagtatgatatttaattgagcatattttattaaatatgtaattatttttgataatgaagtaagattatgatcttatttaggttaattggtgtgaatttagtaaatacttaaataaagtgtaatttattaattacagagattttactggaatatgagagtatcgtagatactaatttttaaataaaatattttcgggctcgacgaccgttgaaaactcgacgaagtggtcaaaaatatcaagacaatataagatgaattgtattggaattatttcggactagattttaatgttgtgaagccagttaggtcggggtagttggaaaatgaccaaaatgcccttaaggtgtgctttagtttaggtgattttgtaaggagtgaaatagccttttggggtttggtttttgtcttatattggattatctaggctgaagtaggaatttattttatattaaatttattagttttaatttataatttggaaattgaagataaaaacataaaactaagaaaataatacacatatattgttttctctctttctctctctcgaagaccatagaaacccaatagaaaaactaggatttgattctaattcaatcatgtctaagctgaaccaaccaagggtaagagttgttcatacttgaggtaagttcctcaattctttcctttgatttttgtaaggtttaagttgagtttttggttagggtttgtgtgatttcggggctgaagtgtaaattgagtttagaatgtgttattgggcttgctttaaaatttgtttgggcttgaaatggttagaaatagtgaatgtttaatttgaattggtttaagtgaagattattgagtttgatttcatttgagtatgcaattttgagtaaaaggatgaattattgtaaattggtgcttgggatacattgtgtttatgatatggaattgttctggaaggtttgagcaggtttggtgaagaattggtttggttttggagcaacaaaccagtttttcctgtttctgcagcagggaaaattggttaattggtttcataggcatagtgaaaccggtcaaccagttttgcctataggggaaatccttgttttaggcttcaaaactagttttatttgggttgtttcccagagcctagaataggatattttaatgatgtttgagttatttttgaactagtggggagtaacatatgttcggttacgaaaattagggttaatttcccgagtttcagtttgaggtatttattggtttttgttgtcatgacataggactcgagatcatcaagctttgtttttctacttaggctgacatgcacgcttaatctctgggctgaggtaagaaaaatgttttgcaccatttatggttaacgattatagttgtaatagtctcaattataat

SEQ ID NO: 48645 - DNA, 798 bp, Cannabis sativa
aataatatttaatttttgatagattattattaatttttgatattttgaggtttaaatttaaaatttaattattttattttttaacttatggtcatatactctgaggaggattattagaaatcaccatgtcaacaagcacacgagcaaatttgacaatagatcaatcccaagttactttgttgatcattatcgacttacctattgtattgaccagagcactaaggaaattttaactccaatattaaagacccaaaccattcaaactgatcaaaaaactggaacaaatcacaccatcttaactgaatccaagttaacggtctaaggccgaaacaccacaagctttttgatcgaagtgtatcacacaaatttctagcacaatatctctagtggtttcatcacaaaaactcactaaagtaaagccagagtgcatcctcacaatgtgcttaacccctagattacctcagacacgcttcatgaattcttcaaaaatatgaaaaggagggtttgcaccaaacactacacaaataatagaattctgccaaaacgaagtttcaatttctacctcttcaacatcaattttagcaatgagttgatcaccaacattcatatgattagtaaagtcaagatgagtaaaaggagttctaacttaatttgccttaaatttattccacgcatcgtcgatgattgaaaatccacctaatcaacctcatcttcccaagtacaaggcctagatggttcaattgacgaatcttcaacttgataaattaccaacggagtgagtagatcggcctctaaatc

SEQ ID NO: 48646 - DNA, 3177 bp, Cannabis sativa
ttaaaaagaaaaatattcatatagaccatccctgagaaacgattaataatgtacaatataaaaatcaaggttgttttaaagttgtttttgccttattaacacaaattgattattaattatagggatcagcccaataataaaaaagaacaccagaaaaacgatttgtgtgcattattttgtagtgttatttactgttgttttaatatgaaaaaggccacgtaaatgagatattgtgaaaaatgacaggtcataaaatctatatcagttctcataaagagcaatggacaatgggaagaagaacataatcaagtatgaggctagtggagaacataagcctatttttggagtgacaagatggtgactcaagactacagggttgaattgacatggctagagatgtcgaagaagtggccagatgacactgcaaactagatgttgataaagaatgagactcatctccaagcatgtacaagtcatttttacatttccctttcagcggtaccctcccagattttttgtccttcacaaaacaataagacttatgaaactcatgaaacacatcattgacatctgttaacttggaaacactaacaagattcttagttatggcaggaacattcaaaatagaatttaattgtaaaggagggttagaggaagcaggatgaagaacatgaccaatatgagaaattactaattacttcctacagtaagagactcaaaacctgtatagggaggtggagttatgaagatgttccatagtaaaggcaacatgattggtcgcaccggtgtcggcataccacataaagtcatcagcaaaatatggtatggttgaggatgaatatacttgggattcagtagcagattcagtttcaacaagatatgctcgaggttgatgagaagctttaggggtaatgaaagctttatcaaatcggtgatgacatattgcagcagtgtgtcccacttttaagcaaacttgacacaaggacctgggtgattgattcttgaagacccaatagaatgattggctgacatcttagaagataaatcagaaacaatgttatgacgttcaagatgacactcatgagccattaacaaagctcaaacttcttccatagatttggactcagtactggatgttatacccaaaactacagagtcatatttgggccctaacccattaagcaaatgaagctcaagatctacatcacttacgacatagccaactatggtcaaactattactcaatgatttaactttgtccataaaatctcagatggaaagattacctttttggatgttacacagctgacctttgagttgtaaaagacgagcttttaactgactagataatcgttgctcgagagctttccataacgaataagaggtggtgtgggaagccagtgatgccaagactgctttcgtcattgaagatcacaaccatgaaagtaatatctcatctttacgtttccattgtttgaagatagggtttgagtcgctggtaatcaagaattgaggaggttaatcatcgcggaacaaatgatcatcaagatcgtggcctttaatggtgggaactacttgagatttccatgataggaaattcgatcgatcaagcttgattgttaatgacgaatttagggaattcaagaaagggttccatggttgattcagaaaatcaaaggtcactggagttggggcagattgtgtcattgtaggagcatcgtttacattaatatcgaattgagggtcatttgaagaattggccatggacccgagtcagatgactctgataccatgaaagagattttgctacaaaggaaaaagagagaagattttcaaagaagtgaaaatgggaaaaaccttagcaattgcttaggtggtcatcttatttatatctcaacaaaacaaaagggtttattacaactttacctaaagatgccaccctttgaatcacgtaatggaggatgtggtttgggaatggttgcccgtgattccaacggtgaagttttggcttctgttgtttggcacatgttgggtagtttctctcctaaaatggtagaagctttagcgcttaaacatgcaaccattcaatgccacctgttgggttaattttcaaaaagtgcaatttgattctaattgtttgaatgtggttctcaagtttaataaaaaggtttctttagtttcttctttgggtttagttttatcagctttgagacgtagtttgtctgttttttattatgccagactttttttttctgctctagatctatcaatattgttggccattcatttagctaaatatgccttctcaaaagttattagcaaggtttggtggtctgattgtccttcttgtattcacaatctcattgttagttagataaattaattcaattagcttcccctcccctttcgtgattgaaaggtgggttttgaagtttttttctcaaaaaaataaataaataaaaaccaatgaaatattgaaaaaaatacagatattatgaggtcgtttggtaacacatttattttttaattttataatacaaaaatgaaagtaaaatttgtattttaatttttttttaaaataaaaaatgtattttataaccactttaatttttttaattttaaaaatagaaaataaaagtgtgttctatagcttttatttttattttatattttaatgttatttaagtcggatctaggttcggatctggggagtccaagactgggattaggggcgtagttcgagtcctaaggtccaaattaaaatcgcagtccaaaatatgaattaagaaaaaaaactgtttaaaaaaattttaaaagtgattttttttaagttttaaaattttaattcttagttaaaaaattaaaaaagaaaaacagttttataaaatatattatttaaaaatattttttatttttttaattaaaaaaattaaatgcagctatatttatctaaaaactatttgtaaaactaaatgaaaatttgtttcattaatgcattcatgattcatcgcttttgtttgatgagtatcaaatccaaaagtaatttaaatctttttgcagcccatgaaggaggacataaattcatctcttttttatatcatcaatctaatccaagttagatgtagagtagagtgctttgccttgctttcaatgcaaatctttttgcagcccataaaa

SEQ ID NO: 48647 - DNA, 1252 bp, Cannabis sativa
aaaaaagaagaaaaataaaatgaagaactgaaaaatctttgtggactcaactaccaccgcaaagtgatgagtcaaagtaagaagttttctatggcagtgtttgatatgtttacactacaacatgaggcatgtttttttgtttgtttgttgtgtacacacaaataagattcttttgtttgttttaaaatgagttattagtactggttttgaataattaataaattagattcttagtatctattttgttagagatggaatcaaccaactgttactaccgaatcaatcgtcaatttggactatgattggtagatatttattgagtcagtatttgatttaccaattgggtgatcactagtgtcccaatgcaaagtctttggatgaaaagttgactttcatttactattattatttttaattaaaaagtggtttattttaaagaaaaaaaaaaatctattttgttactctcccaaaaaaaaaattattttgttcaatttgttgctactaaatattcaaattttattttgagctcttagcccctcagcttcttcctcagcttcttcctcttgatggtatttttttttttggaatatttacatagtatgctaatatttatttaaagtttatatttatactttgacaaataaattttgacatttatattttctatacttatttgttttttcttttttatttactaaaacttctataaagtttgttttttctttcttatacctctttgtttttttttttcttagctgatttttttctctcttatttttttttcttatgtaagtttggcttattttttttttctttctcttctctttgtttatcttttttctttttcatctttctctctatatataataagtgtacatttttatatatatttattttcaaacactttgtcactctcacaaaactttattttattattttttttttcatatttttttctcatattttttaacactctttctctatcttagaaaaaattaagaacatttctcctatatctttctccttctcgcatgattaataaaaagtagtattttttatttggatgttttgtagtttattcgaaattaatttatgaatgattttgcatatttgaacaaggttgatgtctgttttttttattgatttatagctgtcttttgttattttatagttatttttatgttattttttaggtattttatagttgttttatagttattgttgaccaaggttttcggcaaccaataaaata

SEQ ID NO: 48648 - DNA, 725 bp, Cannabis sativa
  modified_base (689)..(693): a, c, t, g, unknown or other
attatctgctaatttctaaatttaaactaagcggtctttacagacaacccacccaggatagtttgtgtagctaggactcaaagcttacacaaaccctagaacaacgagccgaggaagctagaatctttagagaggatacactaccacactctctaccatgaggggcccattttgttccactgtctgcattgatgccccatttttcatctatgctacaatcaacatctattcccaacacttcacagcctcgggaaccaatatcttttgtcgtattggcaagattagagtgttgagagggaataacttactttgaagtaaggcaagactgattttctgaaagggcagacagagattatgagttacttgaagaccccattaacactcatgggagatccgagaaggcccaacgcagaggcagagccacaactagaccccgtctcttcgggagatgagttcattcttcccaatgattacagacctgatgatggcgaagatgtactccatacacctcagaatatgtcaatcacgtccattatagatacgcaagatttagaggcacaagttttagagaccattccaacaccggtggagaagagacccaagaagaggttgaggttgtttgatgagtacaccaaaattaagaagaagatgaagccatcgatagctcatgtaacaccctaactatcttnnnnntattacgtgattttttaaacgtactgtgcagc

SEQ ID NO: 48649 - DNA, 814 bp, Cannabis sativa
ccatatgtggaagacatccgattattatttttcttcatatgctgagaggttgctcaacaaagataaaaatcaattttcttcgatatgagcagtcaagccaatgcaagagtatgagagacaacagtgtaagttatgcatcagcagttgcaaaaatttgactattccacaccgtgagaactgaagatcatttcaagcaaaaccaatgtaataatattctatgttttaatcgaaatattacttcaaataaattgttactttatgcttaaagattattttaaataaatatatatgataaaactaaccaatctataattctagacaagaaaaaagattgagatttacaattatttttttacaagacttgcaattgattcttagttgatcattgaatatctacttttctttttttcttttcaaattccaaaaccaggagacatactaatattttaattgaaaaataataatcagatgcatctacgatggtatatcagactaaaaaaaaattgcatgggggagtatgacattatcaaaggcaaagatgggtgcctcaagttggggtgttttggtttttgaattttttgtgtggtaatatcaataagaaacctatccaaatattcaagttttctatttttttttagaaaattatttcaatcaaatatacattagataatcaagcatatgaatatattttctatgtgctagttggttgttcttttgtaaaagcatgttggactcgatcgattgtggatgctagtaatgttgggtagggggtttgatttttgcactgtaatatccagattaaaatagtatttaa

SEQ ID NO: 48650 - DNA, 692 bp, Cannabis sativa
aagatatatttacattttttttaaatgtattttttttatttatttagacctctaaaataaatagatcctaggcacgaacctaacctgcttatacataaggccggctctgatatttctaccgcagaagcaaggattttcttttaaaagtacttattttaatatttatatgcttttagagaatacactattcaaattagaataaattacgttcactataaatacttaaagttttaaatttgtaaatggcataaacataataatattttttaactataaatatttaatgtttaaaaaaaatttaaaagtaattactacatatttttattttgacacaataatagtgtcctatttaaaataataagaacagagtatatggacgaaacttgagaaatttttcttaaaatgggagattacgtaattttaattaagatatatatatatatatagtattaattgtttgcatgaaaataaacgttttgcaaattgggtttaactttatagaaatgctaaagggcattagtggtgcctaatatgtgtcaatatcactaggtccaactaagtatcaggtcccatataatttaatataataacttttaggaagtatcgctaatcaatcgcaacgcgacatgtcgcaaaggtgctaggcaccactagtccctaattataacaatgcacttaactttattaataat

SEQ ID NO: 48651 - DNA, 1310 bp, Cannabis sativa
aaattatactgctatgatttttctagtcaatctgccgaattactactgttgtggatatttatcactgttaatattataacacattcatattgcacacatataacaaattttctacaattaattgctaacctcataattacttattttctataaataagtctttatctataattattcatattattttatattttatcttaattctaattaatttttatatctatttattttatactatcttttcataaagagaaagttccaatttaaaattcatcacccataattgtcacaaaataggcatattatacatgtggttgcagtatgtagaagaaatatataaataaatatttttttgagtgagtatctagaagaaatcttcttacttatatagtggagctaaactttatattaagaattttattaatatatctttgtatgcatcatacaaaagtactgaatacgtcccattgggacgattatatatattccattcacgttattgttgaggcttaattaattattttatctttagaattatatttacatttatgtagatttaattggtgattttatatcaaaaaatgctgaggggcagtttatgatgtattatgtaattcaagagataatatattaatagtataaattaatatcgagtctcacataatttaatttaataaataatataaaaaatagttaatcaattataatacaacacattacataatagtaatatttttttatatatgtgattgtgtgtactttcctgctattatatttatatttttgtgttatatattttgtaagaaaaaaagtaaaagagtgccattaaaaaaaatagttaacttcatattttcatgtcttactcaaacttatattttctttgtctcaagtacaaactcatatttttttttataccaagctaattaaaatgctatttacgaatatatatatgtattggttggtttagtccaccagtatatatatttttaccaatctaatataaatattaaattacaaatatttaattataacatgttcaattgaaaaataataaaagctaacttgtctaataattttttcagtttagtcaggtacaaccaatccatactaatctttaattattattatttttattattagtgttgttaatgttcggtgttgaaatagttgattaaaaaaaataaagggtttttttctattatagaccaaaaatagatgaaatttacatttatggccctaaaaaaggaaataaacaaaagtggaaactaaaaagttggtaattacaaaaataccggctgagaaaacggaaa

SEQ ID NO: 48652 - DNA, 1179 bp, Cannabis sativa
ttcaagaccgatcttcgattccagtcgagcgccgtttctgctcttcaagaggctgcggaggcttacttggtgggtctcttcgaagacaccaatctgtgcgccattcacgctaagagggttaccatcatgcctaaggatattcagttggctcgcaggatcagaggcgagagagcttagggtttcaacacattttactcattcctcttttcttctgtaaacatttatattatgactaattgggttgttagcttctcttcttactgtttgatctaattaatgaaatattagtcatttcaagaatttgtgattttatttacacaaagcaatctttgatgcaccattttatgttatatctttaatgatctgggatataccacagtttgaaattcttgaattaataataaaattatagctatttgggcatgaaaaaaagtaaagaaatagagcatattagctttgtttacaatcatttgttctaataaaagagtgaactataaaactcaaatgtattttcattatataaaggtattgagcataatttgttagttgaatgttacaatacaacttaataaagacactttaatatcgagctggtttcaattggttatagtggggtgaagcatgtagtttctataaagagaaagtttctataaaatcaatgttgttgctaagatatgatttcgtgtaagtatatgtttgtttatccaaatgaatagtgaagactaaagagtcaagtagttggttgggacttggatggggtctagagtaagaagcatagtccttgagcaatcacatggatgataagctatttcattatatatgtttcacactcgtttatctttgttgcaaatcttatggcacaagtgggctctattacagctatacttttatgtatgagttggaagacaaagccatgtgaacttcaaatgcttatgtttatgtctcttgcaaatttgtcaaagcttcccaaatgtctatataaggctacataaccacataaccaaatcatcaagtcctcacgttctctactacacaatatttttgtgaactctatagtaatacttcttgacaaaagcacacaaaggaagatcaacatggcctttggattgactcgttttgttcagggtaagaaggctcttcgaagatcgctttcaggcatcaaagaagcaactttgaagt

SEQ ID NO: 48653 - DNA, 2191 bp, Cannabis sativa
tgttagggcagtctaattttccaaatttatttattattaaatttaagatataattatttatttcaaacactgttatctgtgctatttggatttggattgaattttcttgtgcttgtcatgctttacagtggcgtgtcgtgttcatgtcattgtcgtaaatttactaaaaagttactgacacaaacacaacacgtcatacgaaaaatttataaaacatggacacgaacacgactcgaataagtttgtgtcatatcgaacccataaaatctcatgttgtgttggcaggttgtaagctaaattattgattttaatgtcatcgtgtcatgttgatgtcatgttgaatttttaaattattttagaggacagacacgaacacaacccgtaacatgaaaaattgataaaacacgaacagaagctgcaaaaaattcgtgttgttgtgtcaaactcgtaaaatcccaagtcgtgtttgtgtcaaatttgagtatcgtgacctgaattgctttcctactttacgactcgacttgtcttttccttgtactgatgttttaaagtcattaaacgattttcatttaataaaaaaatatatattaaataaaaataataataacaagttgtaaaaactcatctaccgtatatactattcccaataaaaaaattaaattaaaagcttaatttttttaattattttgaggattaatgatgtagttgtttccattcaaaaaaaaaatgatgtagttgtttttttcttaaagctctcacctacaaaattttaactttaaaatcatttcttatctaaaacttaattatttaactgatattagtattcattgttatgtgctaattaacaaaattataaaagtagttatatatttgattgataccgtaaataatctataagaggtattgtttaaatcaataacgatacagattataaaatataaatgaactaaaatatatataattaaataccaaattatataaatttttaataaaaatacatgttatattaatataatataattagtaatatttaattttttttatttaaataaataataattaatgaagattataaaaaatgaaatatataagagtttataaaaaaataattaaataatattaaattataaagtaagagaaaattacactatttgaaaaagattagaaaaataatattttaagatatgtatactgtttaatatataaataaatatgtgaatttgttagtgttatacccgaaattcggctatataatagaaattgacacgtgtcctacagaaagaatgtgaatcaactgtgataatataataatgatgtatcattaaatacaatttaaaataactcgtacctgttaaatataagtttgatagataatgttcaaactcgtgggttgctcaatcttatgcgagacaagaataataactattaaactgatattgacgagacatatatctgcctcaggataaactcatttacatatacaagaagaggatactctcctatacgagcagattaaatattgcaacacacaaccacctcgcgttacacataacgagaagatcacctcgcactgctaatactaataaaaaaatatgacgagatgaattattttccaatatttagcgttttttcctattaagatgaacaagaaggagaactcatatctgacgagacacaaccttccaagtcaacaataaccgtctagatgataaaaataaaagagcggttgggtagttattagtattatcccatgtgtgattaaatgaaacgtagggattgtccatgtttcatgaacaattctatataaaccaatcccaaaaagaataacagccaacctatattcttataaataggagcagaatccatgagaaaatgaacggcaaatttgagacgagaaatattgttattcaaatactaatattgtattatgtactaaaaaagatatctaataataaggactcatggagtatgtagatcttaactacaaaattacgtaaaaatatctgatgttatttcatcatttattacttatttatttctataataaatttattacgtaaagactaataatatagttaacaaaaatctgcgttaacggtaatattatataaataaatacaatatataaatgctattccataatatatgtatactatttagtataaaaattaatacaataatatattttttt

SEQ ID NO: 48654 - DNA, 1206 bp, Cannabis sativa
gttccgccgtccgtccaaggcggttgtccttggccttggcgatggtggtttcaggcgatcgggttccaatgctcctcgtggctcgagacgctcctggatggtgactaggcgaggcgctctgtccgctggttcttctcagcgttctgtgtgggtatccaaatcgataccagctggtggtgtacctccgattgctaaatcgggtagaaagggagctattggaattgaagaaaatgaaaaggagtctgaaccttttcctggaatggaaccgcctatttctgaagctataagagaccgttcctcgatgtttgagcctaatttgaatatgtgtggaaaagaagggttcatttctttaatggatcgggcccaagtggagcccatttctgaaggtgggccgagtgctttcattgacccaatccatgtgaaatgcttgaaccaaggaaatgtgaaaattgcaactattggagataaaagtggggatgctgggcctgttgctattgggccgtgcgtgagtaaaggtgggctggccgcctctcttgtggacaaagaaactagcccaatgctccttgatgtgaatatgggtaatattgttagtgggccttctctcattaataataatactaccctctcgtgtgggcctactttggtggactctcaaatgttatctaatcctagcagtgagtccatggggccggctatgatgggtattaatgctaatggtgttgagccaattatttctaatgggctgaattttaatgaggctcctttaattgaatgtggtaaggatattaataccttgtctaatggaaaggaggcagagaagaattttgaagaaaagaaggccttgtctcaattttttaaagctcaagaagagttacttcatgatttgaaacattttggtaatttggacttgtatgagatcaaaagtttgggtggtgacattggagtgccgccttcctcggaaactaatgagcgtactacgccttttaaaaaaaggaaattcgagggctccgcttctctttgctcgagacctcacaagttagtgagaacttatcatggtgtagtcagagactttccttgggacactaagaagaggatccatgagacacgagcggaggtcgatgacttgtctgaggagccttcggaggaggcctccggtgagagctccagctgcaattctggagccaaccgagatcatctgattggctc

SEQ ID NO: 48655 - DNA, 1519 bp, Cannabis sativa
  modified_base (1119)..(1123): a, c, t, g, unknown or other
ttgtaagtaaaaaagtaggtataagcgtgtatgagtaattttgtaataaattgtgtaaaatggatttttcatgtaaaaatttcaaaaattaaagacaaaaaattaaaagaaaaaaaacacagattaaaattaaaagacacatttatttctccaaaagagacattaaatttaaatagaaacggtacaaaaattaaaactaaattataactgtaaatcaaaataaaaaaactcaaactcagaagtgcttgagcaaacgaaggaaccccagaaaaagtaaacctagaaattaccacaatttttgtgagaaaccatgcaggagggaaacacgaaacccagctagcccaagaagagattcatcatcctcgtgtgaaatcgaacgaaacccaaaaaattggtagaagtataaggtttttgaaatgacgtttcatcatcgaggtgaagaagatcctcctcctgactacagtaagtcccagatccatattttctagggttttttgtgttttcaaaaaatgttggtgttgtttgggtgaatgtgagtagaatgagttaatggggggttttatacgaaattttcagtaggtagtagctttaatggtttgtggtggggcttgtgtttcatatcctatggagtggttggatatgatgttaaagtggaaggtttgaaattattgttgaaaacagattagtcaaaggctgttgggagtctttagttgttgttttctttaatgggaacatttccacatgtttttatctattttatattattccttgtctgtttgttggcattggggatgaattgctattgggggttaatttttgttgggggttaatttctattcggggttaattgttgttgggggttaattgctattggcggtttaattcaaaatgttggataagttttattggttttgcctatgtcacctgtaagtttaactgtgtgcttatacttacattttaacttcgcaggtttgaatttagataatttcagtgtgaaatttttccatggtggttattggttcacccgaggtggcaatagaaagtatgagaatggtcgaatttcctactttgatttctgtagtttcaatggatttagcaggctccaccttgaagaaatgnnnnnggtattgggatacatattcccttttggttttctgtttaagccaaaagggaagaacttgaatatggggtttaaggttattgaggaaagtgaaattattatgatgttggatgatttgaggggtagaaattacagggaggccaacatatatttggtattgccagatccaatttttgcagttgaatggagattggatgaggaggcagtaaggcatgacccccaaccccaaccggctaaattggacaaatgcattctagaggagttgccatctgacaggagttagtaccaaatgttgttgtaaatccaaaaggccatcatgatcctaatgatgaattctacaacaagtttgtgcaatggggtgatttagcagcacaatggattgatgaagaggtagattct

SEQ ID NO: 48656 - DNA, 1705 bp, Cannabis sativa
ctcaagcattctttttgtttttctccaaaaataagatatgcgactttaaattaggacaaaatattgttcgagtagcaaggtggcaatagtgaatcaccaagcaccagtgtgcaagcacactgggcacccaggttgaccttggcctggggttcagcattttgtccttcatacatcaattctgctttagaattagcagataattaggccttaattatgaaattagattattaattatgatttataaatttatagagatttaaataaattctaagtgtattatttacactatatatgaatattcatgttttcatattttatgctcgacaattttggaacgcggcatttggccaatagaatcacattttagtatcttagtagtaacggggtaatatagatagacattgagaatatcgggaatatttgaggcattagatttaactaaaatacccctagggggatgtatgctttttggtgtgtgcaaggataaaatggtctttttccatttagttagtttgccctttagtgaaatatgatgggattagtattctaattttttattataagttaatgttagataaatactaggtattatctctttatttcaaaaatagaaaaaaaaaatcaaaattcaacctttctctctctctcttgctctaccccttcaagaaccagcaaatatttgtgggtttcttcagcttaatcaagttattctagctagattttcatagctcaatccaagatatccatcaagctcctttctctttgtgatttcttaagttccaagctaagtttcgtgcatgattttggacatagggttgcagtagatattgtttaatattgtttgagtattctgaggttatattactgatgttatttgagctgtctttgagttgaatcagtggctgttatggtgtttgaggaaggtttgtgtttaagaactcaagctataaaccctaaaccctaagttaattgttgtgatttattgcttagtttcagtttattatggtataaataggtgttttagaagttcttgtgaagtttggggtcgaattgaggtgtttaatcggtcgatcgattcattgggacctgtaggaaccaaaattaagttggtccccaggaaccccacagaactggacttcgattggggaaccagtttaccggttagggcagtttggggaaccctagtttttcccctttttgttatatttagggtattgccatgttatccatcgatagggaggctttcagtttcaattttaagtaaaaagtgatttagcgtgtcactcatcagttttacgaataatgatttgggagcctataaatcttcgagcagctgttccactcagattggccggcacacctgaattcagaaacgaggtaagattagtataatgatatgcatatgtatttatatgtttagcatgcatgtttatggagcctgttagattatattgatagtggtatcagtatacatagagttgtactggatactgatagatgtatgtttggctcaagtacaagatccacgctatcacatcggtacaactagagtatgactagagtaccaagtataggctgatattatggttgatagtacggtcgtaggaacgttctagacttagtaccatgttggacacggggataggattatggttgggtgtatgggcccctaattataatatgggttatatttatgattatgctt

SEQ ID NO: 48657 - DNA, 1195 bp, Cannabis sativa
atctaaaatataaaatttgtacttaatgtggaatggacgaactataaataaaatactgcagattggattagataaacccaatggcagagccaaacacttatcttgggagggtttgaaaaattctttaaaataatatatgaatgtaatatattaattttgttgaagaaaaatgtatggcttttatagggataaaaaaaaatgtgaagatataaacaaaaaatatacatttttataaggataaacttgaacatatgagtgaatataaaaatatataaatttataggaacaaaatactaaaaattaattttatgagggtaaaattaaaattatttaatttttttttttatacaaaatacaatttattaaaatttgaatggagccatgtagatgtggctctgtcactaaaccttacccataggtgttttttgtaagttgtgtcaggttggggattataaataaatttggggatcatcaatatgttatgaattttaaggatatacttggtacaccatattgtattgtaccagattgtattatattggtattattcaatcaaatactatgtttagtgacttgtattaataggttgtttaaaattatattatctttaccattaactcaaactcaaaccaaaatctaaccccaaccctgccccaaaccccagccctggacactagagaggggttcagaatccagatcaaggtctggggtcaagtctggagtctaggtcagagaatggagccaaactgggtccagggtcgggtctagagtcggggttcgaggtgggctagctccaagtctgaggttaatttcaacatgctcaattatttcaacaagaaacaatacagaataacacaataataaaatactaagaacttgttggacttaagttcttcacacaacaaagaacctctctctaaatttgaaagtaattttagaaatgatacacccaaagagataatctttatacacttcaaaaactctcaaggtcgtgaaaaaaggatcaagaaataaacaggtcaataaatagaaaatctttccaaacaggaaagttagaatctatttagacacacagatagtccgttcaaacaagtacattgaacatggacaggtttttaccaaaatttccataaaaaaataagaaaactttgacaaccttttatttatacacatgtatacagtttcttgaatgaaa

SEQ ID NO: 48658 - DNA, 1883 bp, Cannabis sativa
  modified_base (27)..(32): a, c, t, g, unknown or other
  modified_base (1851)..(1857): a, c, t, g, unknown or other
gttaaaccaagaaatgccgttagatannnnnntttaatatataaagatatagttatttttgttagtaaatgttaccactatagctattataatttagttatagcttgttaaattcaaccttcactttaagccattgtgtaattgtttttcaggtcggtcttgaaattggataaacattagagaagaagaaaaattatcggattcattaatagaaaattatgtggtatttggctttaggcgcgaactcctaccttagtctaaacgcgatcctgttataattactctttgatgctttgtgaaaaaaatataagaatatactcacacttatgtgtgagaacaacaaatattatttaacttgaacatatataatataattatatttaattaatataatatatatttatataattttagatagattttctatgctttcaacagttatctacttcaaatttgactacccaatgtttagtatgggtacgataattggtacaccaaaaatgcgtctttctcaattcttgtattaggaaaaagtaatctcgatgctctaatgttcgcactagatatggacttaacccaaaatttaggtttggtagtgatttcgatcagttgattctcgatataaatataaatagaaaaattattgcatgagattacacagaatatcctactagtagggctttttaagactgttgatagaattttgtatgggtaagatcaaattttggagagaaatatataaatatctcttatattaaatgtggtatttaacaaaaatattaactaacatggttaaaacaattaattaattaattatctaattttaaatatttaaatttaatttttttgttaaatataacttatataattatttaaaaatatcaataaaattaaataattatctttttcatataaatattaatttaaatttaaattaaacgttaattcaattaattaatcatattttatcataaatttatttgttatattatttaaaatatctaaacttatttacttattttattatttaataaaaattagttaaatatattcttataaatatttaaaattagatttaaattttacatattgaaaataacttattagatttagttattattattattatttaaattaataattaaataataatgtttgcaaaaaagttaatgaaataataacacttccaatacaactctagaacttaaaacatatatattacatgttactaatgcttagtatatatatatatatatatatatatatatagtttgttctcaaaccaatgtggattaattctgacttaatatttaattatgtatttacataatttaatttttatattactttagtaatgaacatgttttggttcaataataaaatattatatatatatttatatatattaagattattccaaaactcactcactacttaacaaaaatgtaatcactatcacgatgtgtgtacactttgtttaaatataataatattatttttgaaatggtaattatcttttatatatatatatatataataataataatattgatgatgtaacaaatgaaccatcattaaattatattgtgagcttcctaactaattcatatataatatagtgatgagttttcatgatgtatataatatatgtcatcattaattatttattctataataaataatgacgtaaaaaattgattgctcgatcgtatgattgaaatttaagatttattacaagttaaatattaattaacaattttttccccgacctttgacatatattaaataatgttttttgaattttttcggccattaaaaattccccctaaactattgagattgttaaatttnnnnnnntttgtctaatttcatttaattttagt

SEQ ID NO: 48659 - DNA, 1236 bp, Cannabis sativa
tatagaggaagggaggaatagatatacatagagagaggaatggggaaaagcaaagtgttgatagtagggggaactgggtacttggggaagaggctagtgaaggcaagtttagaagagggtcatgagacgtatgtggttcacagacctgagataaatgttgatattgagagagttcaaatgctattgtcgttcaaggagaaaggagcaacacttgtctccgcttctttcaatgaccatcaaagtctcgtcgacgctgtgaaacttgttgatgttgtcatttgcgccatttctggtgttcatctccgaagccaccatattcttcttcagctcaagcttgtggatgctatcaaacaagctggaaatgttaaggtatgtagctagtgaccacatactttttataagagcattgttcttaaatatcaatgaatgctttgtaaaaaattagccgcttctcatactaatcatttaattaaaatgtgtgaaatttgatatttaattatactaataataatatatttcaatcttgtagtgcttaacatttacaattatttgtttggtcataaatattattttctttattgaattagtgagcggattcaatagagaagataggacagacttattacattacaaaaaggatattgagaatttgataaatattagaagtaattgagcctgaaatccaaataaatttatatttttcgttcggaaatggttgttaggaagttttaatcaattcatgcgttggaagccttcccaagctggaattcattttgaacattttttagttttactcattaattgccatctgtccttttctcattgctgtgttgttccaaagttttgttttttttttctttgaaagggtgtgttccatacttggatataggcattttaaacataatccaaatatctctaaatatacatatgtgtgactatttaatggttatatttttattgtaaccattatgattatatttttttttttacctataatagtaggttaacaataagtaaaacttccttttttaaaattaattaattataattaattatttcataaaataattaattgaatatttaataagatcttttagcaattaataattataaatattttttatatataaattcctactaaaattattttaacaattaagttaattaattataatatttacaatcaaattttattttatttttttacaaaaattaaactttttttagggaaaaaaa

SEQ ID NO: 48660 - DNA, 1273 bp, Cannabis sativa
gagagttggcataaagattggtgaggcaatgaaccaagctggtgtaaattgcctatgaaaggaagctttggagggcttggaggaaggttcttgttttgtttatgaacagttttcttgatcaagattatcagtaatggaaagaggaggaggagaagtgaaacaagcaaagctggttgagcatcaattgccattttttcttttagattttatctctaactcaaaaactacctatcattttaagggagtacatatctatattttatatagggaaatggttattttgtctttttcttccctaaagttgtacttgctgacgaaatatgttctaatactatcgatagtattcatattgaattgtcttccttaaagttgtagatgtgatgaattatcctgtggttgttctctaaaatacaaatcaatctgcaaatatcattttagtattttcgtgtgattttctataattaatatttaatacgtgtatatacattgtaaaaaaatttacttttaatcacaacaaaatttgtgactacaagtaaaagtattgtgattaattataaatcaatattcttatgttgtgactaaaaagtgagtgactataattttttgtgactaaaactaaattagtgactatttgtatctaaatactatattttagtcacaagtaattttttttgttatgactaaacatcacatttagccacaaaaaaattatgttgtcactgaaaagttgtcactaaaagtagctattttttgtagtgataatacaatgaatattttatattcattgaatttggtcacaattaattggttaatattttatgtatggttagattactatttactaaatatttgatttttcgatttaatttcctgaagtaatcgtcagaatattgacaattaattttggcagagaccatgatggaaggtctaacctatataaatatagggtcataatcttcgacctcactactcattctatgaaacacagtaaatctatctaaagagagtagattgagcttggaagcccgattacccacactaattagtttccttttcttttgtagatctaaagctcgtgtgggattgaagctcaaagaattattggctggaagtatttcgattctttgttcataatacatatatgtttgatttaattttacatttcatacatgataaaatatatttcatatcattcatataaattttttaccgttagtatcaaaacaaaattatgtacctcgattatttgagttttctatatatatatatatat

SEQ ID NO: 48661 - DNA, 1053 bp, Cannabis sativa
gtacaagcccatttggaagaaggtccgtgcaagaaaaaaaggaagacaccctgaccacttaccaaggtccggccaaaggtcagatatgtgcagatctgaggtgttgcccagaaaaagacttgatggcgaagtttgaccaaggaagatggcgaaaacaaatgtacacagtcttagtacacctgctgcacagatatccgtccttaaaagctcagatctggccaaccaactctctaggggcaagatcaactgccgagatcctccggctcaaatcccccatcgtatcactatgcgcaaacagagtagtgcaagaggtatcaggggcagacgaagaagctatgacccgatgtagttacagtgaccaactcagaaagtatcgtcagatgcaacgactctaaccagctaaaaactctagtgtcgggactagtgcgagggctggatctgtctcccgacgactacttcccctgccttttcaataggtggtaaagttgctcaaaaatagatcctgcgatggcggctgctgagaggagaccatcagtatcgtcggcggctgctgggttaccagtgaggcccggttatggtactgttggtagaagtaggcaacttttggcaaagttcgctccatactgttcttgtcgcctggtgtaactgcaaaccacgagttacattggaaggaagcaactcaagacattataaaccaattaggggagcccttgtgacatggttatctcgttgaaagtttttccttcagagttcctcaaatgccccgcgcttcgccggaggagacagactgcccgggagattctggggatgtaaccatgcaccacctaaaccttccccaggctcgggagacacgcgccaacctgctccccacgtgtggaagatcattgggagtgttgcatgtcttcaaccatctttcctagaaggcaaggaccgcttaaagtttgctctactcccagtgactcttcaaccccttgatctttccaagcaaagtccaagcttgaattgttatacaacttcaacattccttcctggaagccgaagcttgttacataa

SEQ ID NO: 48662 - DNA, 1661 bp, Cannabis sativa
attgagaagattatggctaatttctggtggaaaacatcaagtgctaaaggtcaaggaatcatttggatgtcatgggatcgcatggctactcataaatattcgggtggtatgggatttcgtcacttacatgacttcaatcttgcaatgttagccaaacaagggtggaggttattggtctctccaacatctcttgccagctgtgtgttcaaagccaaatactaccctcaatctgatttccttactgcagatcttggcaataattccagtttcgtttggcgtagtatctagagtgcacaaaacttggtgaagctgggttgtcgaagaactattggcaatgggattacaaccaacattttgaagcacccttggcttcccgatcctgcaaacccgtatgtctcctctgtcgccatgggacttgaaaaccatatggtgagttctctcttggatactcatgacacatcttaggattattctcttgtcaacgatatgtttaacccccgagatgcacacttgatacttggaattcctttgagttctataccagccgaagactgttggtcttggaagggtgagacgtcttgttttttctcagttaggagtgcctatgacctactgcagatcagtaaacacgggcaacagaggcaatcaaactctggtttttggcacaagttttggcatctcaaaatcccgccgaaagttaagaacttcgtgtggcgtgctgtcaccaatactctccccacatgtctcaaactggtttcaaaaaacattgatctttcttccttgtgccctgtctgtcacagtgccgctgagaccgcctctcatgtgcttttaaattgctcttttgcattcagctgctgggagcgatgtgggttcaccattcaatccgatgcctcatcaaccatcggtcattggctcaagtctacgtttgagaagtatggtgatgatatatcatgtcgtgccatcatgatttgttgggccctttggaagtcacgaaacaagcttgtttgggaaaagaaatcttcatccccaactcaagttctaaattcagcatggactacacttgaccactggcgttctgctcaagataaatctagtttattatcattgtctctcttacaacatgataataacattgagcgttggaccaaatccgattcagatacagtcaagttaaatgttgatggagctttgcttgagaaggaaaatgcatacggctttggtattgtggctcgtgattcgctgggtcgccttgttaatctaaaagctaaatatcatgggggcaattatccagcggaggtggttgaagctcttggtatcaaggaagcacttagctggttaaaagacaaggaatggaatcaagttgaaatagagactaatagcatgataacggtccaaacaatctttagtaatcaacacatgacttctgcttttggtttgattgttaatgagttgtaaaagtttattatcagttttaaataatgtaaatgttcgttttattagacgatcagcaaaccaagttactcactttgttgctaggcgctctcgatttttctctgattgtagcattcataggaatgattttcctaatgagcttcatgctctcttgtatgatgaatgctaaatttcaatcaagttgatattttattttttataaaaaaaaa

SEQ ID NO: 48663 - DNA, 1406 bp, Cannabis sativa
  modified_base (660)..(661): a, c, t, g, unknown or other
tgtaaagggttttatttagggcacaaaactcaacattgtcatgctaaaataagtcaagtccttattggttttctcgttggattgaggtctccagggtgaaaatactcgtgcgggcccatggaccctagtttgggcacacttggatgtgtgagttccaacacgaaatagttggttaatatttttgagttccctagaggtgccatgtggccctcaagaatgatgtcttaactcatttggtatttataagtcttggtcatagtcggaaggttgacttttttgatatttcaaaaattgagtataatagtagattgtatagtcttaaaaataggaagcttaatacttgtaattacctattgcttaacaggcttgtgatgtaaggttgttcgggttgggggttttgagtggttctggctgagagttgtaatttgttgtgttatttgcttagtgattaatggagttcatttttcttaatttgatcgaaaaaagattgagcatactctcaatattaaaaataacaataaaaaataataatgttacaaataacatattaatatatatatttaaatcgatttaaaattggtataagttcaattaacataaaacaaataatattaatatttatatatatttatattaatctaaaataaataatattaatanntatatatatttataaaactaatccaactaacaccgttaaatttaacgtaatattcttatcttttttaaaaaaagattctgtaaaaccaataaaaaccgttaaataaccacatattatatataaagatatttaaatttatatatttaatattttaattttgtttattaatatgtagtgttatatttctaattatattatatgtccttttttaaatagtactatatgtttacattgtttagtgtaaatttttatgtgcatataaatacacatttaataatataaataaaaatttaatataatattttataaaaatatgatatacactataatttgataaaataagatgtgtttacatatataatctagtgtggtgtatgaaataaacacttacgaaatcatataaattattattttaagaccacagtataaattatataaattactatatataatataatataatgtgtgatgtactaaataaatacttaaaaattatataaattaatattttaagaccataatatataactcgatcacacaaacaaaatatatgcgcttaatatatatatatgcataactatatatatatatatatcttatatataaaaagtggctatctaatcatttttgttgatttaataaagtatactttaaaaataaaagaatattctgttaaatttgacggggttagtagggttggttttataaatatatataaatattaatattatttattttagattaa

SEQ ID NO: 48664 - DNA, 1445 bp, Cannabis sativa
ttgcgtagtccgtcaaagtctccaagtgatcctcggttcaatatggtgaagtctcgccacgcaaacatgtatcctcccttaagagcctctcctaggtttcggtctggcaaggctaagatttcatatggtgaatagtacttcaaaaaacttgtgttattattaggttttgtagtttggcttttggaacatttggggggattatgatttagacatctgtttttattagtttacttttgtaacatttggggtggttatgatttagacagacttgtgtttattttagtttacgtagtgcgccttttggaacatttgcatccatacaactatcgaatgattctaatttgatcaaattcattttttagttatggtaattaaatcatttttagttatggtgacaacagatgaagcaagaaaagagctgctggatgtacagataaagctccaatctgatcctttaaatgctgatcttatttcaaaggaagttatgtctcagaccaaatatggtcagcttttgaagggtctcaactcatttctgtatcaaaaacccaagataagttgggtcaaaaatggagatgacaatacgactatttttcatgctagtatcaaagaaaggagaagagcaaatatcattctatctataaaagaccagaagagagtaagaacaaataagtcaggagaaatttctgaggccttctttcattttattacagcttgcttggttttaaaatggaacacaggtgcaaggttaaggcaagggttatgaaacttggtcctcttgtttccaagactcgggtagaattcttgatgaaggaatattctaaggatgaagtcaagaaggttgtttttgcaattccttgaatcaaggctcctggtccagatggatttactagctgctttttccaagacaactgggatttaattggtgatgacatttgtgaggctatgctctctttcttgcattcaagtcagattctcaaagaaattaataacactactattttaacactcattcccaaatgtaagtttcctaattcagttagtgatttcagacctattgcatactgtaatattatctacaaagttgcaactaagctaatctattcccgattaaaagtcatcttgcctgagcttgtagcacaaaatcaggagggatttgtttttggcaggtttattgctcatagcattatgatctgccatgatttaataaggcattatggaaggaaaaaccccaagccaggctgtatggtcaaacttgatttgcagaaagcatatgacactcttgattgggattacttggaagagatacttcatgctttccattttcttgataaatttgtcaagctgattatgacttgtgttcgtactccaagatattctcttaagtttaatggctcactgcatggatactttgaggggaaaaggggtctaagacagggagatccaat

SEQ ID NO: 48665 - DNA, 1417 bp, Cannabis sativa
attccgcattttatatacacatacatatatttcagtttatacatataaattgtctaacaagaaaagcttttgttctattaacccaaaatttaatctcttctctaagaagattatgaattagggatatagatagaacaacaacaatcaaacaagagaacattgttgacaaattcatacaagagaaagagaagattggttggttgaaaataaaagccccaattgtattctattctattctattgtcctgtgaaaataaaagtaaaaggtgtcacctttctttccaatatcttcttccgtcgatccattgatcccattcccattcacttcccctgccaagaaccaaatggatcgtgagtcaactatatcagagtgagtgaaacacccatcagcaacactctctttactgagggaaacaaattgcctcaattattgaaccatgaccaaagcaaataaactaaaatcctcaccataaaaaacaaatgttaattatgatcaaatgaaagagaaactgaaatagatctaatatcacaaaaatgaacagagagaaattaccgatggggatggaaaggagagcttgagaagagcaatcgcagacacaaggagggcaagtagtagtagtagaagaagaagaagaagccctccatgaaatgccagcaatcgcagactctgggtcatcgccatggatgcgacactgggcgtacagtagcaacggtaaatcgaacgttgccttgcccaagctcttcttttgaccgttttccctttttttgaatttaagctcttcttattataattaaaaataaataaaacaaaagataacaacaacggtcaataatttcgaatttttttttaggagactaatataattagatttaaataaaacaaaaaagtaataataataataataataattctatttttaattacttaaattcttatctcctaatttttttattagttttgttaattcacttttctttattatttttttttagatgttttgtagaccattttttatatgttaatgagttacttttagtttttcagtgttacaacttgaagctctaacttttttcgtgtgctgtttaagggtgttatagttttattatctaaatattcagggcagttttatcctatgttgcttacttactttagcaattcatggtttgacaaggcatgtccttcgattagacgatgagctatcctagttcgagaaagttcttgagcagtttgcgaaataactatatttttgaaaactaatcatatttttcacttagttaaattcctatctcctaaccccattttgtaaaattaaactatttttcactcatttagtggaaaaattgtatttttttaaaaaaaaaaaaaaaaaaaacaaatcacatctttccattagttaaaagggaaatttgatttttta

SEQ ID NO: 48666 - DNA, 3016 bp, Cannabis sativa
  modified_base (2532)..(2535): a, c, t, g, unknown or other
  modified_base (2976)..(2982): a, c, t, g, unknown or other
caatatcaatatatcagctctattatctctattttgctactgtttgtaccgaaatgataggaaattcctatcaaaaagatcaaaagaacaaagtatggagtgcattaagcaagctttaagtagcaaacctggtcaagatcagagaaaacaagctctaagttgataacatctatgtcagacctgggatcaacttttccattaacatgaatgacatcattgtcttcaaagcatcgaacaacctgcaacaacaatcatttggcccacgataacatataagcgactcaatccaaaagtactggcttgttccaacttctaaacaacagacaatacagatataaaaacaaaaaataaataaccaaaaggggtgaaataccaaaagaagtgttgaataagctttcttctattactaagttattaacagctgatcacacaacagaatagacagtatctcgaaattattgcattgaacaagtacctgaagtaaggagtcaacttcacgaatatgtgacagaaatttattacctaagccctggaatattaagaaagatagttagataaagtatatttaccacaacatactcataccataactttacaagcagcgcgttagaaagaaaaagcaaagatacacaatattaaactggctgagaagtctcacctctccctggctagcacccttgacaagcccagcaatatctacaaattctatagatgctggaactgctcgttgagatttgcttaaatccgaaagcacattaaggcgtggatctggaactgcaacaattcctacatttggctctattgtacaaaatggaaaattggcagcttgagccttcccattctccacctgcacagataaaaccatttcatattatcattttcagtttgtcaaaaaatcttacataactttgaacccaccttaacaacttacacactattgcgtttggttggaggtaataaaatagaatagaaatgaatcaattttctttctactcttttgtctagttgcatttcaaagtattggaatgtaattttaatagaatgatttttctactattttggtgaataactatttaattttaaaatagaagaaaaactattctaatgcaagattaaattttttatttctattcctattctcattctcatttctattcttatattttcattcctcccaatcaaacgtactttaaagttcacaaaatgagtacataacccagaaacatgtgctgacacactacattaagatatctttaaattaaaattctcattcaaaagctgaatatgcaagaattgaaatgtacccaattgagggaacaagctatataaaccatttatctccacatatatagcaaagagtaaaagaaacccagaatgaaactacagccaaataagacacccaattgaaaattatagcaaataaccaaaacaagaacagagaaaaccatttctgggttatcaacatacaaagcaaagcaagctgaacagtaaaacactacttacaacggcattaaagagagtggattttccaacattaggtaggccaacgatgccggctttgaggctcatgcatatcctagatgaagaaaagggccgtgctttagctctaccgaacccaacagttccaccaacgccggctaatccaaacattagctgacaatgacttgtgtggtgcttcagtggagaaagcagggatggcattaagtgagtacaacctattctcgccattgatgggtttgatatctgagctcttggttctacaaactgttaagcttggaaaatactgcaaatcctacgaacttggatttccgcctctcactttgtcttctctgttttttagtaccatttttatgcataaggaactatgttgtcgtttttgatagacgacatgtcgtttttagacaaaacaatttaagagaacctaagtgccaagcattataataagtggctaacgagctaaataactagccgcctaattttcatatcgtttaacaaaaaaaaaaattaaatgaaaaaaattgcagcatcacggttaattttaatattacctatatttagttttaataactgctcagaagacacaatagtaaaaattgttgcagcatgttcattcaatctcgtagtttgagtactcaactattgtgcaaagtacgtaattatactactaagaacccatgcagtcgcaaagaacttgttattctcaactactaacagagatttgatggtgagtcatcaaagaacaaagaagaactacgaacgaaacaaaacaaaacaaagccatatcacacaaacaaaaataaaacactcaaaaccatgtcacaaaaacaagactaatcgcagtaacaaaatcgattcgcaatagcaaaatactgttggaattttataccttaaataaaactcatttcaatataatcttatttgctatcaataaaatgttagaagtcatttatgtttacatatatttttcatgcttatggtttgatataaaatttctgttaaatccagaatatatagttattcacaattatagtnnnntcaacacagtggaaaattatgattatatgcttcaaaaatttatgaaccatgatttatcagtgtactgaatttacattgatatgatagttagcgataaaatttacttatacattggataagtgttatgtcatttccagtgcattggcaaagtatgctagtatcggatgtatggagtatacattcaactggattgatattgaacttggtaaagacattataaactcatcgatgtatctctccaagtcaataacattagttgatcttagatcaaaagatcttaatcgtgatattgttaggttcgatctcaagagtgttatgtatgttcttagaggtgctcgttaaagcttactaattagttcaggtaacacatacatcttgggaacctgatagtacaattgtgtgggagtactaatcatatatacagaatctatagcttctatnnnnnnntagaagtgaaatgataattttcttcgagcttggc

SEQ ID NO: 48667 - DNA, 2691 bp, Cannabis sativa
tccctagactttgatatctaccaaatcgtgccctttaaactttgacatgtgctaaatcatattccctgaactttcatttatattaaaattttttactaaaattaaataaaagtccttaaatccaacaatctcaatagttgaggaagaattattaacggtcttcaaagttaaggggatatgatttggtacatgtcaaaatttggggtcaaaaatcttaattagccttttaagaatcactatggccagtagtgccatttgtactatacaaaaaatgttgttccgacaggccacacccacacatatatttgttgatttgtacgcatcatgttctattgcatattgtttttgtagagttctctgtcttagtattgtccaaacacaatgttgtctccccaatttatgcagtgtccttcatctatcgcaatatagattttacatattgacccatagcagaagagattgtaaaagcgaaaaaagaaaaagaaaagaaatcatagatcatcaccatatttcgagtcttcacgtaattttctctttttattgtcatatatgctgctttatagtttgcagtgttttaatctgatcattgatcaaattcatggtgttttaataattgttatcaaaccccttggtaggtatcttctttatcacaaggtcggggagcctggttgactcctcagtttgttgccagggcttacctgatcatccaacttgcaagcaatctgagattatacatacatattctttttccttaaaaaaagagaaggtatgatagagatgacttttggagagtgctgggcttggttaaacatgaatgattttgtaatgatatgtcgtatatacagcattaggctcagtgaacttgctctagtgtgaagtaatttgtttgtccaaaattataaacaaacatcgagttcctgatgaagctttctcttagattgtccaaaagtataccagttataacatgtttttggtcattgttggatcaggccagggtaccagctctagtggaactactgccaaggggcctataattggtggccctttcagtttaatagacacacagaatcagacggtcactgaaaggaactttctgggaaagtgggttctcctttactttgggtatacattttctcctgatgttggccctgagcaaatccagattatagccaaggccatagataaacttggtttgttgtcacctcttttcttcttttatttcatctgctctttatttgagttaactgcttagtgcttacattgattttatttttattttgaggaaagagtctaaacataatgttaaggttctaccggtgtttgttacgattgatccacaacgtgatacaccttcacaactccaagcttaccttaaaggttaggctttcctatccacatatagcgagcaccaattcatttcttttacagaaatagcatactgacactttaatttgccagaatttgattcgaggatcataggattaaccgggcctgtttcagctgttagacaattggcgcaagaataccgtgttttctttaggaagattgaagaggataaggatgattatcttgttgagtgttcgcacaacatgtatgcgtactcgagaaaagctaaactttttctttatctttctattatgctgatcgagctttcttgttgtgtatatgaaaacaggtacttgttgaacccaaacatggaagttgctggagtgtttggtgtggagtacgatgcagatgatttatctgatgcaatattaaaggaactgaagagaacccaaaattaacaaactattcccttacattgcaatattcattgccaactttatttttcagctttgtttactcttttctttcatgattgtatttcttctatacatgtcactgtggttggttgatataaacttttgctcccaagtcaccaccaccaccaagccccaaacaacttttttcagtacctacaaataaaccaagagaaaacaagagggagatactattaaagattttataaagataatgatgtattgaggaaatttccgttctcattgactttaatgttttaatgttagaggatttatctttagcatttctggataaggatgagagaagagacgacagagatgttatgttctttggcaaacatggagaaacccattactttgataagagaagagacgacaaagatgttttctttggcaacataaagagacccagtgctttgatattattgcaatttcactttaatgaaaagttaattaggacaataagagcatatgagatggagtactaaaacagtagtctagtgctatattttaagttttcaagttatatgaattatatgttgtattgaattaaatttatttttaaataaattagtaattttaaaaaaacatcttttaaaaaaacttaaaatccacaataaatctaactcttatttaaactcagatttttttttgcttaagttaaaaatctatattattcctttaaaaaagaaaaattatattattatatcatgttaatttttgacataatatctgctccacttacatttattagtatataattttttagtgtcatcatctttttttggcataaattatctctaattctctcattttttttttaaaaaaattactgtaatataaaaataaaaaatagagaatttattctttaattaacgtatgcacatattat

SEQ ID NO: 48668 - DNA, 1224 bp, Cannabis sativa
tggcaaagtatggattgacactataacatcggtacgactagtgtaccaaatttaggttgatatttatgatcagttgtacagtcgtacgaactttccaaacctagtacgcattggacacaaaaaaaggttgtgattaggtgtatggggagctggtcacgatgtggtaatatgattatatgtttatgtttatattttttttactgagtttgtcgactcatagaaatggattacatgtgtaggtaaaggcaaatcaaaggatgaataacagtgagctgggacaagatggaggttatacatatcaatacggttagacctgtagtgttttatctttgaagcagttaggctttattttgtcaatcgctagacaacaacttttgcaacttatattttttgaaaaactgtgtaattttgtaaatgggatctcgaattatgtaatatgtatttatatatttatgttttaatttatttatcacgttttttaataaatcttttaattaggaaaggagtacatttaaaattacaataatgtacctaatttagtagtgcattacactaaagtcgatttataagttagtggagactcatgtatatatatagccttgctttgttctgtatatctttaattcattcaataaacatttcacactttcactttctcaattccgcaatatggggatttgcaatctttctagatccataaatgatccttagcagattggattgaaataatatgattgattatttatatatggcatcattgccatgcatgaattatgatcaatgttgatacgactaatcgatgtattaattatcatcataataaaatatcgataaattataattagctaattagtaaacgaaaattaatgtccacactattttgtgctatatggattgaacaatgaagttttatttcacataaaccacaaatttaacgaaggacgtagaaacactgaaaatccaaaaaaaaaaaaaaaaaacaagaataaaaggacagaaatgttaaacccggatattccccttttttatatcccttcattatcaagatttctcctgcttccagctgcaattttccccttctcaccttcaaaatcatgagcaaaaatctcaatattcttgaaaaggacctctccaaaacttggatacagaaccaatattctgcactaaaagagcagaaaaaagaggtgaaaagaaaagtccctatatatacatggcattattctc

SEQ ID NO: 48669 - DNA, 806 bp, Cannabis sativa
aaataagtgaggcaaaataaaaatgtagttcacctcgccaaaagaaaaatgctacaaggacatttcaaaaaatgatgcaaatgaggtggattaataataaacttattttgatttttaataatgaacttatttttaatttttaattacaattaattaataagaaaagaatgggtcggtctctttacacgatttgtgagaggcaggaaataaggtggaatgtcacctttcgttgctttctgaacgaaaaaaacattattagatataaatatgacaaaataatctattatcaataaattagtagtattcttatcaaaaaaatgagaaaagaaaagagatatgcattgtgtttgctaaatcttgaaatgatttttgtatactgtggtataagtgaaactatattttagaatattaatcataaagtgcatcttttgggattatcatttaacaaaaaaatttgacaactagtatatacaaagcttattggagacttgtccaaaataagcttcttggagactaattggtcaaaaataaattcagaaccgctacaagttccaaccaatacaaagaaaaatttgataacggttataatattatgcacatttaaaagaatttagggtgccttcgaaatttgctgcactagtacaatacaaaacttgcccaaggcccccaagcatttatattgtctgactatttttaatttcttacttcgtttactaccacatttacatttaggagccttggaaaaatgagaatgacccacggggaaccacatcaccgcccatggatgaaatagtacacatttatga

SEQ ID NO: 48670 - DNA, 4147 bp, Cannabis sativa
atttcaaaaattgaaatggtgaaataagatttacctcgtccgactatagttgtcttcgccgtcgacttagagaaagagagtagcagccaccaccaatttagtttggtaagagaaaaccgagagagttgggagatcggcttgttcttctagggttttgtttcccttggtttatgactttatatagtccggtcagtccttttttattttataacttaaaaaagattatttaaaattcctttcttttcatttttttacatttaattcctttattttttttattttgtggcaaaaaaatttttgtttattttttatacaaatttgacgaatactaattgaattattattatattcactttgaagaatttctttcacgttcagtaatcatcccgttggtatttaacggtaatatttaactgacgtctcaaatttttgaagaataataaacttaaaggggttttatcacaaaaaaaaaaacaagttaagtgtaaaaaaattgaaagataaagaatttcatcaccaattgctctaaaaaatcatttaaaaatacttaaaaattaaaaattaataaataaaatttttctctccccatatagacgtcatcacaaaattccttgcttaaagatagggtcagtcttgaaatttagtaggttataaaaaaaaaaatatttttgagcccttactttaaaaaatgtgatatttttcaaaattaataaaagaaaataaatatttttgaaaggggataatttttttggacctctaagttagttgggccctaaacacagcctaacccgtctatacttagggtcgggcctagttgaaaaccttcacatccgaggatttcctataattgtttacatatacaatagaaaaaatctaaattaattaaaaactgccgataagcacttacttgacacttacaaaaagactgcaacaaatgtgtaataaaatatatttttacggttaaaaactttacttacgtataagtattatcaactcaaattactctatgattatttatttatttatttatttcgtctctataccaatataacataattattagattttaattaacttaaattttggtaaatgctttgttgtgttcatttaccattggagacctaagagaggaggagacgagtaaagaaaaaagaaaaaaactagagaagaaaaaaaaaaattagaaactcaccctataacgacgacacataataaatcttcttcttgggttcgcatttgttcacaaaattttaatcactgtagagcattgacaagaggagatggagcggatgactcgagcaatagggtgagtttttatagtaaatagtaaaacaaaataagagttcaataagttttactatcaaaaattgtgtttatgtgattaagtgttaaaaaatataaaattcatgtgattttgttgctaatatcccttaacagaaccacactaatttaggatagttttaggataaaatactttcaactaagacaataataattgttaatcaaaaaataaataagtaaataaataaataaaactaaaacaataataatgcatatgaaaaaactatactatatcttcttgaattttcttttcttttttttttttttttgagaaaagttctgttatcattaattggaagcatcatttacaacaacagaaaaaatggtaggaggaaaatcctcataccaactacaatcattatccaacactaatgcttactttgccaagccatgagcagtttgatttgcatctcttcgaacatgaaacacacaaacattagagaaataggacaattgatttctaacataaaaaatgagatcagagaaacctaaatttctagatgctaaactttttaaactagtaactaacagtaagcaatctgattccacaaaatcaagattaacatgtaaagagtgagcccattggagaccataatagagagctttagcctccatttcatgtggtttcaaatttccaggcattggcttggatagagcaactttaacatgcccactagaatcccttataattgctccaaaccccattgtattgttggccgaatcaacagcagcatcaacattcatttttaactttgtttgaggaggagctatccatggatgatgactcgcaacatgggagggttgctggacaggtctattagcacgtgaagcctgctgaaaattgcagaaatgagctaaggctttagcagcaattttctctggtttttgtggttctttaagaaacacaatttttaaaataatatttgcagcagaaatattgaatgtttaaataatgtaacacttcaatatcaaaaaaataaaaaaaattataagaaaaatactataaacataacaatcaaatatccaaaaagaaaaagaaaattgcaacaaaaatatccaaggtgctaaaacattacacattggctacccaaggtgggctttcaatgtacaataacaatgatataaataagaatattttacaaccaaaaaagaaaaatgaatgaaggttttttcttttggcaggactcgggaggcttttacatacatagctttactgcaataaaacctgaaaaataaagcaaaatcattcaatgagcaagttgccacgaccaattcaacctaagaaatagattaatgctacaagacattacatatagtgctcattgccaagagaagttaaatgtaatttagcaattagaatagatgggagtaaaagtaaaaacagaaataaaacaagacacaatatgccaaatactctagaggacctgatattaaggggggcaaaaaaaccatgttatgttggtgcaaggcgggctgattgtgtgttctggaatgaaattcttttttgctggtatatattttgtgttctggaaagaaattgaaggggagggtctcttccagatcgagcccgccccaccccattaacattcttaagaattaagacttacaattaagtagcaggttctacgtgaactcaatggcatatagagtgctctttagcatttctctgaaacaaatctacttcaccttgcccgatttactaacacgttattgattatcaaacccactcataaccattaaacagcaagcgagaaacaaaccaattaggcacaaaagatttctcctacaacagagtaataaattgaggattagactttcttacttcatatccagaagttcttaacaagcatctaaggctcagacttgaccagctcttgaacagagtgtatgtacttgttcatcaggtccctaacaataatcaaaagaaataaaaaaaaaacttaatttatcaggattggaagaagaacacacaaacttaacccaataaacagctacatacctcctttggtttaacatttgttggctctcttccagttttttcttttgcccatcaactgtctacaaagccaaacacaacatccatgattctcatcaagatagacataatattaatcgtacaaaaataatgattaaaacctaatcgtacatcatcagctatgattttagaaacaaaatagtacatccctagttctgtaatccatgtgttaaatcaatggtggtcatcatcatcattatcatcataatgctacaaaataaatagataaatataaagtaatacattttgagaaaactgaactagtacttagagacattgttaggggttgaaactgattaataaatcaagataaattccttttcataaaatgtactccaacatcaacaagcaaaagagtccgaatttggttatgaaatcaattaccatggctttagtgctaatagaaccggatatggagttcaacagctgctgacacttctcgaagtgggtattcaaatcgcttatcttccaaaagcaagacacccaatataagacagttaaaaaacgaataaataagaaagaagcaaaaatttaagaaaagaaggggaagaaacataaagataccaaagcatcagattgctgatccctagttccattgtcaaccgtctccgctaatttcgacaccaactgtatccaattcaagcactcacaagctcaaatattcattcataatacatacacaaatagaattagggtttgaagaatttacatggaagagatggaagtgggaagctagtgactggtggtgctgttgtggtgggggttgtggtt

SEQ ID NO: 48671 - DNA, 1232 bp, Cannabis sativa
gaataaaccagcagaagaaacgattaaggtcaacgttgatgatgttatttttgcaacagagggttagtttagttacgatttccttgcccgtgactctagtagatgattaattgaagctaagtatggtagttaggagggtaaagtttcacctgatatggctgaaataatgtgattgaaagaagcacttagttggattaaaatcaagaggtgaaattacgtggttgtggagactgattgtgctaatcagtttcatgctacttatagtgatattactattattttaccttattgtctatttattaaagatatcaaagatatgttatcttctttaaataattttattttatattttgttaaaaaatctacaaataaggttgatcatactcttccaaatatatcttgtgtttcaagtgattgtacttttagagggggctttgtccttgctattttttatctattttgtatgtatattcttcttttatttttatatcatattgtttgtaataactgttagttacttttaaaatttatttataagcatgttgatatacaaattagttattatgttatacattagtaaccttcacgtttactttaaaaattaataaattatcatataatataatgagctaccatattaagcaaatatttcaaattttataatgtatcataaattatttataaggaaattacaatatatatattaacagcaagaactcgtcaacaatgttatagtaagaaataatgagttataattgacttagataagtatgagaaaatgagagtaagtagtagaggctgattcgagattaagtgaagagtaagtatgaaaagtattaaatgaatgttgtattcaaatcacagctcttccacatacaaggtaccgactccttctcaagtgtagtgaagaggtatttatagggggctccaattttcatttgttgcatttgagatgctcaaagtggccccctaaagggaccatgtactatctagaaaatggctttgaaaaaaatgttcgagcattagaattaaagtagtggtggttgggtatcaggttatactgacacctgggatcatgctcccactaccttatatcgtaggtacatccttgtacctccactctttcgtctcatcttttgtttgcgtcatgggtgtgcttgcagacctatcctcacggtgcctcttgaaggtccactttgaggggagtagggttgaggtgagaaagacaactt

SEQ ID NO: 48672 - DNA, 623 bp, Cannabis sativa
tatcgaaattattctaactattaaggtgtctaatttgcaattgattacaaagttgtggtggaattggaagtcaattcttttagtcatttatttattagtcttttttagttatatttatagataagtactgcatacgttcaaaaaggacaagagagaacgaatatttggcagacaagaactaaaactacatcaatctataattaattccagatgaactaggactcaatcctgggaagattcattacacatcgatgtaattcttttatatatatatatatatatatatatatatgttctatttatatataaacatatctagatttaattagattcatgatgaattgaaggataatcatgattttacaaaattttcactttcttcttcgactatatatccttatgataaaccattatatgattttttttataaatcaatgagttgtattgcacaaaataagttttttacaaactaaacgcacccatgaaaaggatcgatatctatgtatacaattatatcaatctagagtcaatatatgtaatatgatttacaaagcaataaaccaatctctatcattattcttgatctttttaggcatcaccctatcaatccgaaccttgatgtt

SEQ ID NO: 48673 - DNA, 1065 bp, Cannabis sativa
caagcgggcgtctcttttgttgtaccacaggcatatctgggttgatgttcaagacatgggtcatcatatgggagcttattccagtcatatccccctagcaccatgctaagacatccgtagcggccttaaacgtgtctatgatcttactctgctgctccggctctagaatttttcctagtcagataattatcttccttgacatcctccataggttctaaaattatcttggccccaattcgtcctgttctactgccaccgactcttcgccccctcgcaccaccaaaaatgacaaatgtattgcagcgttgtaacattgtcttgcttctccttggctccccctcattgttcatactcctgcctcccgagtagggaatttaaggcacaagtgtcgaacggaggtaattgctccaaagtcaactagggtcggcctgccaaggatggcgttgtaggcggtggggtagtccaccaccacaaaggtgcaatatttgaaggttctttgtggggtgacgggaagtctcacttttcccattgggatgagagtgttgtctcgttgaacctcatgagctgtgaaccgatgggcgaaaggtccctgtcagtgagcccgatggtcgtaaaagcatctttaaaaagaaaattcacggagcttccattatccattaacacctgagcaacaactttattggcaataggagtctctatgactagggggtcatggtgagggaaacgtattggcttcgtgtcttcctccgcaaaagtaatgggttgatccatgagcctaagcctctaagttgggacttgagtgacctctcatacctctttgtcatgctttagagctccaacgtagcgcttcaactcgttcctggtggtttctccaatatgaggcccgccagagatcatggcaactttcccatttggccagggtggcattccgggcgtctactgagagggcacccatccgggaggtacctgacccttgagcgtacccccggttcctccctgaggtaaagcgcctcccgcctgggccagatataaatgtggtagcctatttttgatccactcgtacaa

SEQ ID NO: 48674 - DNA, 1133 bp, Cannabis sativa
aattttgatttgatttattttcagggttttcattgacacatgtggatgaggttattgatgagcttctaacaaaggattattcttgtgacattgctatgccccgtattaaaaagaggtgcttagtttcatttgagtattgatctgatgagtttttacttttttagaacaatccattgtgaaaataattagaatggcttcccaattctattgttttcttgttactttttagtaaattctaagcctttgttttaatgtttgtttaagattgtgaaacaaaaaattgctagaaaaatggtttaaaaaacttatctgaatttcattttatttctcaaataaaaggtccatttcttaaattttgtacagccccataaaagctaaacacggcctgcaatgaacttgagtattaatagtattgatctaagcttttagagatttagaacaatgagttctctcttagtatgtgttgatcaatccatattgaaaataattaggatggcttcccaattttaccaatccatagtaaagagttgttttcttgttaccatttaaatgattgtgtactttttgtgtattagatggactcttgagtcacttggctcgttggaacctagaaaaagtgctttggaggaagattttgaagaggaggaagagaaagaggacaacgaacaactcgatgatgatgatgatgaacttgaagatgagggacatgagaaggtttgtgtatcttccttttcaaagaaagatctgctatgtttcctttttcattgatatcattaaggggatttttaaaatttggtgttgttatttctaaacaatggctatttattttatttctgcaggattattatcgtggccggagtcctgtacgagacagagacagggatagaagacatgatagtcacagatataggtaaagtctttcttcatatgtgtttctttcccattgttgtgttttaccagaataatgtcaatttcttgttgagtttaagcttgtctgtaagttagaagattccctagtcgaacttaatcaatttttaagagtgtctggatctgcaaggattagtatataattaggccagatctttcgaatctttggttagacctttctctaggcactttttaactggatggtt

SEQ ID NO: 48675 - DNA, 2113 bp, Cannabis sativa
gctctttgagcttttacaacaaaaaaaaaaaatgtatatcccagcgaatattttgtactttatgatcctttgttttaatataatgaagccgtctaaagtgagttatttaataatagcatttatttgataaactaatgaattcgtcaataatctacaatctaattacatgtatgtgttttttatgaatatcgccgccacaagaccaccaaatctggtaactttattatttatttttgtcgttaaatgcaaaagccatctcaaggagttttttagagtctataatgtattaatccttgagaataaagaattaaataaacgggaacatatatatgttaaaatttagttaacattagtgcaatgtgaaaaagtgtcatacattaaatttttttttaagattttactttttataaggaaagaaacaataatttatttgtattattgaaagcactaccaatggatattctaaattaatatttctttcaaaattttatatcgaagtgatgataagaaaactcctaacattaacttctcctttacacgttttaaaattgtcaatttatcatcaattcgataatgtctaaaaacgataatttttaaataacactaaaaaagacaaaagagaaaaatgaaaaatcgacccataatttgagaggatgatcaataaaattcacctttggattgtggaaactggaaaaagtggcataatgtcaatgtgttttcgggttgtcaaactttggtggattttcttaatggagaattgattgcccaggttggaggagtgccctgacttgagtcacatcttgttcattatgaaaaaattgctttatctttatcgcaagcaattttaatggtctaacggatgctaccaagtgccgttgttgttttaagattgagcaatgctacatgtcttgatgtggtaatatatttattaaaatataattcaaaaagtaacacataagtttatacaataaaaatttatagcatgacatagcatccatgatgaatttttaggataaattttcatcatgtatgacatgacatactccttaaattttcaccgtttatttttaaactagtctaccgaataccacatcggataagtggcagttaattcagttgctctgcctcagatcccttcaatccaaaagtctatataagggtgcctagaccaactagagagataacataactctagactctcttcctctctccctctctctgaattccaagttcttggagaaatcttctagcttaagaaccgattgtaaatattggtgtcaaacaccatatacattgtaattaaagactttgtagttacattttgaagagcaataaagatctaagccattaatggttgattttccctaaagaataggctatgaacttaacatgttcatgaatcgaaccttgttcatcatattctttaaatttcttgcggcattattgacttctatgtttgttgtgtgcatattcgaatcacaacaagcattatatcacttttttagtactctattggatgctcttatattatacatatattttttaaaaaaaaaatgtgttattacatatcctttgaaagagttttttctcttttttttttctttcatgtgggttacccactattacaatttgacattttagtgatacttccctaaacttagtgtgggtcactaaagaattaggaataaattttagacccccacaattagtctctaaattttagtattagtctcatatattgtaaatcactaaaatataaagaatcacaagagtaataccacaaatctctatttttcttaggtaacaatttctcattcacggcataactattttgaatatataaaataatacaattttcaaagacatctcaccaattgtaaagtgtcttaataaaaccatgcctcaaaatgtcactatgaaattgtgtaaaacactaattttttccaacaaaatgtcactatgatactacatattttgaacaggtcataaacatgttaccgtttcaacctaagttgatcaaaatgttataatactgaaaattattttcatttcgcatctacacgagcattttaattagaattacaaaaattgttgatgaaaagtaaaacaaaaa

SEQ ID NO: 48676 - DNA, 1439 bp, Cannabis sativa
  modified_base (127)..(132): a, c, t, g, unknown or other
ataccgctatattctgattacagtaatacttgttctgattttagtttttgaagtttggaatttgaaattgttaatattaagacagcttttagctgtatgttatgttgttgagagagagagagagagnnnnnnagagagagagagagagatttttgttttagcttcataaaatttgctatcagaagaaggatttgtcaaattggtttgagaggtgatttttctaagttgatataggatccttgtttattctcttattaggaataattaggaagaaggtggacatttctgaacattaattgcctaataaattatagagcaaatcaaaccctagaaaacacactcggggacagtttttttttggagaaactacttgcgaagtgttagattttaggataagaagcccatctcaaaaccaattggcaattagaggagtaactcatgatcttatatattttattagctttccacattttagtaatgtgggactatctaacacaaacaatttttttttccgaatcttgcatgtgtagttttaagtcctaatacaaatgatgttattaagtctcacatctgtagacgctgcatgtgccttcatcatatggtgaactttacatccttaaaatcttagaatataccgaaagatccagtcagtttgatttcccattcaaccaatcctaatggtcaatgaattttgaagtcattgcagattttacttatcttaattctaatgactggtggaatttagtggaacaagttcctcctttcttagtacacaaagttccatttcttaaggtttagacttgactttcagcccgtgctgtcttgaagttgagcttgcaattatatttttctaaaggtccttatatgacattggaatgtttgaaatcttatgatcagagttgaataatttggttttatttctcttttttgagaggacctgatgatagggtaattctgtaattgcaataaacacacttatatatatatgtaaacttaatatatgtagagtatcatatcttggtagtaatctaatttgtaccatttgtaatcttctaatttgtttcattcctaatcttcagtactaaaatttttcctcttgtattattcataaacacttacacaactactttgatatctttttgatttcttcatgttcataaggattgggatttattgtattgtcctttaaccagtgtttcggccaataatgtgagtatgttgataatgggattgtagcttgaacaaatgcgtgtgttaggaccccacattgactatgtataaggttagttagtagtactggttagctcatacttgggcacctcccctcttaggttagtttttgggggtgagttctagttaagtggttgaatcaagtggtattagagtcatgcatcgtcaagtgggactgatgttgtagaaggggcgacctgcagattaag

SEQ ID NO: 48677 - DNA, 1884 bp, Cannabis sativa
aaggctcttggagcgagcatgggtaactcatgacaatcctccatccagtttccttctcttctcttgattctatgtttttatttgtgtttgatttaattatggatttgattatgagctaaactccctatttagaaatttgatggatattggctaaaattatttcatggattagtgctatatgattgttctttctttccctgttattgtgatttattcatatttgtgttgattagatgtatttgattgtgcaccttatgcatgatctataatctcaacacaaaatctaaaaagtgagtattgagaatgctctaaataaataaacttagggtttgatgtgaaacgaaattatttacatagcttatgtgacttttagattattgcttaatgcgaattgtatgttgttctatcttagagatgcagtagttggtatgcaatttaggacctttatgatctaaaaaaagtttaggttaatttataatctgtcatcacataggaggaagaagaatggttaattagagttaacaatggatgtgaaattagggatatgatttcaattgctcaacaacaaacactaaaaccagctaaaaactattccaacaatattaaaataactctagaaaacaaacttaaccacaaccaactcgcacaacacccaaaatacagaaatgtacagaaacctaattcaagaaaacttgacaatttcaaagaaaagggggagaagcttaccttgagctatcccacacttaatctaccaaaatcttaattgaaatccatggttttcttgtctaaaattgagaggaaagattttggtttctttggttcttggtggtgaccgaacaaagagagagaaggttggtgaagtgtttatctttaattttttttaaacttaagataattagataactaaagcataattatctttttcatcttatatttatcaacaataagcttaaatcaaaccaactaaaatctcactaaaaccatataaaataatttaggttaattaacaattttacccttgtttatcgaaaaattaactcaaatattttagggtaaaatggtccaaaccatgacatccaatattcccaacattccaaatatctaaaatattacctcgctgattctaacatactataccatatatatctatgtgattatataggccaaacatcgcattccactattaccagacataaaatatgcaatccatgaaaattcacatataacacatataatcacctagcattcaaatatatctctataattgaaaaaatattttcctaaggcctatttctgacaataagcactaatttttactaagaagcacataatcatgaattaataattaaacccttaattatctgctaactttcatgatttaactacgcgattattacactggggtttaggtctgagggtcgagtttgggttgggggccaacgttgaggtttggacctagggccagcatcggaggtctgggccaagagtcggggtctacaaaatggggtgcaggttcaatagtttgtaagcagcgagagttgttccaaattagagactgtctagtgtaaaatttgaaaataaagctaattttattttgataaaaaataaaataaaatgctctattttatttaatattcaaaataaaaataaaatatttaattgaacaaatatatttgaaaaatatatgctccaattccttttatattgctgtgctctattttttttttttacactgataaaataggtgtggattaaatacccacaagaactataagagtaactcacttcttataagtgacttcatatttaacaacattatccattttgtgtgttttgatttcttagagtgacctaactctgtataggtttttgtttgtattggtg

SEQ ID NO: 48678 - DNA, 2881 bp, Cannabis sativa
tgctaaatgaaaaaataagacacttgaagggttgccacttgcacatgaaaaccgaagactgttaggcagtttactagtctactatacatgctttcatcttactgtcaaacaagtccacatctcactcactagtcttcgtccagaatgaggttggttggttggcaaaaccccatgtcgcgtgaccaaacttgtactactctctactccctatctatctatctatctatcttctactacagtaatatatatatatatatatatatatctgcacggtcatatactatattcatatttacatcattgcatgccctactgagcttttctctacctacctctttccaaaacggctcttataaaagccacgaaatgtttaacaaacaaagcacgtacaaaattcaatatacaatatttctctcaattaagaacgttctctttgaatagtaagagaataacaataataattttaacaatggtgtcggcagctcaaagagtagagagtttatcaagcagtgggattcaatccatcccaaaagagtatgtgagaccagaagaagagttaaagaacataggcaatgttttcgaggaggagaagaaagatgaagggcctcaagtacctaccattgatttaaagggcataaactctgatgagcctggtgtgagggagaaatgccgagaggagttgaagagggctgcggccgagtggggagtgatgcatctcgtcaaccatggcatctcagacgagctcatcgaccgggttaagaaagccggccagaccttcttcagtctccccgttgaagagaaggaaaagtatgctaatgaccaggcctctaccaacatccagggctatggtagcaaacttgctaataatgctagtggccagctcgagtggcaagactacttctttcatcttgtttttccagaggataagcgtgacttgtccatatggcccaagatacccactgattatatgtaagctttttctaacactaaatatttatctatggctttttcagtatcatcatcatcatcatactcatacactctctgtttttttctttactctgttcttgcttgactcaagagtcaggactaatttgacttttcaatatataacattattaatacgacctcattttcatgctcgatattttattagactatctctttcaatgatgtaaattttttgctagctaaatttcacttaaaaagaaaaaaagagttaatgttatgtttagtttaaattttataattgtagttcaatgtattagagctaaaatatattttattttaggtagaatgtgtaaaaaagtctacagaaatattaaattttcattaaaagtatataaaaaaaatcgtattaaatatacaaaaatataaaaaagaacctattgattattaatgtggaaaaataataaatgtaaaagtaatatttaatgtaatataaaatttggacaatgccatattttgtgctaaatttagcacaacgtttagcatgtgtcaaatttaaaacacattatataagtttacttttatagacataactataaaatacatgtacactatatttatatgttcttaatttatagtattgttgttaaaacttttatgagtattaaattacactaataagaaacactaacattaactttaacatttctatagttataatagttaatgcatatatagtaaaagtaatgttactatatgtttacttataataagtaaattttcaaaaaaaatatattcatgattttgttataaacagataaatgaagaacataataaaagaaaactaaatataacaagatttataatttagatattattagtgaataatttgatactttattggcatgcagtgaggcaacaagtgagtatgcaaggctactaagagggctaacaaccactatattgtcagtattatccctaggtttgggattggaagaagataggctagagagggaagtgggaggcttagaagagcttctccttcaaatgaagatcaactactacccaaaatgccctcagccagagctagccttaggcgtcgaagcccacaccgatgtcagtgcgctcactttcctcctccacaacatggtcccagggctgcaactattctaccaagggaattgggtgacagccaagtgtgtccccaactccatcatcatgcacattggtgacactgttgagattttgagcaatggcaagtacaagagcatccttcataggagtttggttaacgaggaaaaggttagggtttcatgggctgttttctgtgagccacctaaggaaaagatcatccttaagcctctttcggaagttgtctctgaggctgagccaccactcttccctccacgtacttttgctcaacatattgagcacaagttgtttaggaagactcaagaacttaatggttcaaaataaattatataatcataacaaattcatcattaatatgttcaaggacagttgagtcttggtactacttttattaattcaaatgtatttttatagtgtcatgttttttctctgcttcatgccctagctaattaaagaggccttatttttaaaataagtgtctgtttgttacttgtatctagggctttgaataataaatttattgggtttgatgtttttattccacaccctcccctttttactataattttataattttcacaacattttatacctaatgtagcatattttataactattcatgaagaacataagcaatgtaaatataattcagaaaagaataatgctaaaaatacatttaaataatatatttttattatacttgtattaagaatatctttgggagttcgatttcatggtgaaattctgttatttatgattaccaacttaattatttaaaata

SEQ ID NO: 48679 - DNA, 1125 bp, Cannabis sativa
aaaatattttgtcaactaacttgccaaaaaaggactttacattatggaaacaacaagttctagttgcgattcgtggcaatcgtcttctacatttcatctttgaagcacctatccactctactttgtttctcgtgatgatcatgctgctcccactcctaatccagcctatttcaaatgggaatagtccaaaatcaactacttgtttcgtgatttctctcctcgatgagtgaaagtttacttacactaatggttgaacgtgatactgcgagagtgatatggagtatactggagaaatatttcacttttgaagtctctgccaagattttggagttttgaaccaagctccaaaatctcaagaaaggcagctctctctaaatgaatatcttttaaggtcaagttgttgggaaatcatacttaataagattgattttattttttaagtaaatttatatgtaatgtaaatattaattttctataacatcaatatcatgaatatagagtatagaatagtacttacagaggtgtagcatagcatattatgtctcctttcgtttagtgacctaactcttgtttcaatctatcgcagagtaataataacaagaagagagagagagagagggagggagggagggaaggagagagatagagagtgattttcttggatctttcttaaaaaattaattaaataaataaaaaggaaaacaagggagccaatgcttactcttcaagcattgtggtcgaactatagcttattcttgtgataaatctaacacacaagtatacgtatcgtttacaagtaataataatgaaagtagagtatcgttcccacgagaactgtagctaagtaccaatcaattgaattcttatttttacttggcaattgaataaataaattttgaaactaaacaactaagaaaaattaaataaaacaaacaaataaaagatttaataatggatgtgaaattagggatataatttcaattaatttgattacctatttgttaacactaattaatattcttctgcctcttatgtgatgacagagtataaattaacctaaactctttttagatcataaaggtcctaaattgcatgtcaaccactacatctctgagatagaacaac

SEQ ID NO: 48680 - DNA, 1910 bp, Cannabis sativa
catcagtcgaaagatcctctgccacaagtcccttagaagctaaccccctgccaacaatgaatcttcacctattttacctccacctacagctgcttcaccatttcaaagcctagctcttctcaccattaaactcgacagagccaattaccccttttggaaatctcaaatcttaccagctctcagagctcatgatctggaaggatgtattttggggactaaagtctgtcctcctcagtttgtggacaatacagtcggaggctctgttccaggcgaatctcaatagctgaatctctgctcaactcaatctctgaattcatgtttggacatgtgataaattccgttacctctcatgagctgtggataactcttaaacgattatacaccacaagttcaaaggccagcatactccagctgcgttttcaacttcagtcacttaaaaagggcagtttatctattcatgattatattttaaaaatgaaaaatatctctgaaggcttatctgctgtaggacaactcttgtctgatgatgatcttattctctatatattgggtggccttggccatgagtatgaatcggttgttgttaacctaacttctagacatgaccaggttactctacaagaggtccaatacatgttgcaaagccaggaaatcaaacttgaacaacttcattcaactcaaggagatcctacaattcctgctgcacatcttgctactcagatgcgcagatctctcaactttggaggctctcaaaatactcaaaaccagcacccaggaggtcgatctcacaacaatcgtggtcaaggccgcggtagaggaaaattcaataacaacagacctgtttgccaactctgcaacagaccaggtcacatagcttcgaaatgctatcacaggtttgacatatcctttcaagcacctggtcagaataatactcagcagcagccatctatgaatcaaaaccagccatcaaatgatcagcaagcctttctctcagccactgaaaacttcaataacaactcgtggtatacagacattggagccattaatcatattacctctaagcctaccaatatgcaacacaaaacaaatctgaaaggtattactcaactcttgattggaaatggatctcccttatcagttactcaatatggttttagaaaaatttctaactctgcttgtagtcttattctcaaacatatcctttgtgtactagaaatagctaaaaatcttttgtctatttcccaactaaccaaagataatcatgtgtttgttgaattctatgttgatcattgtattgtgaaggatctaatcacgaaggaggagctacttcggggagtgcttagcaatggcctgtatcagttgcaacttactgcatctccatcatcatccagtgttaatcttagctattttaattcctccaagagcagtaaaattgccaaactttctcagttgttaggtagtcaagaaaaatcgagtccttcacagtcttttaattgtcatcagtccttgtttgcctactatttttcattctgatgttaatgtgtggcacatgagacttggtcatcccaatgtcaatgtaatgaaacatatgctcatgaatgaaaaagtttctttcaaatctgacccaccattttgcaatgcatgtcatataggcaaatccaagtataaacattacaacacatctcatacaaaaactcattcaccacttgagctcatacattcggatgtatggggcccttctccaatcccatcaaaagaaggatataggtactatgtgcattttatagatgatttcagcaactttacttggattttccctttaaaactcagaccagatgtcaaaagtacattcattaattttcaaaggtttgttgaaagaaaatttgacactaaaatcaaaactctccaat

SEQ ID NO: 48681 - DNA, 1360 bp, Cannabis sativa
atatccgatcttatcaaatataaatgtgtccaacataataataatattcaaaatctcaaccaatactaatttttggttagaatttaccagtttcagataactatgttttgtttttctttcatttttatattagttataacattaatcttagaatataattgttaattttgtaaactataaaatcaaccgtcacttaatgataatatctcacctagaaacctcaaaagtttggcttctcaattctcataatatatagtaatatatcttacttaaatagtgttcaacttccttttcaagaaaataaaaatagtgttctacttaaaaaaatctataagagtgttcttggtttagttcgaatttttattttttttaaactaaataaaaaatatgtaaatcaaatcagacacgtcgccgccatgactgtttggaggtaatttctttctcactcactcactctttctccttttttttttttttttttaatttaatcgtttatatattatacaatgcataacttgggatacgaacacaggacctccaaccaacacacacgcaccctcacgcaccctcctatggccacttgagctaacctcaagtggtactctttctcctttgatgtctctctctttcacctacggtctctctctttctcctccaacctccctctctttctttctcatctaggctctctctcactctctctctcagaattttttttgcatgcggtggtggttcgattcgatgggttgctgtggtggttcgatggggtgtggtggcagtatttgttgttgctgatgggttgttatggtggtccgatggggtgtggtggtggtggcggttcatattttttttcggttcataaccgaagcaaaaaccttttggcggcggtgtattactattttcttcggctatgaactgaagcaaaaaacttttggcgttggttaatgagtgaagcaaaaatatcaatatttgtgtctacggttatagcgatttcaccaactaaagaaattctttatgcatcactttgaaaatgacgctaaatgtgattttttagtagtgagaattgttaatgttgatactgctttattgagtgtaatccatatgtttcatgaatatgttatgtcagatctcagtcacacacattctctacttgcttcatgaagtgcaggtatgttagcatgattaaaaattacatctttaaaaactttgtcaggaaaatccatgcagtgggacaaaacctgagctaaggagaaaataatacaatatgtacatacattctctttatacatatatttataactattttgcaagttaccttgttaaaaaccttagcagaaaaacttattgggacaaaacctga

SEQ ID NO: 48682 - DNA, 979 bp, Cannabis sativa
agtcatggtaaaatatattccaacagatataactatacatcaatatacacaataaacgttagcttatacaatctgtatatatgtaaactaaaatattatatacaatatactttaccgtatattatgtatacataatgcacaaattaaatacataactaacctcaaaactcacgaacataaactataaaaatacaaaatcaaaagcaatctatatacaatcatacttgaaattcgataaaacactaataaatactaacgaatcaaaaaataaaataggaaaaaaaaaatcacaaatatagcattatcttagcccaaatgcttacaagaattcaaacacatactacaccccaaacattcgaaccatcaatacaccgatccaaataaaaataaaccaaaaaaattattaaaaaaaaaaaaaacactacctaacctaaacgcttacaagaattcgaacacatactaaatctaagtaattgcaccatcaatacatcactccaaacaaaaataaaccaaaaaaaattataaaaaacacgagttataaataccttaatgctatatggaactacaatcttttcatcactactaattaacatactcagcttcatctttctccaccacttgcttcatccttttcgaaactcgatctgcatttccccccttcttaaatctatttacattcttctttttctttgttgaagcatccgattccccaataccactatcttcaaatattgtttccttcatttttctcttctgattcatcaccagaaaagatatggagggagaaagtgacaaacgtgttttcaccattactaagaaattacatataaaaaaaataaagtaaatgcaatgggtaccatattttataaggactaaggcggttttgcaaaatatgtttacaaaggaagtttactatagaaggccttaaaaaaattatagaaaatttaaaaattgtgatcacgcgctctgcgccctcgac

SEQ ID NO: 48683 - DNA, 1753 bp, Cannabis sativa
  modified_base (1386)..(1390): a, c, t, g, unknown or other
tataccttgccacaaaaagttatgtactgggaaagtaacttatcgatattttcttgttctttctttctaataagttctaacatctcttcacttatgtaatttgcatgcatctttccaactgcaccaaatatgaaaatcaaataattaagaaaccaaaataaataaattaattaagagctatatatataaatatataaaacttacaataggtgtcaacaatatctttggtgatgtttatgtggagaatgattatagaaagtggatgaaatctccatctttgcagtgtccatttcaaggtcttgaaaccctcttctctttcgtttccaagagccacataaaccaccttattattttcttgaggactatccattttactggagaaattaacaaaagaaaaagcgtttgattaattatctgtagagtcaaataaacttcaatataaaatggtacttctactaaatacgtaagtacaggtgataattataataaattcagatttttattattattattttacattaaacaattactatccagtggtgttgagtttggagtaatgtgtttggcttagttagttgataagtgatatataagacggcaagttttgattaatcatatgtagttttctatttcagttaattaacagttttttttttttgttagtggtggtggcaacgtttgcttctcatttcgttaggaatcgtagtgaatattcctgtgaatatcttctgtaaaaaataatatggcttatgattatccaatgtttcttcttgattttacaagtatgagtacgacgtacgatgtttttgggtcggtcggcaatctcattttcttaaaaaaaaaaaaattaaagcttttattaaatgggaaacagttacatgagcactctttcggggaaaaaatgggcatgaaaataaaatagaaaacttacaaaaaataatgactttttctcctatctttacaaaaataatgtcatactaagtaaatttcttttttacagtcttggcaattttttttttcttttctaccgtaaacaccaaaaaagaaaaatgaggtctctatcttctacacccaaaaacagaacaggaacattagaacaatcagaaaacaaccattaattcctatgagattgagaaaaaaaataataaaatcgacgtcaaataaataatcatggcaaaataattatgaaacaacactaaaacaaatcaaataaaagaaaggaaaacatgcttaaaaaaagtaaaaaatgttctgcacaacctcaatactcaatgcaatagcagttatatttgcaagcacaatcttaaaaaatcagaacaaaaaaactactaaaacaatacaaaaataaatgtaaaacaataagcagatataatcacttagaaaaannnnntatatatatatatattatattctcacttagaaaaacataaaagaatcacacaccttaaaaaaataaattctaaaaaataatcgtaaaacaacactaaaacaaatcaaaaaaaataataaataaatacagtatactacaatataaaacttataaaaatacacagtaaaaaagtaaattcagtcgtagcagtatttttgtaaagaaatggcaaaattgtaaattttccaataaaatagtcaaagcctaaccaaatagtgtaaagcccaataagaaggcccaacaggctagatataataaaatggcccatgaaaattgaacatgaccataggcccaaaaaaggagtggaaatgaccaaagaaatat

SEQ ID NO: 48684 - DNA, 1441 bp, Cannabis sativa
ctaattagcttaaaaaaattattagtttaaataacaaggccttgatttcaaaaaaaaaaaaaaaaaagggaataacaaggcctttaatatatataattttgactatatttcacactctctctcacacacacctaatgcatcaattccaattgtaatgtctattgtctttttcttgttttaataaattggtaatgttttatcaacccccacaagttgttaaataaaactattattatttgtcattttgcttagtaaagctttctcgtttgacaattttataacattttatgagttccggtgataatctctaatgttttttttttttgtatctgaatattttgtttttgtgttgctttcgtcacctttttcctataaatagaaaatgtaggtatcatattttttatgtggctgtttttttctattattattatctttatgtataattagaactataattattaatctataataaaactaagaatattttagcatttaaaaaaaacaaaaaaaaataaataaactgagaatatttttctaaaagctatccttttcattttttgaaattgaaaagctatcattaggagtgacaatttttacacataaggaatgttataaataagtagtttccttttgagaatcttgaatcgttgaaaaaagtataattttggacaaaagttcgatcctaatactaaaaccggatgaagtttaatgtatttatattattattattatttttaacctttttactaagcctttatacatttttactaggtctcttacaaagtaaaggaggaatgaatttgactctaatttaaggtaattatacaatttgttatgtaattacacagtaattttgtaatggaagaaaattaagagatttcaagtacacttcaaatcctcacaactctataaaaattaagtattacaaaaaactttccattttataataactattttaccaaacataacactataaatttatatgtaatacacatatataattacaaaaaaaaaaaaattgttattacaattactaaaaaaaaaatatataataactattttaccaaacataaatttatatgtaatacacacttattattaaaaaaaaattcaaaggggagatagcaagatggctaaaaaaaaaaagcagtcttgttatttttttctttctgttttttttatttatttaaatttaatcatttaatatacatattaaataataacataaatttatatgtagaaaaactctaaaggggagatagcaagatggctaaaaaaaaaagcagtcttgttattttttcttttttttattattatttatttaaatttaatcatttaatatatatatattaaataataacatcatattatttaataatttttagagttgtttactatgtaaacatttttcgaacaaaaagtagctaaaataatatggaac

SEQ ID NO: 48685 - DNA, 928 bp, Cannabis sativa
aaaaaaaaaagaaaagaaaataattgacaatggatcaatacttatggtcaataataaaaggaaaaaaaaaatcaattgtcaaagaaataaagaacaagtttttaatttattccatctctttcacttttactcacttcatagaactctttaatataagcctgaagatactttcttgtttgccttttacttcttaaagtaatgtataccattagatttcaaaaccaataatattatttttaaaaataacgatattttaaataataaaataccaaaaataattttgcaattaaaacgtaatttgcgtcgttcgatgtaaatagttatttattttttaaggacaaaactatttaaactatacttatattttggtctttacccttccgtccaaaaaattttgttaagtgtcacggtggacataccacaatgtaccctgatgtacacttaaacaaaaattttacggtctacataatattaatcatttaaatattataaaaaaatttaaaatttaaaaataaaataaattacaaaattacaattttcccaatcctttatttttccctttcattctctaaaaccatcaatgactagatgatcttttcctctttttctatgaggttccttcttgcctcttcttcttttattatcaccctcactaccatcattattgttattccaaattttatccacctgacgagataagtcaacgtaagctaagatagagtacatgtggaatacagccttgccaatagcaagacaaggtctccttataaggtatagcaaaatcgtcaagcatcaagcgaaaggagttaagcgagttgttaaggagctgcaccaacatgtctggccagccaagggaagtttataggccaggcaatatcagcttgtatggccagccaggatctgggcacaagctggccagccaaaaggt

SEQ ID NO: 48686 - DNA, 1373 bp, Cannabis sativa
gttcggggtctgggtccgagtccagtcggagtttcgggtctgggttcgagattggggtttgaggtcggggatcaggtccaagtccaggtccagggccaaagtctgggttcagggtctggttccaggtccaggttggggctggggcttaggtctgagtccgagtctggatccagagtcaaggtccggggtagcagtccatggtctgggttcgggtcgaggtcccggtcttaggggcgagggtttaggttcgggtttggttggagtccaaaatattgattaagaaaaaaaatatgtttgaaataaatttaaaatgatttgtttttgttttcaaaatttttaaattgattaaaaaattaataagttaaaacaattttagacaacatgtttttaaaattattttacgtttctaattgaaaaataaaaatctaaataaaaaattattactaaactgatttttgtatcataaaactattaaatttctttttaattaaaatgtttttactttaatattaatttttattttttttcattgcttttcctctataacagcttccatttttattgactaaaagaaataaatatatccatataattattagaatctttaacagaatataaataatgaactaagcaactacacaaaatgtgtactatatacttagggtttttacaataatattacattttaggtaaaaaattatcattttactgtcacatgattttttttacaaaaatactgtctttttataaaacaacagtaaaacaacaaaacagactattaaaacaacaatagaacaactaaaaaacaatcatggaacaatagtgaaaatttaacacagtacacagtatttttaaaaaaattctgctccatagaaaaaaagtacaaaaattaaaaattttagtttgtggtataaaaactctatatgcctatgataattactttgttaaaaaaaaggaagaaaagaaagaaagaatgaacaaagaaaaaaaaaacattacaaaaatcaatttaattagaactcccgaaattataatttcattttaatttctttaatcaaaatattagaagaacattaaaattaatttataataaaacaaattaccaagtaaaacacacacacaaaaaaatataataataataataataattacgtgtctattgtattataattaagatttcatttgttttttaaaagaattttgttaattgtttaattaaatttaagattaaaattaatctctatataaatatgaaaaagtatagaaagaattatgaagaaaaaaaaggaataataactttatgcagcttagaaaatagaattgcaaataaaataaaataaagaggttttttcatttttacactttaaaatagt

SEQ ID NO: 48687 - DNA, 1502 bp, Cannabis sativa
aaaacatttctattgtggacaaggttgtgtgcagttgtatgtgtggccatcctatttcagtgtctgcaaagatggctcaatggaaataccaacagctagttcaataacatgttgactaacatctacaagacaattgaaaatttcttaatcaaactttctttttgctatttttttctcactttcataatctacaagacaattgaacattctcatctaggagatcttgacaattgatgccctcaaactttgttcaggtttccagtccagcaaaacttcaacaaacagttatcataggggcgctaccactcgaaaaaccagagcgtaacaaatccataatgcaaaaatgcattcaatccataatgatcatattgcttggagaatttgagagggactgaaaagggtagggatagagcgtaaccatgctctagtaaggttccataatatccagtggttaaatattcaaccctatttctttctttaaccctcactctcttcgtctatttattttttatacctcaattgatccaatatttgtcgcacctacagcagcaattgccataaacccttcctgccatagaccttcaagcacaacctgtattaagcaataatcataaataaaataggtcaataaaaatcttaccacaaggaaaaatacggccatgtgagtttaacgtgtcagtttatgacggtcggaaaatttgacagcacttgaaacaaataagaaaaacaacaaaagcaatagctaaaggaagaaggaagtccgaactttgttgacataatcaagcatatgaatatagatgcaatgaagaaattattcacagattcctgctagctgatatccttacaaacaataatttggcatacaccaactggaccaaagaaaaagatatttccagcatatagatgaaaattgtgcatggcgatagattttccttagttagaattttttatctatgatgtatccagtaagtttgactttattgaatttggtagcagaattacaaaggtttggagcttttcgagaggctcccctctcctacttccacctttcaagagggtgaaatctctccactcaaatctttctaacttaatttctcagcaactcccaaatgaacttgctacactcctatttatatgctctggtctttttagacattagccacctaggattacaactgggcccaaaaaattaatcaaatacaagaactaattaaaagtccaataacaaaagagagaagaattaattattccctttaattcttctctgaaacacacggagccccttaggcttatcacatggtcctcatttatgagggagaggaaaataaagaactaataatatgtcaaggagcaacaacacgatctcactaaaaccatgtcaagctgatgtaagttataagttagaaattaccctttcattctcaacataaaggtttctgattgttcttgtggcacgttcattaacaggaaataaattgcctgcaaagtgaaataacgcatct

SEQ ID NO: 48688 - DNA, 917 bp, Cannabis sativa
  modified_base (870)..(879): a, c, t, g, unknown or other
aactgtggatgtcatgaaccctgtatgaaggtcacgcatccgaacccataaacccaatgtgttcatagcaatgaaccgggggttagaaccttctttcatataggagataatcaacgccttcctgttaaagtaccacagactgccttcaaacacctccttaatgtcgatttcgtaaaagaactgaaagaggaagcggttagcatccagttcttttatatacactcccttaccaggtttccataatgctgccagtgtgtctcgcatcgacgagaaatcaactactcttgccgtgataaatcttccaaccaagcacaacctccaattgaatacaaactcctcttttctacctgcgcccagttcttgcaacgcgaggcctccttcaatctcgtcatctaggacaatatcgtagagagggttgttgggattactagatgacgccatgaatctcaaaaccaaactataactggaaaaactgaaaacatatagactaaccaactatgacaaaagtcaagacaaataatttattcttaaattaaatataagacatagacaatgaaaagaaaattttatatcctttgtgttttaaattctacatttttattattttaagggcgataaaactcaatcataaagctaaataagccactcgattggagtcacaaacggcttcagttttctaaatttgtggctagaggagggtgagagaggaatgtgaaaattttttcaataaaatattagattactattaatataattatttattatttattttatattttatatattagaatacaattataaatagtaaattagagtataaactcgttttttttttcttcaaatttaatataaatctatatatatatatannnnnnnnnnaaggagaagtatgaggcagtgatgtggcggtacaaaat

SEQ ID NO: 48689 - DNA, 2098 bp, Cannabis sativa
atttgtaatctattaaaatgtattagccagtacgtagcttcgtaatttacataatttgttccttgatcaaactgtccattgcaaaatatgagaaacaaaatttctttttttttgacaatttaaaaatttaagcattgtatgtcaactatgggataactgttatgaaactgtaatgtaactaatattaaaccttaaaataattaataatactcctatgtaatacaaataaaacttaccataattgagttttctctgcacgagtcgtgtattgttaattctgagccctgttttttttttaaaaaaataataatatggtagtagcacaacaattatttaactaatatacaacttaaatgcaactagaaatagaatatttgaatgtgcatcgtcatgaaaagatttgtacgtattttttttgtcactgatcaacaatctattgtactttaaaaatattatgtggagaaacaaccgttagaattctgtaaactaactttgtaacaaccaaatgaatatattaataaaactaaccatgttataatttttttttaaagagctttgtgttggattgtcaatataaaacacctgcaaatatcataaaaaccattgtattgttatcaatttgtaatcattgatatctctagtttaagagcgttagtaagatattagtgcaactacaatgaaactatgcagaaacttaaaaactagaacaatgtttctatgtacgtggctctagaacaatatattatttctctaaagtattttctttgatgggaaaagagagaatacatatgaatcctaatgtgagtttcagacatttataattttgctcatcaacaaattataaattatcttattttctaatacataccaaataattcatattttgctatatataatcctacccagtacacccttattaatctatattttataagaagtcatgtcttttgacatgagtaaaaagttctgaaaagtttggagatttctagtttttgtctttgtctaatgtcctctacaagtcaacaagttaactcactaaacgagaagtatgattctgtgcaattggaagaagaagaagagggagaactattgtgtgatttcattgaagatgttgggcagcctatagatgataggtggtgtttggtagggaaatttctgacgagaagatctgtggatactgatgcgatgaagcatactctggcttctctatggcagccaggcagaggagtattcatcaaggaattagagccaaatctttatattttacaattttatcatgaagtggatatccagagagtgatcgatggtagtccctggacttttaatagaaatcaactgatttttcaaaggttaaagaaaggtgaagatcctagaagtattaccctgagtagtttagagttgtgggttcaattacacaatctcaaaactggtttcatgacagacgtcgttgtaaataatgtggctaattacataggtacttttgtcaagtcagaccccaaaaacttcatgggaatctggcgtgactacctacgtgttagagtcactattaatatcgagaagccgctaaagaggaggatgaagctgaagaagacaaatggggaatggatatggtgtaacttcaagtatgaatttattcctaccttttgtttcatatgtggtctaataggacattctgaaaggttctgtcctcgtttatttgataaaccattggaagaattagaaaaaccctatggaatttggatgaaagcggaaccaaggagaagacacaaccaagctggttcaaggtggctgcgcactggaacagatgttgatgctcagttttccgatgagacaatcgatcaaggtgtgaatatggagacatttaatgcagttaattctcatgatcagcgtatcaataccgtcaatgctagagttgacaatgcaagaattgtggaaagcagaggaaatcaaggaaatcaaggagtaaattagcaagcaatgatgactaccagggtggacaatttgggtgtgatcagtgatggtaatataccattaaatggtactaaaggacacataggcgatcatacattgattttctcagattccaaaagaagaagaa

SEQ ID NO: 48690 - DNA, 3502 bp, Cannabis sativa
  modified_base (795)..(797): a, c, t, g, unknown or other
cgaccctgccaaagaagctcatttcgagctttccaaatactccatgctaccatcaaagaattcttagtttggtgagaagaaagaaaaattgacgtaaaactcattttagaaaaattaattaataattttactggtgtttaaaatttccatttttctctccaacaataataatcattttagtgtttgtgtaacaaaagagcacttctattctaacaactattttattccatctttcaaaataaataactaaaatacttttttttagatgatttaaatttatacttttaataatatatttaattcattaaatatcatttcaaaaaaaaaaaaacaaaattatcaattaaacagaagtgaaaaaaacaaaaacaatctttatgaaatttttcattagtaaaataattatatataaaaaaaaaattattagcaaaataacatatatgtcaccatcataaaataaagggtaaattgcggcataaaaacctaatatttccgattttatacacttaaatacctaatgtttatttttgttgcaaaattacctaatgttacaattctcttacactgttagtaccacttccgttaacttataaatatggacacgtgaagagttaagatgcattacatttatttttattttattttaaaacttaatattcttaacatcagaaactaaatgctatttgttttaaaaaaaaatgtgttctcattaacaatttccacatgatattggcacttcaatttgattatcatgttccatatactacacatgttcactcagctatggtaatttannnttgcatctctcttatttttttaaaaaaaacaagtaatatttttaattttttatattaagaatatcaaattttaaaataaaataaataaatgtagtgtatttgggccctccacgtgtctatatttatgagttaatagcggaagtggtagtaacgatgtaagagaattgtagcattaggtatttttgccacaaaaaataaacattagatatttttgccaccaaaaataaacattaggtatttaagtgtataaaatcgaaaacattaagtatttatgccacaatttatcctaaaataaattaagcgagattattttataaatttgagtattttacattgttaatttaataaatttggcaaatcaaataaatattttattttgagagaaagaaaagaggataaacaatgaaagagaaaagccgaacaaatatatgcaatctaaaaagaggctatttggactaaattgttgagatgtcaaataaaaattgtataatctaaatcaattagttacccgattcccttctatgagcccccatcacatttatgaattcactcagtaatttcagccataatacagacgtaacttgataaccaatcacaaaccttatgtcacctccacttaccataattgactaggatttaatttatttatgatcatattttaccatcaaaaccaagactttaggatcaatatgtaaccatcaacatgaataaactataaaatgggtacaagaaggcgtacaatcataaaccgatccaaatggttgccttacgaacaaaattctcattattgttctattgtaaatgcttagtgtggaattcaatcccacttcaattgttttgtataaatctcaacaatcaaaaaacccacctcctaagctctctcggtggtttaatgctcaacaaatttcttgaggttcttcaaccaattcatgtactctttgctgtctttggcaatcatgtactcttgcaggaaattaattgtgcttcggttgatcccccgaacctcgagatatttgtggaaagccttctgcaagttttcatctaaatcactgaagaaaagggaaaagagtaaagagtacatcagcacaatgaacaagacagttggtaacttaacactagttttaacaatcttacctgaaatctggcccttcatatgcaagctgctcttcagtaccatcgggctgtttaatcgacaagctatctatggtaaactcatcagcaaatgcagtgacaccaaactccatcaattgtccacttcctttagaaatgcttacaaccagtggtatgctattaggttcatcattactctcattctcatcattagcatcattgtcatcttcctcatcatccattgaaacatggggtatgtcaacttcaactttgatagtttcatcttcgaactctcttgttagtaaaacagttctttctccaggattgtcttgaattttaaaaggaaatccagctgggatttcttctacctgttcatgttacaaagcacaaaaacacaattggccaaattgttccaccgttgatttaaaataaaatgacaaagcataatttcacaaaagatagaaggtgaaataataaacactaagctttagttcaaatggtatcaccatgctcccctaaaatttcatgcaatctacatataatttgcagtacacaactcaaggacacatgttctttgacagcccagttttgacagtatacattcattgagatcctaagagcatacacttggaagaattttgtaacaaagagaaggaagaagcaatttatagcatatgggcaacaaacctttaggatctaacagcttaagaaatcatttgttacacaaaaagaaaaaggtagttgatgagaagcaacacaaccccttgagtaaatcaattgatatgtactagtctaagtaccatagccccattataacaaatgatattaacccaaaaccatagatataagcaataaagaaagcaaaacaacatttcatgacagagaagtaaccaaaataaaacatgtaataattcatataaatctaacttaaacaataaagagaaacccaatttggaactcacgccatcgtgaccaggctcagtttcttcagcgcactggagctcagattcgaggacctgaaccaatttctcatcggcgctacgttttgaggaggattcagtagagaatcgtagaaatggaacaaagcttcgacggatgaggtcacggctgaggttgcccttctggacggtggagaccgccacgccatggaaggctttggaagatccaactgtacggattgcgaggggaagtaccgtggacgaagctctgcggagaagggagttgaaagccatagtgttgagtgtttcgactagagaaggggttaggcttagggttttggaagaagggttttaggccgaacgacttggtctgaaattctttttatttatactttacatacaagatgaacgacatgtcgtttatcctcatctcctctttcacggttgtttattaaaaaaaaaagaaaaaaaacttatttatactgcatgtcactaaacatatatattttggtaaattggttcttaaattttatattttagaaaattagaatatgtttgctattattttttgcttttttttttcaaacaattatttttagaaatgaaaacaaaaaataatttttgaagttttttaaaaacaagtcatatttagttagt

SEQ ID NO: 48691 - DNA, 2399 bp, Cannabis sativa
tatacttctatggcaaagcttactgactagtggcccttcaaatctaccttgcatatgggtggtaccgactactgccactatagcctcctcttccataaagcccacctgctccaccataactagcaccagggccagactcataaccaccaccaccaaagcctgaattgccataccctccttcatagccttcaccacgaccatatccacctaaaccgcccgcaccataacccccaccataaccgccaccatagggcccatatcgactagaataaccaaaggaagattcaccacggtagccacctaagctaccgctgccaaagcctccataacccccgccaaattcgccactaccactaccatacccgtaacctcctccaccaactctgcccccaagaccccctggagtcctatagggaccaggaccataacccccatcaaacccaccatatggactgccaaatccaccgtagccttcattgaaagaacgagccctagaattgctaccatatgcaggagcaggtggtggattagaggctttctttggttcagctttcttgatctccacctacaacaaagcaacttagttaacctaggtcctgctgcaataaaactatgatgggagccctgtcctggtataacctatacctgtaacaacctccatctaaaattagaaacaaaagcactaaagtaatctctataattaaacatctaaaaattaaaaataaatttcctttgctattgaatatcattaataagatctgagaatgcaatagtgcactctcaatattgacaaggagtttgtgtacatgcttgttacttggacaccatccaaacaagctcacctgggtaccagacatatcaatcatatttccctttgacaaaatttcatctactacttcttcactgtcaaaaattataaatccaaagcctctagatcgattggtctcatgatcacgaataatttggtgttcagcaactttcccatactttgagaaaaaagttttgagttcatctgacaattcaagaaggagatcactaatcagctaaaaaaaagtcgccctaaacgaaactattacaacgaaaaacggaggacgtactctaaaaagtatttccctaaagcaataacatataaaatccttaccttctgtaacagttgagggaatcccaccaacaaatatcttctttgttttaaagtcctttgattgaccttggcctttagggatagttcttttgatctcaacctgctcatatataccaaagtgtgtgaaatgaggacaactatacacaagtgtgtatgaatgggatgttttgtttatgagatcagtaaaaattatcaacaaataatacccaaaaaaaaaaacattacctgttttccattgatgacatgtgtatcctcaataaccttatcaacaactgcaggatcagcataagtaataaaaccaaaacctctaggctgaccagagaaccgatctttcattatcacagaatccactacctctccatactttccaaaatgcttattgaaggtagctatagaccaattaaaaaattaaactaataagactccaaacatatcaatctaaaacccaattcaatctatctacccaaaaaataataaaaatattcctttttatacaaacatgtatttcaagactaaccgtaattggtatctttagccaatcctccaatgaaaatcttgctgcaatatccaaagtactcaatcagttataacacgcatacaagattcaataaagattcaaattaaacattattgatgaagatctcaaataatcgaaaacaaaattcttgagtaaataaaattgagctaaaaatacatacccaggactagcgccgtcgcctgtaagtggattatcgctctttgatttcgagcccatgttatcagattaaagaaattcgaataaattttaaaaaaaaaaaatcgaacttttagggatttgcagagagagataggaaagggattagggttttagagacgaatgacggtggttttggggaaagaggagatttatatataaaaaaataaaaatagatgtatttatgaaatgacgaatatgcccctaaagagaaaagatataacggaatatttctctggactgatttggcatttaactaattggggatttttctttttaacttgttttgcaaggttactcttttatcattttcctttttgagaaaaaaaggttttttttttttaatcaaacaaataataattactctaaattcaaataatttgaaaataagtgttcacgaattggtttagttcaaattttcataaactaaaaatattgaaatcaaaccagaactttgaattcacggtttaggcgaagattataatttttttttaaaaaaaaataaataattgtactatttatgaa

SEQ ID NO: 48692 - DNA, 1130 bp, Cannabis sativa
  modified_base (1061)..(1065): a, c, t, g, unknown or other
aaaaaaaaataaaaagatagaggaagaagaagagaaaacgtgagagaggaaaagagagagatatatatgtataatacatatttataggtttagagttatatgtttttaaaaaattagagaagatttaaaattagatatttaagtttttaattgatttatatattaaaataataataaaatattaatttattgatttatgttttaataaaatattaaaatggagagaattaagcagaagagagaataatagttttagagtgattttagaccgccacgtcacgagatcatacttctcctttatatatagatatataaataaatacatagatatttcatatatatccatgtcatgtgtgggtcaacatctatcttatatattaaggaaacactcacacacaaaataacatatattcgcaacattcatgtttcctgacattttaattatttgatctcaacaacaatggggtaataatgaaaatataatttctagggtgtaattgtacagaaaccttttgaaaaggccatatcggtatactttaatgattttggtatttagaaaaactttttagtttaatttctttttattcatgattaatttattcattttaattatttaagatcatctataaaatttttaaaaaatataattaatttatagtattaaaaataaaattcaaatatattgttatatacttgagtgttttttcttatacatatagtaaacaattttatttttctcactataagttattcaaaaatattttaaaaatttacaaaagattttaaataagtacattactcatgattataaaaacgaaatagacgaaaaaattattctcacatgtcgaaaaaaataaaggtactactagaaaaagctttattagtgtcagttttgaactagtatatactctattagttacaataaccgacgtgtatgctacagacgcaaaagaaacatagcttttgtgtcgattgggaaccgacaataacagtgcaccaatcagtttgagcactatttgcgtcatttttgcactaacactgttatagtgagatttctctcnnnnngaaactcgagaccagactcctgtttggaggacacgtgtattcagttttccaagaaaagctgagat

SEQ ID NO: 48693 - DNA, 2214 bp, Cannabis sativa
aaatacttgtacctttattttcgaaagatgaaggaagtttaatcaacttaaattcatcactacttagatcaaaaccaacaattccttgcttctcaaaaagatgatgcaaaaaaacataatcttgtccatgttgtgtaggaggaaaatagattagccaatgaatagaggcattaataacaacggacaccatgttatatgacccgaaaacataattggtatcaacatgtgtagaaaataagtcaggcataaccaaagtcttccatgaattacttctcaaactatatactaaaacatcctcactttttctaaataagttaccaaagttagttgcccgtatacccaccactttgaaatcattggttaatggttcgtatccaaatccatacaaaccattgatcttataaaaatccttattaggagaagcatatggggatggagggagtttcttatattttttggttgcggggttccaaaggtaaatagaattatggtttgcatctagcaaacaaactaaaccataatgacaacccacaaaggccaattccatcttcttatacttttcattgggaaataatatgttagaatatgaaatctgattaaagttttgagaggtatgaattgagcactctattgtttccaactctcctctagcgtattcactgatttggatggtatgagctacttgtctttgtggtgggcattcatgaagaatggatcacttattagggacaaccaacatttgcaaacacacttggaacgtagcacagattttgcatctaatcttaaaattatattttcaatgatttcatctggtaattccgaattatataacaccatcgccattattatgaaatcaagtcaaatcaaaacaatgaattgttgtagcctatatataatatcataaattaaaacgtaaatatattggttttttttaagaaaattttggatatattttttatttttcctaatttaaacaaaatcatgatataaaaaaatatcggcagccccacaaaataagcatttataatctttttttttataattaaatttgaatcaacagtcaaaaaaaattatgatttattatacggtatgtatccaaaaatttgtacaagcaccctaaatcaataatttttttttacataaaatatatatcttttattatactatttttttttaatttatttcttccaatttacattcttaaaaaatatacatgattttaaaaaaaaaattataaaaataaaataaaattaaatattaaaattaacacaaaataatgtgaaagaaaaataaataaaaatattaacactgttataaaatattatttatatggatattcaaatcaccaaaatcttttccattaattgtaattactatttccttcaaaaaaaaaaattgtaattactattagttttcaatatgactcacatagttctaataaaatattgtatttaattatatgaatatgactaaagaatcattgaagtgattattattgatacaattttatagtaagttttgaataccaaaaaaaatttaaaaaaattatattaaaacatcaaagtataagaataaaaatatctcaatacaattttcttataattcttttagacattcaaaagtactcagcattcatctgtatcaataataaacattttaataaatctataaatacaatattttttcacaaatataaaactaaaacatttactttagtaaatacatgctcaagaaaatcaaattaaaaattaattttatgaaatagaatgggtgtgcgaccctcttaaataaacatacatggttatatttgtatattttatctcctccagttgaatattaatataaatttataaaataaagtaatttgcgttataaatatttaagtttaactctaagtttaatttttaacagtaataatatctaagttatatttatgaaacttctataaatacttgctgtagcaattaaatgtgaagtcattatctacatatcattttcttgttagtatatttaaattaatttttaaataaaaaataaaaaatttaataagttagacttattaaagactgccacgtcacaattgaatacttacataaattttaaaattataacttacttattaaaaatttagggaaattctacaatgcaccctttaaaatggatacattgatgtacccttatctgttttaacacccgaaataattttttagtcaa

SEQ ID NO: 48694 - DNA, 3840 bp, Cannabis sativa
tcagattgatatagtcctctaccctagaaaaaacagaatatgctctaagtgaagaaatgaagcttatttcactagattaatgacacttctgtgaaagtctgattttaaatagtttagttcaactatctacttcaaaagtccctgctaagcactctgttcttttcatgtgtccatggatcattgtactataaaccgattcaattttctataagtaagttattattcaaaagtacaaaaacaaacacaccatagagaatgttattccttataggctatcaaatacaagtagactgtagacaagtaaatataactaaagattgtatagtaacattattacaaataagacttcaaattatgaaccctttaagcagacaataatagtgaacattgtcaagaactaaggcatctaaaaaggaaaaatgttttgattcaggtattcaaagaaattgagtgataaaagagccataatatacatgtaaaagtaaaactaaaaaagatcgcagttgagaagtacgaaatggagtaaagagttcatcaaaagtgaacagaaaagagcacactccagctttcactcttgaaaattgaaagcaatcaaaagtgaacagaaacaactacgacagaagtctaaagaaaggtcactaatcatcaaaaactacagatcctagattcaaatgagacaagattaggaggtataacaaatattgtcgacatacttgttgcccttcttacatgaaaaccccaatgtattgtattgtatcttaaggcaccacaaagtgctttaccacagaaaattttatgaaattgactcacatcactggtttcctttccaaatatgctacaaaacaaaagctgagattcgccactaaaagtcccaccctggacacaaacaagtcttcatagtaactacaacagtttttaccttttgcaaattgtcaagggaccactaacttaacaaacatatcacctggtcggtaattaacatggaataaatagatcccaatattaatctaaaacaataaaaactagcttttaatccacaactatcaattcaaataaaataaatatcattaaatgttcaaacactagattgtctgaaaaatgaaacgataagtgagaaagatgcttagagtggctccaaagttagtagttttataacattaaaatgaattaggaagaatcattttagttggaaatacaagaagcacaacgtggtgctttctcttttagctttaactacagttggttctttatttattattagtgtactctactttcaacttttctttactcttccaaaataaaagagatttatattcgaaattaagcccctaatattatcttcctcgcattaagcaacccactttatctatattccccctgaataatattcgtctataactttgttctcataaacaaaaccaaacacaaaagtcaaaaacattacttgaatattagataatcaattgctgaaaaaaaaagaagcctagaatcttcaaaataaaaaatcattccagcagttaaccagaaaaatccaatgaaatacaagaacttgaacctagttatataacctccaaatcataaggaacctaacctaccaaaacactgaagataaaaactttactcactagaaaaaaaaaccctaccaacaacataaaatgttcacaaacataacaaaatgagcaaggcttaaaaccacaaaatttaatgttaggcatgttcttattggggaaaagaacacttacttgttacccttgatcttgaaccaagcctccgcacactgcttatgagcagcagccaaatcctccttacaagaacatcctaactcgatgggaattccagactcatgattggtagtgtccatactaagatgacaaatcctacagtccctttctactttggccaaatgtgccttaacttcaggttcaagaaccccaccaccacattccagatccaactccaccgaatgctcagaaacaggggatcccttctccacaatctcagctcttgactcactgtggctcctacgttcctcttctgacctttccactccattaccagaatacccatttccgccaccaccttcatcggagctccggcaacccccttctggttccacatcaacaactacaacatgggttttgtctaaagttgccattgcttagagttagacgcagagagggaatcctcatgtaataataataatagctctgtaaagctgagatcatgaatgcccactaaaggttgaagaacctctctcacgagttctctcagccttcccttaaccacaaaacaaacaaataacgtgatttgtacaatatatataaatataaatatataatctgacgagttaaacacagtggtgtggtaggtgatctttctctcttgtgtgtctgtccttagacagcaaccagaagagagagaaggatctgatatgggatagagaatactgtatttatatatgttgcagagcataatagtaagagagaagcttaaagcttgtatctttttctttccttttttttttcccactctctatttgagttacataaacgcttctgtttatgtcattatctttttttgtattttgggttttatgaaattatgatgagtaagatttgatcatcattgccttttctttttattggatatttttggttttctggttttttaccactaggagtaagaaaaggaggagaaaaaaaaatatctatggcaatactaagaaaagaacaaataataatttaaaagattaatgagagatttgagactacattaataatagtaagtccttttattattttctttctccatttagcagacagactagataaagaaatgtgccaaaagcagatttcttcttgtcttcttttactgccattagtattatattgctaatgtactgttctaaatgtgtcaatgatttgattttgagatactttggttgtttcattttttttttttttttttaattattaaattaaaaggtgagccagttttgtttgtggaaagtcatatttgtccatgcacttaattaataagagtcttatagttttatgggtaaatttgacttgtacaaataatataattatctctaaatataaaagcaagtgtattacgtttctcaaaaaagaaaaaggaaaaaaaaaagcataagtgtgcgaataaatagctgttgattcatcattgaactatgaattaaaagtattttatttttcttaagatgaagtaaatttttcactttttaccatccattgttttgggttataaaatcctttttatttttcactcgtaagttaaaattagacaaaaggaagagaaactcacagagtagcagtcagaacatgcagcttagtttactaatatattgtattttttaaagatggaatctctctatgtagttatattaaaaaaaaatcagccaaaatataaataataaagagaaatgaagcaataaatttatacaaagaaatcaagcacaaaataaatcaaatcaagtgaaagctttcaaaaaaaaaaagcataatatttagagccagccaaccacctaaagacaggacaatgaaacttattattgtcacaacacacaaatgtttttcttcattatagtgagtgtaactaattattgtttgggtaggtaaataaaccagtaagaatagttgcgtctcattaaattgcaagtcaattaaaaccttcgtaaattattcgttttaaaaagacaaaatctcttaaaaagaaatgaatgagctggtacaacaagaccccactaggaagtaagaacattatattgtattagcatctacataactctataatgttacgtttgatctctttctctctctc

SEQ ID NO: 48695 - DNA, 1843 bp, Cannabis sativa
gtatttttaataccataattttttaaaaaaaatttcatgaaaacttattacaaatttccactatccgaccattatataaaataaattaacttataaattttctagtctttaccatcaaaaataaaaatatttctaccagtatgtctagttttgagcataattaatggttaaatttgtgtctagtaaagacccaaaaaaaaattcttttttaaatttaaatacttttttttttcttaattttaaaaaatactacagtttcttctaaataaaagatcaatttttttttttatgactcatattatatttcaaggctggtcctgaaagtcaaagccatccctctacaattataaacaatttatttttcatatatcattatatatttatatacataataataataatatcaaatataaatattatatgtacatattaaatttgctttagaatctcttaattatatatttagagatttttttttttaatatgcccatacccacatgtgacaaattaataaagatgtgtgacaagtctaaagagaaggtgtaatttggcatagatttctaatttaagtgaagtgaggtgagatgggaacatatatatttggggcctccacacacacacacacaaaagagagatcaacttccatgttaattatactatcaaatgattgtcttttttatcatttatttatttttgtgtttgtgaatgaccattggttaaaatatatatgtaaggaacaactttattattaatttgatacaaacataaagatatagtggataatcccaagatacacaaaatcaaattttctaacatatattatatcaaccatgaaatcaagattttttttttctttctttttattgttataaatttggttgtcatgtcaaatttgtgagatgtcatttcttaattattttaaccataagtagatcactatgaagagtaggactatagtccatatatatctatatgtttatccattttctgtatgtgaccccagcaattttagatttacttctctgatacacaagttttgaaataattaaagattgacatgatatagtaaagaagcttaaatataattgagtaattttgtgtgtattgtatggtagaataaatattatttctttctattttcttacctttatttatataaacatgcaaagtttgatgtgatttttcggtcccatactcatgactacaactttttttttttggtaatgtaaataaatttacttatactatacataaatatagtcactttaattattacatataattactaaatatattatatgaatcacacattcatacataattctttgctcattcttgaaaccatgtcgtccatcaccatcatcatcgaacaatattcactacaaaaaacccatttaatcacactattttttttttaactaaatatgatttttagtcacaacaaaatgttacttgtaactaaaacatagtctttaaatatatacaagttgtcactaatattaattttagtcacaacaaatattgtgactaaacacatttagtcacaaaatattttaatttctgtgatacttttttcacggatcttttactcacaacacaagaataaaaatttataattagttacaattttttcgcttttttagtcataaattttattgtaactaaaagtaagatttttttaaagtgattgtcgattatcgcgatctagccatacaatctactcttagagcatctccatattacaagcaattttaaacattataccataaaatttacatcatttcaaaatataatatttttattttgtcttctatccacgtaaaatttgatattttcttataaa

SEQ ID NO: 48696 - DNA, 2243 bp, Cannabis sativa
atatgtcacatatatataactcatatatatcatatatattactatcatataaaatagtaaataacataatatttaccattatgcccacctatgaatggctttcacataaaatctcttatccttgtattctcaaaatcttgatttatctcctcttctattgaaaagggataagcttttgattgttagagattttattacaatggaagataaatcaagatatatacaactcaattgtaaaaataatacaaggacaataaaagagattcattaaatatatattacaatacatatatatacactatatatattacaggctcacgattcaatcacgcattgagaaatttgtgtgtccagtcatggactaaagtaataatatatatactattaattgattaaaaaagaagactattttcacacattttatcattttgactgacaaagtctaatcacctgcaatctttcataaaccaaaaatatagtatgtatctgatatagtcggttttgctaaccgtgcaaattggcatcaggcatttcaataattattatgtggacaatttggtaattttatatgtattgagtagggagagaaatataattttatattatttataatgcataagcctacataactaatacagttatattgatgaatataaagcctacataactaatacagttatattaatggatatatataagtagaacttttaacttgtaaagaaatgaaatgattcataagcttttcttttctctggagctttctagcaggtatgaggtgcttctcttcttcttcgttaagtttggtccctctaatgggggattttgtccacccttcactgtttagtgatggtttgtcctactctcttcattacaactatccacatctgcttaatcctctcttctatcagcgcattaaatgctatagggattattattactccctttcacatctcataaatcttacccagagcattaattgctccaaacactttctctcttcatctctcagctgttttcttcatcatttccttttgtcctctcctcatttactactgatttcccaaatcttccctcagaatacctctcttggttattgtaaatttgaggcggacggctggcttcccgaaacccttaagctcttcttcatcattgtgacatccatggatgagactagggatgtgactaggcggttccaaggagtgttcttcgtggcttctggttttttgtatatatttccaggctcaggtattgttttttttcatccccttcctccattaatttccctctttgctgatatctgtgaagtttttgtctttataaaaatggataaatttctcaactctatctctaatgctttagctcttccctcttatgaatcaactatttttacctatgatgttgggtcttctagttcctcccctgcatccaccagtctacttcttaagcttcatactattcatccttataataggccttccctcatgaaaactctttctggcatctggtcatcgcaatgtcgattcccagtcactgtgtctgagcatgcatatggtatgtttcttgtcacatttggctgtgaaggggacaagggtagagtttaagagggtcaaccttggaattttgcccagtgcataaccatctttactgctcttgatagttcttttccccttacccctgaaaccctacactatgttcctttttggatccaagtgtatggcgttccatttatgtgtaaatcctatgatcttgctaggttcatagctatgtaaattggggatcttattgaggtggataaggacactattagggagggtactggtccctatttgcgtattagagttctattggatgttaaccttgctattcagagggtatgatcattaagttcattaggatggggcgtgagtttattaaatggctcgattttaagtatgagagactaccagatttttgcttcttctatgggaaactagaccataccaaaaaatttgtgttgccttcctgcaaaagtgtgatgaactcttgcatgaacctctctgcccttataacatcctacttagaggcaaagaaaagattactgacaaatcccagccttttcaatatccccatcccccaactattactatggttaactatcaacctgtgaatctcaacctgccccctcaaccattctctggtcactcaataaatttcccttctttccttcatctcaattctcattttgctggcccttttgctcctcc

SEQ ID NO: 48697 - DNA, 1418 bp, Cannabis sativa
agtagatgctacagctagtcaagagatcctaagctttatgtatgcttattcaggttacaaccaaatcaagatacacccattgacaagaacacacaagtttcatgatagatttaggtatgtactactataaggtcatgctctttgggctaaaaaatgcagggggcacctatcagagattcgtgattaaaatgttcaaggatctcattaggcacaacatggaggtgtacgtggacaacatgttggtcaagtccaaaaaggctggggtcatgtggaggattagatgaatgctttaagctcctccgagagtacaacatgaagctcaatcctctcaagtgttcattcggagtaggctcgggcaaattccttggcttcatagtcaatgctaggggaataaaagaaaacctagacaagatccaagcccttttggaaatgaagtcacccacaacaatcaaagaaatacaaagcctgatgggacgtattgctgcattaagcatatttgtgtccaaatccacaaacagtgtgttttttttcttcaacatacttagagaaaacaaaaaatttgagtggacaagggagtgtggaaaagcattccaagagctgaaaatggaattggcttaacctcctctcctatcaaaacctccagactagaaactaggtgtgtacttggttgtcatagagcatgttgtgagtgcagtcctgataagagaagaagatggtatccaatatccagtatgctacatcagcataagactaattgatgttgaaagtcgatacccactcatggagaagttgacatactgcttacaattagcatcaagaaaactaagattgtactgtccaagctcacccgataagggtatacactgaccagccattgcgataggtattacagaaacccaaagcatctgaccgactactcaagtggaccatcgagcttagccaatttaacatcacataccaattgagagtggccataaaaatccaagctcttgctgactttgtggctgaatgtacaattatatctcctgaaatctctcaagatttgaaagaaaagtaagagctaataaagaagcgagagcaagaataatagcaagaacctaaagaatcaacatggaaactacatgttgatggaagttatactgaccaactgtctagtgcaggtattgccctcattacacccaggggaaatagatgcacaggacaatcaactttggccttaaatcctctaataacgaggctgagtatgaagctctgattgcttgcctcaagttggcacataaaattcgggctgaccacctaaacatatacaacgactcatagttagttgtaaatcaagtcttaggtgagtacacagaccgaggtgaaagaatgatagcctatttaaggaaaatttaagacttattaagttaactcaaaga

SEQ ID NO: 48698 - DNA, 2354 bp, Cannabis sativa
  modified_base (599)..(620): a, c, t, g, unknown or other
  modified_base (1239)..(1244): a, c, t, g, unknown or other
atagttcttttattaattggtctggtgtggtctcttattctatgtcattacataaattatgtgtctaaaactcctacacgaaaagccttccatattctatttaattcaacgattgttaatcaaatccataaatcgattagcacgagaaaaataagataagagaaaatgcgaagataatgtagaataaaaaacatgttaagcatgttccgtactcctctttttctatctaggcatgtatagttatgatatcaacgagtgtatttagtccaacaaagttgtctgttacttttgtcataataattaaaatttcccaccaataataataataataataataataataataccaattcattcatgaatatatttgttactcgttaccgatgcaaatttgccttttctttaaccatttctcaatgcaaccctttactttttctttgaccaattagtagtaattctatttttcttttttcttgacaaaagtagcaattccattttgtttggcacatttaacattgtatttgtattttacttcttgcgttaggtcaactatttaattaaaaagttgagaaacaggagaataataataataataatannnnnnnnnnnnnnnnnnnnnntaataataataataattatgaatatcatcaattatattcatataaataaaccattaaaaaaagagaagaaaaaaaaaaaactgatgattgcaattttctccatagagctatagcaggcttaatttagttttagtattaaattgtatgatgacagcactatattaatagataaagaccagatcaggatctgatatttctccaaaattaaaaaaaataaaaatgaatggttgtacagacagactagggtcacgtgatttacttgttttagggaaattagtcataattattccataatagagtattttgaatcattgtttaatttggatagcgataagattattcagtatgaggtggcaaccggcaaccacgccacatcatctccagtcaccaagctttgaacctgactagagtacacgcctcacatttcagtttcccttttccattttttcaaacaatacaaaagtgaattttcttcaaaaagaaagttcttttttgtttgtttttcttttttaccaaaacaataaataaagagaaatttacatggtatactaacttttgatatttttttacaggtagtatttttgacttttttactgtattttttttataagtttcatannnnnntatactgtgttaagttttcactgtgttctactagtgtttttttagttgttctagtattttataaaaacacagtacttttaaatttttgttcgtgtgacagtatttttgtaaaacttaactcaaattccaatatttttataaatttctctaaataaaaggttatatcaatatctatccacttcatagaacgcggcgatacgatttggaattcaattttggttggttgggaaatgtcatcttggaagagttactaaaataatccttaagtcaagttggatttttagcataaaaatgaagttgatgagtaataaataacattcaaaattatgattgcattaaacaataaataaataaatagagacatggtttggtaatattaataaaaaataaggatgaaatggtcattgaaagaagaagcctgtaatcgcaatttctgtcatattaaaaagtggagctgagtaaatggttgggttggcttgactaaatggttgctagctgacatttaatttaagcaattaagcttctgggccatatctcacctcagatgccaaagcacttagatcagttgatgcgtatgctttttttttttgaatagaaacatccatttttttttttaatagaaacatgcattttagttttattataaactttattattttatttttatataaaaaataaatatcatataagtttcaaataacaaacaattaatataataatttatatatatatgaaaatataaaaattgttaatttaaataataattaaaaaaagtaaatctaattaaattttatcaattttttttaatagaattcaattcaaatttgatttagacttgtatcatatttaaatttaaattctatccttttttaatttaaactctatcatattttgtgtaagttttaacaattaattttagtaaaacaataatgaaaaagaaaaaaatattaaataaataatttttgttggattacactttatatataaagattttaattttaattctatcgtattttttaatttaaattctattatattttttataatagtattagttttaatagttaactttaatgaaaaaaaatcttaaattaataattttggttaaat

SEQ ID NO: 48699 - DNA, 1252 bp, Cannabis sativa
gggcataaaacccaacagtaaccctatgtcgcaaattcacaataacaatcaaatatcatataacaatgccactatgctatactctatatgcttagttcactatcttacctgatttctaatgtatgaggagaaatctcgatctacatgtgattctgagcaagtgcccgtatccctagtcacaattcttgggtttcacacaataggttaatcccaaaatcatattttataatattaacatttaagactccaattctagtccaagtaataaagctcaaaaagatctttccaatgatataaagaacatccaaaacggagttcagagtcaaaagttatggtcaaaacaaaatcgggaaaattgggaaagctctctgccagacttggtcgcggcaaccataagtctagtcaagaccactgggtttgaaaaacccaaaaatctaattttaaaggtctgaaaatgcccaaactcaaacccaacttcacccaatttatcaaattagttcacaagtctataatagagcataataggtgccaactacatcaaaatactcatgcttaaaaatataaatatttgaactcaaatcacataattcaagctttgaaataccaaaatcatacaactcatgccaaaatatccaaaaacaacaaagtaaaaccttttactcaaaactcataaaattggcagcaaaattaactcctaaaacttgacctaacattcaaattaaatcaaaacaagtaacaagcttaaagttctcaaactcaaaacaagttcaacacacaaaacctaacctcaagatcataaatcaaggatacatgcaacaaaaacaaatcttcacacaactttcataactcaaattcagaatcaacacaaaataaatgaatagtttactatctcaatagttcttccaagctctaacaccaatcccccctcaaatcaagccaaatccaacacaaaatcaaaactttgccaggagaggttagagagaaagagaggtcggtggagaggttccaaaaccagaaaataaaaggtatttcactttctgtttcagacaacaaaatcactaaactcattttggtaaaattggtcaaatgaccattttgctcgtaaggcataaaatccacatattaaatcattcaagggaaatttagacatttctgaaattctgtattttaatatttccagtttaattatttaattaagtgattaattaaatgcggaataatgaaactagtactgaaaacagtttttccgtag

SEQ ID NO: 48700 - DNA, 1574 bp, Cannabis sativa
aaatagttacatttttaattttaaaattaagctttaaatttgtattttttggaattggatgaatctggttctcagttttcctttaacttattttgttttatttagttttttgtgttcagaacgaatcttggtcggaaaagtcggaaaagttgccctccgacgaagcttacacgccggaaaagagctggatatcaaggttaaagaggtaattttcgagattcaaaagaagctaaggaatggatgatgttaacagtgaagttcagagcaaaagtaagtcactgaatcatgtttcttggattccggtgacccctgcaaagccaaatttggttggagagaagccgatccatggccgtggatctattataccagatgaaatcacagaaaagagcaacttcaacaatttggaatctgatgataacattttggggcggttaccgaaagcccattttgacgaagaagctgcaaatcatggacaaattcctttcctagagctcatgaggaaagtagagtccggaaaaatggagttccgtgctccggcgcagccaaagaagagtgatggtgcagctggtagcaattctgttcttaattttgaaaagaaacagctcctccggtacaatttgggggcctccggcgacagctcttctgcgacatggcaaccgggagactatgagatcagttttggaggttggagatgcccccaaggtatgtggagctgaccaaacatgttttagtgtctggacttcttttcttcttctttgttttcgagtaatgatatgtgcaccaaaatatatagttacggactgcactttttcatatgggacccactctttaaaagaaaaggtgaaagtattgtcgtatctataatattttagtgcacatactttttttatatatataaaaaaagtagtggtatattacgagtagtgctcatatcactactcgtaatatttgcacgtttcgttactgtaatataatattttgtagtgcatatatcattacaatatattattgagggtagtgtaaatgtaactacacttaatacaaacgaactactgggattagaatagggaaggagattaagtgatgataacataaagatatgactgcgagcagaacaaatgtatgttagaagacagtaaaatactgaaaaggaaagagcataggatggccaattacagaccagatatttcatctgttgcttaatattatcacaattcacaattcattagcttgtgaagtatctgacttttttgttcaagctttgcaaatcatattacttgaagacatgatttactatttattagagaaaacaccatactcttacaagaactataaggatagtgtgaattcagattagttgcagcagctaagtaagatgaataactagtgtaagaaaagtggcagagcagtagtattgacaggtgatattgttatgatcattagaataaatcataggatcacccatcacagaatcatgtaggacatttcatcttaacttattagtttttgaagcatttgatgttttttctatatttgcaaatcatattattttataggggacacaaattctgtag

SEQ ID NO: 48701 - DNA, 1083 bp, Cannabis sativa
  modified_base (691)..(696): a, c, t, g, unknown or other
aaattaatgaatctttgtcggttaaaatatcaaatatttagtaattatactgctaatataattgttctaaatacaatccaaaaaaatttgaaaggataattgaataatattataattgtttgtctaaaaatcccaataaaaagtttaaatatatgtcagcttattaaaatgtgataaaatttttaaatataaatttaatcatgaggttttttttttttctaaatatatattcatatttatatatagataagctttttattactcttaattaggtattaattttgatagtaaatgtataatagttagtagatatgtgtcatattctaagcaaaatgtttctattcttttgcccccacaaatagagtaaatggggcaaatagacaaaattgcacttttattaatttaaaaaactttacccacaaaaaaaaaaaaaattaatgaatcggttaaaatatcaaatatttggtaattatattgctaatataattatttaaaatacaatctaaaaaattttgaataaaaaaagtaaatagtattataattgcttgtccaaaaatattagcccaaccaatcttgctcaataatcaactcaaaaatttaaatgtatgtcaacttattaaaatgtgattgtaaaattttttaaatacaaatttaaccaagaggtttcctcaaaaaaaaaaaaaatatatannnnnntatatatatatttatatataggagaattacttatgctataggaaagtaaattgaactaatcaaacattataaaaaatagagtatacagaattttttgtgaaacaagtgtaggagattttttcattaattgatattttactttatttgctttatttaattgatgtttaattccaccattcatctctattgaggaaaatagatgaaatcatctcctccttggaacactcaaacccatataagtaaacacatgtacagtgaatgttttgattggaataaacaaatggatttaactagttaaactggtttttgctagctctttgtttgcctcacttactcaagacataagtgccatatcatagatttatttatgagacatatatatcaaaa

SEQ ID NO: 48702 - DNA, 1262 bp, Cannabis sativa
atatatatatatgaaagcacttatgaatgactattaaatatatatatatatatatatatatatatgaaagcacttatacttaatttagctatttaattaaaaaaatatcaaaaaaatatatttttttacactatattaaaaatatatttatataaaatatatttaagtcaaactctactaattttattttttccttttgtggaaaaataatttttttttttttcagctgatgaaacaacctcaacctatatattgtaaaaataagaataattctatttagatcgaaaaattaagtataaaatttcaatttgttctaatactacccattcataatacccattaaaaatgcacttatgtatatgtatggacatctttatttttggacttacagaaattataattaatttttgtatatgactgtgtatattagacttttttttgattaagagtcgccaaagcgagaacaaacaagccccactaaacagggacgaaacaaggagcaaacgcccaaaagagaaaacaaacaagcagacaacaagaagtctaaaccgaaagaaacacagctaagtagtaaaagaaaagaagaaaaaaactaagttaacgagtagccatccgcatcccagggatacagggagccaccaaaattggccaaatcgaagcacccaaacactctgtttcgatttgcccagcgagccgcgtcatgggccacaccattaaaattcctttggatccaatgagcctcccacagattaagagaggccactgcacaatgaaatctttcaagaagactttgtatattgtgatgctgagttcttctggaggatcggttgctctggattgcttcaattgcattcatggagtcactttggaatatgacattgttatatcccaaagaactcgctaattcggctcctttcactagagcaaacacttcccctgcaagagagtctatgtagtagcattgaaaggtgtggatcttaatcgtttggcctttgtcattcctaatgattgctgcccctgccgaatcattgtttcccagagaaatatctgtattacacattagctagccaggaggaggaggaacccagcataactggctattgcagaagccatcttgcacggcagtaagctccagtagtcgacggttgatgcggttgatcgcgaccggtaacgggtcttgaatatgatcatgagtgaacttattcctgattctccaaatttcttcaaaaatagcagcagcccctcccaagaaaaggtgtaag

SEQ ID NO: 48703 - DNA, 1035 bp, Cannabis sativa
tattattatatagtatacttgttttgtcctgtgcaggtattttctgacaagttggcgcggtatagttacaattgggtattttgggcagaaccgggtttggcacccaaaatacatttttcgagatttaaaatttggcattattggataagtatgaaaacctgaaaatattgagttttatatgtgtgattttaaatgactctgttgtccttgttttcatatttgtaatatattggtcttgagggtattttggtcatttgaccaattattctttttcaacaaaaactaatttttggaaaattagaacccatttttttggttgcttccacccctagccgaccccccttactccccctttctatttgctttttattttcaacaatcttgatatcaagcttgaattagtgtaattcgtggcttgggacttgtgtgtttgtggtaagctcttaatcctcctttgtttggattgtcaatttctgatatttgaatgttcttggagttgtgtttagtgttcatacttgatgaaatgcatgtggttgagaaatgctcaatttttggtatttttgactagattaatgttagtagattcatgctaggaacttttatgatgatattgattattttgattggttaaagtgtgatttgatgctttaatttctagggttaagttctgaaatttctaggcaaatattattaatttaaatgctttgataattgatgttcaacttggtgattatggtgagattgcatgatatttccttttttttttgtatctttggtatcaaagttagtttggtttattttgatttaaaatgtatgtttatgaatggtttttgttgagttttgggtaaggttttgttgaggttcgaataaatggtaaagtgggcatttttataccttaaaatctggttttttggttttttcgaacccagtggccgcggccaaaaccccgtagagagccatccattttctcaattttgttttggccatagcttttgactcgggactccgttttggacgttctttatatcgttggaa

SEQ ID NO: 48704 - DNA, 939 bp, Cannabis sativa
ggtggcgagcaggcccttgtgccaacgtcatgcgctaccaaggtgaatggtttcatctttcgtgaagacttcctgaaagtccttccattcccatacataacctaacattctattataagaaaagttgaacattgcaagtttcgaaggaaataaggacgaagacatgaaaccaacctttcaccaatgatggtaacacctagttacgcaagggggttggcaacatacccactattacaaattgtatttttggtatcgattttaaattgacacttatacttatagtttcggttcatagatgcgacacctatttcacctagacaaaaagttaaatttttagtgcccgttgtaaaaccaacacttattagttttggtattgtttaaaaatcaacacttaaattgtacatatatatatatttccttggtttaatgacacagtacttaataatattatataatattattttgtaagttttagtttttaaatccaaatatattaataatgttgtatattattattttaaaataattaataaatgaaatttaactagcaaaattgtattattttttagtgatcataataactaaaaaataactaatgttaatttatatattcagttagttttgctaaaaatagaatttacataaaataattcttaacacccatagaaaaaagaataatttaaaaacccaaaaaatacatcaaaaattttgaactaaaatattcaatttaatcacaggataaattaatggatattaacattgttaaaaactaaaacccaatttagttcaagcttataaaaaaatcaaagtagttacaaatcattattttagatttcttatgcccgttgaacacgtataagcctcaacccacttcaatcacgaactagtatctcgtaaactaccaagcattgtcaaacggctaagatccacacgagcttc

SEQ ID NO: 48705 - DNA, 710 bp, Cannabis sativa
ccatctatatataacttctaagaaggtctagtgtccccctgcgctgcagtctcaagtgtgtggacttggtattcacatatcatgggatcatcttcatcggggctagcgcattaagaaatgaagtatgctaatgcctatcctttgattgttgttcgaggctggtaggtgatctcaaattgacctagttcaactgcctacttgagtaggtgccctgatgcttttggcttcatcaaaacttgcttaagtggttggtcggtgagcaccttcattgtgtgggcatggaagtacggccttagtttattgggggcctggaccaagtagtaggctagcttctcaatggggggataccttgactcagccccaatgagatgcttgctgatgtagtagacagaatgttgtactccttcttccttacccactagagtagtagtggttgcatgctcggtgatgaccaagatgtatatttcttcaccatctataggctttgataggatatgtggcttggctagatgatgcttgagagcttagaaggattatttgcatttttcagtccattcaaaccccttgttgcttcccgttagtaaattaaagaagggaacacacttgtctattgacttagagacgaacctgctaagtgcaaaaatttgtcatgtgaggcgttgcacatcttttatctacgacagtggcttcatgtcttgcaaggccttgat

SEQ ID NO: 48706 - DNA, 1061 bp, Cannabis sativa
cttctttttcttattccacccatgaaatgccttcccacatttattgactttacaacgaaacaaggcaggccgccctctgccactgctatctttccaaacccgatcaacaatctccacacactcttcttcttgacaccacgcttcttcaaagtggaatcgagttttacgtttagttttaccacactttgcgccatccactcgcaccggcatatcaacaactaaggcgcgatgattcgattcccaccaatcaagaagggaaatgtccgccccatcaaactgactcaaccattcctccgtacataaccctctatccaatcgctccatgatcctagagttactatgctcattacaccaagtcagctcatgcttaaaggagctaaaatcgattggcttacaatcgtcaatgacttccttaaaaccatccatagcccctggtaatctatcacgaccaccaactttttcagataaactcataatttcattaaaatctccaatacacaaccacggcccccaaatttccttccttaaatctctcagaagttgccacgaaaatcgtcgttgactagtgtcaggattaccatagaaacccgtaaaataccacggcgagaacccaactccaaccactgttgcaaggatatgcccaggcgaactagacataactttcaaagagatatcatctttccacattaataacagccctccactcaaacccactctatccaccgtccacaaattttcataattcagaacactacaaacacgctcagcttggtcccaggataacttactttcggctagaaaaataatatccggaccaatatcacgcacatgggattgtaaggcacgtaatgtccaagggttcccaatcccttgaacattccaacttaagagtttcattgtgaacggcggccttgatcatcaaggctcgccgcttcagactcaacacaagaagcaggtaaatccatagaactagaaacacctacctcatactcagaatcaacaactatgtctccctccattggcgccgcagtacccgtcgtgaataagatcgcaccatctgc

SEQ ID NO: 48707 - DNA, 3394 bp, Cannabis sativa
  modified_base (1806)..(1817): a, c, t, g, unknown or other
ccccttatggatcacgggactacttactgtcacacacagtacctagggcctagaatgccgaccacctccacagatactatcaatagttaaagaaaaaattttatattctgttaaataatatgtgatggacaaatatgtgtgatatcttatgcaagtttcaagctaagtgacttaaaaatttcttttcatatcagttagggggtattaggcataatatatgggaaaaaaataggacgaatataagaaaataaaaggaaaaacaaactcaaaagttatataagttgttcaaaagataaatagtagaaagcctggggtcgggccataaaaagtttcctcttaaagaaagcataattgtcttataagtaggggaaaggaaccagcttgaagccagatacgaagaatggtccaagaggattggtgtaggaggaccagaacccatccgggactgacccaagaaatgactaaggtttgaaaaaaaaaatcgcattataacccaatcgtgaatggggcattcgaaacctatgtaattgactgtcaaattccactagccttaggccagcataatcttgaacagaagggacgtgatgaataatatatggggacttacaagttctggaagtgctggcaccagggggcccagagttgggaaccggggaaggaaacttaggacgaataggggtttgctccttcctaacttcctcctgaagaatcctccctgaggcggcctacgcattggtataggccagctcatgttccttcttgcatttatacttgttaaatttatcttcctcataagagataatgtcccctcggagcgccttctcagtctcaagagttcagacgtgtgggaaaagaaccttggtaaattgaattcatccaccgattggctctccaagatcaacttggccctccgacagttggctatcgtgaccagatctcccacgtttaactcatccttgttataacaagcaaatacttttgcattgtttaaaaagagttcggtgggggcggtacggtgcatgggtggaaacctgacccatttagtgagcagatccaaacgctcaaaagctttaaaaccggaggagaagaaaaatcagtgatgatattcttttacatttttctaaaaattaaaaggcaccagaccctcattggcagggtgagcctggagtttgtaaaacaatctttaaacttgtccccctttttggggaccgacaggagttcgtagaaatataaaatctcagccggactgggcaaggcccaattcctggcgacataaaaaatgtacaagcctgagagcaggtggtaggtttgggaataagttgataaggcgcaaggccaacaaaaaccagaaaatctaaaaaatagtcttgagtgggagcatggctctgagcatcaggtgggtctgactccatctctcggaaggcgatgaaaaaccccagtagtggcaggtttgatcccagcaacagtgatgattttctcaaattgatgggcacaggacagggtcgagtgcaattcatctgcctcccagccattggaacgacaggtgaacttcttatataccatcgggcccttcatcacttcttccaaggtggccagtttcttaggccccttctttgaagatttcgatctggttgaagtgggggtagacatagcgtgaacttggtgaagttcttagatttcttggtcgaagccgaagaaactgttgtcgtgaaggtcgtggagaacttcactcacctgaaaaaggaaatccagcagttagcacccaaaccaaaccctaagatagaaaaggggaatgggggtcccctnnnnnnnnnnnngaggccccctccggatgcttgccaaatatagggaatccagagattctcctaggcaaacatcaggtgcaaaacatccaaaaaaaacaaaaataaatgggaaaagaagaagaataggagagtgtggaagtcacttcaaacaatcgatggcaaacaaacaagaaaatcatttactagccccaaagaaaaacaacagtaagcatgcaaataaaacaacatatgacagtggtcatctgacgccccctttttggggaggcaccaccatggcctccgccataaccactgtatcacagaaatcaagcgtagctaaatgagaatgtcaccattcttatttttccctaacatgcagaaaaagcaaagaaaatgtgtacagagggttacacaaagatgataagcaagaagttgatggcatccggtgataaagtttggtctggcaacggcgaaggagcagcagtaggaagtcagaggtttctaaaaattttcaaatgtgttggttgggttgaaaattgcaaaatggttaaagtaacccaacaaaggaaaagtgttggcttttataggccaaaaagggtgcaaggcagctgtgatcagacaccatcgtacggtgagaatttgtagcaattcgaattctgtgatccaacagatggggtgaataggtgtgaagaggcgaaaggacggtcgaaacacttgagtacctctctgacatcaacattaatgcaaaaatttatcaatggacgagaaatgaatcattgcctgcaaaaggaaaaaaacatcaatgatgacgatcataaatgtgacccaagcgccagaggcacgtgtcactatatttattaaggataggaggctgcatacaagtctcatttacctgttactaaataagacttggggggtaaatgttgccccaggtttttcccaaaatacgtggccccgatcacgtattacacgtggaccaaaaggacacctcacccaagaattagcggaggcatattcaaacggacaagtgaagtcaagatgtgagcccccggagaagtgcaataggcatgtgtttcctctccaggacagacatataataaagcatctccgggaggacgagggtatactcgaacaatcaccccgcatttaatgcagcatgggaaaaatgtcttggaatgcccataagaggatttagacaacataagcctcgtttacggcaattacacagtaatcaaagggactagtgacgactccattatgaagaatcacatcaatcaaagaaggataaagattaatctcacctaatccctatgatacctacggcataggttatgcataccctattttgtatctcttgggaacttgtgctcatacattactggcactcaaagacaagtgatccctttttgaactatccttacgcatctctataaatacccttgaacaacataggaaaggggatcggaaaaaagagagggagagaacaactcaccaagaacattctctgtataagaactctaattaataacacagactcatggactactgctcattaatgcccaaaatacgtaaaaatcacctgcataaattattccaaggctctcctcatt

SEQ ID NO: 48708 - DNA, 2103 bp, Cannabis sativa
attgaactcagggtattatttgtaccttttaaaaaaatacaaggtctgaattgtcaattaacaaaacagaaattttgattgttatttttgcaaaacacagagtccaaaatagtaaaatactgtactaagcaaatgattatgaaagatcaaacaaaactacatgtaattgctactccaaacaacttggttagatttttgggtaaacaaaacaaaacaatcataaaatcactcaccctccacttaagaagaatcgtccgagggtagcaaatacaagccgagagcgaatcccgggatgaacaaagtagagaaattgaagcctgtctttgaaatcagaaggaaggtcttcataaatccacctcaagatagtaatcccaggggaattatcatctttctgaacagtactatgcatgtacacaatggagaatggcccttcacccaattcactgcataatttatgaacaatatacctcttcaaacgctctgcactcacaattggagctgcaaacaaaaaacacagccagtaatcaatcctatcagaatggtttaaaagttcataatattaaaataacaaacacttctttcagtgaaatcttcttccaccattcacattgttctgaataacatatcaataattgttctggttattagtaccaaagttcataaatttatgttggtaagttgaattttgctcttcccaaatgggaaatttaccaaatgaacaacatgaaaaatgcaaaattagcaaaataaccacattgaattcagtataaatttaaggtcgcaaaacgatcatattggtctttttatggtcacatagtgtaatttttgatgaccaaacatggtttaaaagttcataatataaaaatcacttctttcagtgaaatctagatccaccatcacattgttctgaataacatatcaataattgttctggttatcaacaaagtacacaaatttatgatggtaagttagaatttttctcttcccaaaaaccaaaattgccaaactaacaacataaaaatgctaaattagcaaaataacaacattgaattcagtatcaatttacagttgcaaaacaatcataacagtctcatttttggtcgattttgctaataaaattttaaaaattctccacatttcatacaaaaattaggaaatatcagctgaaaagttttcctccaatttcaaaaaattaaaagcaaaaataaaaaaaaaaacaaaaatactgaaatcaacaaaaccctcgtagtcatatcaaaattcgtttcggatgacttaccgggaaagtactttccaactatgcgaacaattcgattgccggacttatccaaaccctggataagaaagaactgcaaaagttcaaggtccgagaaatcctcatcggagaggtactgagggcagtcgtgccagttttcttgatgttcgatctcttcgtcttggttctcgaggaagggtcttgcatccattcccagatccgaagcgagtacgaaaacggagaaatcgtcggatgaagatgaagtcgccattgctgactgtgagataaccaaacgagaatatatgagagtgtaaatgtatttggacacgtggcgaatatttatagagtaatttgtagggtaaataggttacaaaaagagcattgctttcacgtggttactagtactttctcgacatgtgtgattgactaataatattttttaaaagctattatgttaaattatatgagactcgatacttagttggatcaataatgataccgacacgtaggagggtgctaggcactactagtgctctttagcatttctcttacgaaaattactccaactactattgatgtacgatccatactagatctgaccaactgcccatcctacctcctctacgttcttgacagcccatctttgtctcagtagagtttttcagtgacaagtttcggtcttcttcctcattacttagaaaaagtgagctaccagttcaggtacaagatactatcattacaatctggacaattagacacccaacccgttgtgcactcacttaaaagggataaatcgatacatctttatctattttaatattgcaaaataattttttaatcaaaatttt

SEQ ID NO: 48709 - DNA, 1336 bp, Cannabis sativa
gttggtgtagctgtcgcaccaggaggtggagatgctgccgctgcggcgccggaggagaagacggagtttgatgtggtgattgaagacgtacctagcaatgctagaatttcggtgattaaagccgtgagagcattgacgagcttggctctcaaagaggctaaggagctaattgagggtttaccgaagaagttcaaggaaggagctacgaaggatgaggctgaagaagccaagaagcagcttgaggaggctggagctaaggtttccattgtttaatctccattgggaatggtaaatgagttaaattagcttcgatttttttttctttttctcttttgggaggggacaaaaatggttattagatgtaaactccgttgatgttgttgtttttgttagtttttttcttcctcttttatataattttttcttggtacagtgatatgctatcgtccctttaaactgcagcaatgtaatttgggaattctgaaatttgggttcatttgtgtcaaaatttataacttttgttactatgaattatgaccggaaaaatgtagttggtttgtatcttttaaaaaggaaaaaaaaaaaattgataattggagttgaaaagggaagataaggaagatagccagagagattctatcagtttaaaattttagcatatagactattgtacattgtaagccctcaattggtcaagttttaagattaaatgttgggattaatcaacaccatccctacacctactcaacatgaacattacatcatcaaggtcctaatttaccttagcattcaattaaacaatcatgacatactcaatcacacataaacatttgaattccaatcttgaaacacattgaattgaaaaaaccatcgaaccaatttgcatacaaaccaattcggattagcaattcaaacatgagcaaacaaagtaatcacaataaagaaatataaacaacaatgcagaaagttaaagagattaaacaaagagtttttcccaaggttccccttaagaattaaaattacatcccgagcttacgattggaatcggttcgcccttgcactatctcaaatcttggattacaacaatgttgtatgagatttcaagtcacaagttgactagtaatcttcttgatgtcactttccctctttactgttttctccttctctcaaactctgttcaatttcacccattattcgtgaacatattgaacaaatataatagaaaagtaaagattttaaataccggtaccgtacttcaagtaggcgatggtattgctcgtatttatggtcttgatgaagtaatgataggtgaattagtagaatttgaagagggtac

SEQ ID NO: 48710 - DNA, 1148 bp, Cannabis sativa
  modified_base (757)..(759): a, c, t, g, unknown or other
tacaattatatacatagttatctaatacacattatttcttaatttaatataatattaattaagtaattttttatatttaattatgtggtcattgtcacatattttgagcttattcatcattgacaataatataatatatatatatttataattaataaaaatagccaacttatttatttactttttgaaagtgcaaatattttcaatccacaaaagaataatctgtattgtatagaaataattgtgtttttttaacttatataatgtgacatatatgttaatgataatacaatacattcattaaaaattaatattatacagtaaattactaaaacatcccaattctttaacttagagtaggcctatgactgattttttttaaaaaaaactactgtgagatgtatttattttttgaaacagtgtcagatgtacctaatttgtagaagtttaacattatatatgttaataataaaatattttgagcgtgagccaacccgcggccaggagggttggaatcggttgcctataatatatattgtatgtacaatatacagtatataaaatatactatatatacatataatatactgtaaataacaatttaaaatcaaaacttacacatatttctaaatataatatactgtataaatattatatatattatatataaacatacaacacatatatacatattatatataaacaaagtcatatacttataatttacactatcaaccatacacacacatatatatannnatatatatatataaattcatataccaattacaaaatttttcacaacacaaaaaataaaataccaacagaaaactaaaaacaccaacctcttaattttcgatataaattttgattcctcctccaacgttccaaatctccgttagtatccagccaatcgtacccaacacttaaaccaaagacaataaaaaaataattacaaaataaatttaaaatagagataattaataacaaaaaaataatattataaaagaaaacattaactatgcaatggtggttcacggcgatgcaatcccagcaaaaaatggaaaaatggccgaagatagaggaggagaagagagaggagcggtggaatcgggggggggagatttgggggagaaatgaaaaatgat

SEQ ID NO: 48711 - DNA, 1461 bp, Cannabis sativa
tcttccattgttataaaatctctaacagataatactagtatctaatagcaatgctcattttatattaaattagaggaaaaaaaaaattaaatacacttgtcagaattcatatcttcttaattttttttgcttcattaatttctttggaataaattctacaaatattttaaatcataactcacgtaggtcctcaatattagagaacgataattaagtgtcatgggtgcaatataacataaaatgataaagtatagaaggaattgaataactaataattatctgttaaacattattttcttattgttacacatcacacaattaaagatgtagtaataattttttaattaattttttattcttttaattaaaaaagtaaaaatatattttataaaattatttttactttttaatttttttaattaaaaattaaaattttaaaaaatttgaaaataaaaaaaaattacttttaaaattttttaaatatttttttaattaatattttagattccaatctcaatttggactttaggacccgaatttcgccttcagccctagtcctaaacacagaccacaattatggccccagacccgaccttagacctaactaaaagaaaattaaaaataaaaattatagaacacacttttattttttatttttcaaattaaaaatgaaaaattattatagaatatatttttattttttaaaaacacaaattatcaaaatataaattttacatttatttttgtaataaaaaataaaaatattaataaacgctctataaataatttattatttaaattctattactatagtgtgtgtgttgatgatgaattgaataataacattaacatgaattcaggtaaggattcatttatatggattggaccgacgccaagagtaaacatcacaaacccacaactcttgaaagatattttgacaaaattggatgattttccaaaaccacgtgtcaatccacttgtacttttgctagctactggtctagcaaattatgagggtgataaatgggtcaaacatcgaaggttgatcaatcaagctttccacatggagaagttaaaggtatatatatttagtcacaaaccaatttgctttttgaaaattcaagagattgattgctctactatacccttgtctttttcgcatttagagaaaaaaataattatccatttttttttatcaatgtataccttgtatttaaaattacttttaaattttaaaaattttgaattattattatatatcaaaaataaaattaaaataattacttacgagtacgtgtagtaaaatatttaaattttattttaataattttctaaaatttacaaataattttaaataactgtaatgtaaacaattattaattagaataaaaaattattctgaatatcaaaaacagataaaaatatctacagaaacaattttttaatggtgtactatagaca

SEQ ID NO: 48712 - DNA, 1131 bp, Cannabis sativa
ctagctctggaagaatctatattttgagagatgttttatttgatgaatttcaatttccctttgctactgtttccactaaccaatttgtgccttcctcttctcattctgttgtcccttcatccattattcgcaccactggcaatgtcactaatcaccccactactgctgctgcaacttctgaggcatcgaacacttccaccagcatatctgttcctgctgctgctgcctctaatgttgcacctgtcactgcttccatttctccatctcaaagcacttctgctattgaccctggcccaacagattctacacaacaacagcccttggttcctgatatcccagcacccacgactgccattccttcatcagctccagttaataatcacccaatggtaactcgcgctaaggttggtacttataaaccaaaggtactcatggtttccaaggagcctctaagtatggcagctgctcttaagtctcctcattggaatggtgcaatgcatgatgagatcagtgcacttaaaaagaatggcacttatgtacttgtgccactacctgctgacagaaaacccataaggtgcaaatgggtttatagagagaaagaggacaaggatggatctgtcattaagtacaaagcaaggcttgttgctaaaggtttcctacaagaatatggttatgactacactgaaacctttagccctgtcatcaatccaactaccataagagtaatcttgacaattgctttgacaaacaagtggccaattcgacaattggatgttaacaatgcctttctaaatggagacctaacagaagaagtctacatgattcaacctcctggttttgtggacaaagagcatcctacctatgtttgtaagttacaaaaggcattgtatgggctcaaacaggctccaagagcctggtttgacaaattaagggctgctcttaccaagtttgggtttctttctgccaaatttgatcagtctctcttcctaagacttacatcatctcatacaaccttcatcttggtttatgtagatgacattattattactagcagttctccctctgaggtttcccttcttatttcaaacttgaatgccctatttgcacttaaagatctcaggccattggatt

SEQ ID NO: 48713 - DNA, 903 bp, Cannabis sativa
acaaaatttaaacatcccataatctgccgagtacctgtccatatacatatcgtatgttatatcttcacttcttaaatttcacaaatctactaaagttctaatatcaaaaacagtttaccaaaatttggctctattatcagctggaacatagtagagagtctcagctggcacaccacattcaccaccagaatcagtagtatcccaaaacgaccctgaattcggccaatcacgttcatgattaccactgcaagattatatttacaaattacatcactaaccaatgtgtgtataaattcttgatttgacacgtataaatggaaattatgaacatgtaattgagagcatatatatatatatgttgtgtatatattttgttaccacaaactaacctagcaatcatatatggcacggctgaagaaatgggtgagacttgtgctatgaattggtcccactcagaaaggtacccatcagcatatgccatatcaccaatatggaaaagtatgtcatagttcttaaggtctcttatgagttggtctgtggtgttaagtgagcctggctgggtgtttgcatactcattcgacccatctcgttcagcctaaaataaacatttggagacttaattcataattagctttttacaccctttagtgactgttgaccatgagactaaaagtttactccatttcaaaagtcattcctctcataaattcatattctatagtattaatttataaatactatcagaatgtgttcgttttaagtaaaataaattaactcattattgctattattattggactcacaatgataaaataagtgaattaattttactaaatactcaaattacatacctttcccatgtcacccattataataactcgttgtaaagagtcttgtccagga

SEQ ID NO: 48714 - DNA, 923 bp, Cannabis sativa
ggttatgcattttatcacgcgttgtaattgtatgaaacgtgaggattattcgcgttttatgaataattattaagataaatctaaacgaaattactaccatgagagaaatcctataaacaaaggggttaatcactatgtagaggagggccgattttcgatctagtaattactttgaaagaaatgtgattctttgtatttcttttcattaacaaaatatcagaaataagaaagaatcgtggactatgtaaatttaactacaaaaccacgtaaatatcttgtgtttattattatattattgattatttttcaaaaactttattgaaattattcaatttaattcataaaaaaatatctcatttattgtttaacgatttaacacttatctttttttttttttttttagtttttcttcttatttatttattagcaaatatataatagttgtagaagactataagaatatatattaattttttttgtgctattatttttttttcataaatttttgttagttatagttatttttttaaaatttttgtatattaataaataatagtggagaaaattacataaacttatattaagaggacaactactaatgacatgaagttcaataatcaaatcagattatacataatttttttaataactatttaaaaataataaataaaagtaaagtatataatcataatttagaaattttaacggggattaggtgcataatgccctccacaggtttatattgtaacacttaaacctaatatttttgttgtacgatctttggcaatgccatgtcacccataatttgtcctattccggtatttactaagggaaatttgaaattttatactcacatatacttaatattttttttcctaaactaatacttttctacattgaaaatatatgacaacttttccaaa

SEQ ID NO: 48715 - DNA, 2440 bp, Cannabis sativa
taattaataaataagttaaatgataattttatttgataattaattatagttatttaataaatagatttgacatatatataggattaaaattgaaaatataacatcagtgaaagaaaacataaattgttaaataaaatgacaaaactgtaactagtgtgttccactaagtgaggtcggccacttaagctatttttagctatttttttatctttttttattctatataatttaaatcctaaaccctagataaaatactataaaaagaataagatggctctcattcttataactctaataacctagttttctaactttgtcagataattgaaaattgagaacctccttctattgatttcgaaatacatctccctctctctctctctctctcttcatcaattttgaaccctagtgaagagtacatgcccacttaatcatagtgtggaagattgtgaagaattccaacacctgaaggagatccagcttcagatcttgttattactctgctacagcacgaaacaagagttagaaatcttaattgaaggagccataatattatgctgtcaccaatgtaaggttttttagaactatatatgtgtttattttattgttttaggaaattcatgtttagattgttagattatagaatataatctagcatacttgtttgtaaatctagatcctgataaaataagttctaacaattggtatcagagccatggtaatgatttactttaatgaaatatgggtttaaaatgataaatgtataatttagatgtgattcatgttgatctatgtgtttatttgatgattgattgatgtttacgaaatttttatgaaaaataatttgatttacaatctggaattgttttaatttgatagtatagaaaaaattaagcaatttacttttttacaaaactaaattttgatataattgaattacttatgaatttttgaaaatttggaaaaaaaatcgagatgaaaaacatcccctacgtgtgcgcacaccatgaggaactcggtcagacacgctttcggataaatcatgtccgagtttccttggtcatgccctatccgaacccctctccttgcacgtggaaatgctgcatgtagcattattttttagccaagccttagtcatcccccatgcatgcatattgtccgagccaaatgcaaaaaatttccattttttcattttttcataatttttcttagaatttaattttatttttaaggtaaattttttatgtagaattttgttttttaaatctcaaatctaattatcagtttaaaattaattattatttaattaattaattttagatattagtatattttgaacaaaggataaattttacaatgtttgcttaatttgttattcattttttaaaaattagattatttgttatcttatttttaaatctaaggtcagatattttatattttgttcatttaaataatttttataaaatgaccttatttaaaatttaaaaatataatatactttaaataaaataatctagataactttaaaaactaaccaaatattatcaatttttcaaatatttgttattaaatttaaatttaaattatgggattagaaaaataataattatttatattttatcttattagatatttatttttatatttttaaaataacataaatttaagaagttagttgataattttgaaaagatatttaggttgttacaattctaaatttcaaattataggtttaattttaaattttaatttcgaaataaatatttatttgatttaagctttatgaaattaattaattaattattttaattaaataaattctataaccaagtatcatatattgttacatgtttgtttgattattatttattgaatttttttttataaacttattatttattaaatctaaattgctatgattaacttgttgatagatccaatgatctaatgttaatcatagtctaattatcaatagatcaaataaataatttgtaacatgtaaattttgtaatcttctttcatctgtgtataaacctagtaacatgataggatccatctaaattattgtatatatttgagcgtatatgtttacttttgggcctagatgcgtatagggagctcatttaattttaataattaaaatagactaggttgctaaaataaaaagattattttgatagttttatttaggtgtaattagtattggacttattcaattaataacaattgtttaattaaggttaaattcctctcttttgggtcttttgtgagaattagggggtcattagtagtgggtacaaaatactgaacccagcgctcgctcacatgaatatccctaactgttaaggcctatttaccttatttaaataattgtattaggctaattatattagtttaaactaattaaaatttattagcaacataattaattttcaaa

SEQ ID NO: 48716 - DNA, 1909 bp, Cannabis sativa
aaactcaggttaaagtggagcctacagatggtttactttatggctctaacacatttccgtttatgtttgagaatggggatatgctggtgcttctctcgtggtcttctgggtttttgtgtcaaggttttggcttttaactcgatccatttttgggtccaaattcactccctgccccatgactacttctccagagtcaatgctaacttgttggggactttgacgggtaaagttgtgtctattgaactggacgaatcaaagcctctcacttggaagagatggattcgggtccagggtggaggtggatgttagcaagccactgtgttgtggttgttttttcaaactttccaatgaagttaaccagtggattcaactcaaatatgaggaattgggaaacttttgttatatgtgtggcttgttggggcaccaaaggagggactgcaatcttacctctccggtcatggtgctgaatgacaaaggttccccttttccgttgttcagaccgtggatgaatacccactcattctatgccaactgcttctttggtaagagtggaacctcacctgctatgaacgaagggaacaagatagtggcgattagagacggcctgaaaccagttggagtagtgcgttagtcaccggtgacagagatggttgcaaaggacctgcctgttactgctactccgattatgagaaaggggatctcgagatctttgcggggctagccttcaaggggacgaggtggtacccatgttctaagggcgtggcaaccgagatcatctgctgcaacggagggagttggtgcttatttgggtgttgtttcactttcaccccacctggagttagaaaagccgtctgcccctttatccattacaaaagataatttgaatggtaatgggggaggtgagtatatgggtatccgtgtgagtgagggtttgaattgtgtggtcaacgcgtgggctttgactggggctgtgggccagctggatggagtgtgtagtgggccgaattatggtaacaagaatagtaaggattatgggcctttttttaagaattgtgaaattccaagtgggccgagaattgatcttaccaacattaacactcagattttttctgagaataaaaatgatatgggaggcagtgggccgaatgacatcaatattggagataaaatagtgtgataaactcagatggtgaaggtgattcgaaattgtctattataggccaagatcattccgatcatattgatgagaagaggtccctatcaaaattttttcaagctcaagaaggttatcttcaagaactggctgctttcgcatcacaaggaccaattaagagaaaagcgggtcattgtgacattggtgttccaccatcttcagagactaatgaaagaaccacctcagttaaaaagagacggctagacgttgataatcattcgttgaaaattgtacctaaatggaccatgagaagagtgaaaagtgtggttcgggatttccctcgtggtgttggtccaagcagcatcaatccagttgtgtctgggaagcacgatggatttggtgaatcggatgagccgtctatggatgatgagagcacctcagtgtccaccaataatctctctgctagatgctcacagcatgttgataaaccagtctttactagccaatccaagagactcacgacctggaagaggaaagctagactggctgatattgctatcccgaagaagaatcatgttctcattgatgatttgggctctgctgtaggcgctcctattgacattgttacccctgtggaggaggtggaaaaccctcatccacaggagcaatgagaggcattacttggaactgtagagggttggggcagacctctacagttctagaagttaaagccctagttcggtcgtgctcgcctga

SEQ ID NO: 48717 - DNA, 1307 bp, Cannabis sativa
atatatatatatatattatggaagtatgctagtcaaaattgagattaataagaattgccatcctgtgaagtgattgaagaactttatagactttgtgccaagttctagtggagaggtgataatgataacaaaaaatctattggtgcacttgggagagattttgttagcataagtctaatggcggtatgggattttgggacgtttttgtgtttaataaagttttattggtcaaacaagcttggaagttatattctattccgaagtctcttgctactaaaattagaaagaaatctatttcccggatcgaaattttctaaatgcagaagacttccacatactcttctctttggaagagtattctttggggtaggaaactttttgtgaaaggcggtaggtggcttattggtgatggtactaccgtgaatataagcgctctcttattcatttcatccctaaccttttgtctatatggtgagtgatcttaaattctctaatagggattggagagcttattgatgaattatttttcgtgaataaaactcgctagattttatcgttacctcgatctcaacaatagcttgattagttgatttggcattataacttttgaggtgggtacactatgaagagtggctactggaatgctaatagactcttgggaagagaagaatatgacaaaaagataaaaaattgtcaggacaaaaagacaaaaattaaataaattagaaaaaggcaaaaattgtcaggacaaaagacacattccttgtcttacgggagacgagggaggcgccacctacaggtgtcccactagttttgtctttttaggttaattaattaatttattaattctaaagataaatatttatttaaatttgaatttaaaaagtaattatagatattttcttatagttgatatattctcttgaaagattaccacaagtagttgagagattctatcattcggttataggaaataaatatttataacataatcggttttattaattattcaaatatttaaatatgatttaattaatagatttgaaattaaaataaattttttattgatttttatttatatatatcgtataaaccaaatttaggatataacaaaatttacgagcaaagaaatgcacgactttattagcaatacgtttaacaaaatttaaagagacattacgtaaatcatcaaacaattgcttacaatccgaaacaagaaagtcgaagtaagaagggaggcgtacagagaactatgtattgcttgaactgggacaagacaatccgtctctacagtcaccgaatgccaa

SEQ ID NO: 48718 - DNA, 2764 bp, Cannabis sativa
ataatttaggtaaaaaaaattaagtatagttaaaggtttaattaatatgtttatgtgataagtttaatttttattagtttaatttaattatttaattaattttttaatgttaattttgtgtaggtatttatttgtggtgattgtttgaaaattttcgggacactatattaaacttggtaagctacttaaacttttttattcaatattttaaaatcttaggaaaaaattgaagtgtttagcattgttaattttaattatatttaagtattggtggtgatcttgtctgagtccgttgattggtagatttattagacttgataagttactaaaattatattgttaatatttttagtgaagtttaagtattatcgataatatatatatttttgtatttttagtatatacatacttacatataagttgataatagcaataaaaattaaaattttatctacttttactttaattgataagtttataaaatgaagcttttaatttaatattttaaatatgttatagtatcgggttcttggtgttgattgaaaaatgcacaagtagctatttttattggagaaaagtataatattatcactaaaacttttaaaattctttattagtttgaatatcttaaatattcaactgtagtgaagtaggttctgctattaattatactgcagtcggatgagtagaatatgtatgtcagataagtttgaatattttaaatattcatccgcagtgaagtagattctgcgaatacatgtactgcaattggatgagtggataacttttgtattaatgttattttgtttgttttgtttcttatttttggcatgcttaaaatttttgagaaagttcgattacagccattatgctgctgaaatttcagtagaattgagataaattttcgtgtttagaatgcataaatttcactaaatttatatatgtgtgataattaatttaactaagtaattaccacccatattcaaacaaataattgaatataattttgttttttagaagttttaaaattgatagaatttgatgagtgcaaataaattatcagcggagtataatcaagatgttaattattttttggacttttgtcagaagtatgcaaaaagtcttaaattggttctttgtccttgtcttaaatatggtaacatggagcgtatgaatattactaagataaaggagtatttttttaggaacggaacaaacaagaattataaggtttgggttcaccacgggaaaatattagagtttcgggcgagggaacatctaagtctaaaaaggttaagtgtgttaatttgaactatgaggatgattaaaatctaaaaatattaggagatgaacaatttgaatcaaatgtcgatccattaaattttcaaagttttgtagagcatgttgagaagcttatttacccacattgtaatatgttttttttttaaattattgatacttattagattatacaatataaaagtcaaacacgggtggaatgataagagttttatagatttaagaactttcctagtagagttattatatgaaggttatgtgatgcctttgtatttctacgaagtaaagaagacactttcatctttaggtgtgcaatatgaaaaaatatatgtatgtcctcgagattgcatcctatactgtacgagatttgtggatgcaatatcgtgtcccatgtgtggtgagtctaggtgacaaaaagatgaattctgaggaggtaagggttggtgtccctacaaaggtactatggtacttatccccaatactttgtttggttcacttcttttaaaatgttaatcatgctaaaaatttgacttggcatgcaagtaatgaaaaattagatggtaggatgagacatccaactgactcacctgcttggaagtcaattgatgataggtggcttaaatttgtcaatgacctaggaatattcgtcttggtctttctgcagaaagaatcaattcacatacaccttagcaataagtatagttgctggccaatttttcttgtaatgtataacttgtcgccttggttggtaatgaagaggaagtttattatgcttacacagttaacattaggcccttcacagcctggtaatgacattggtgtgtacttagcacctctagttaatgatttgagtcaattgtggtacgagggtgttcctgcatacgatacctttaggaaagaagaatttaatcttaaggccataccactatgcttaattatgtctatgtagcatagacctacgtgttacgctcacacgactatgtacaagaagaccttagaacggtttatctcggttctaattaccgagtctaacctaattatgtcttgaatgcataactttttatctcaacatatatagcacgacattatattcaaaatcatctaatcactagggtaataaccctggaccatatgaccgctcactttagggtagtaaccctaatcctggttctcatttaatcataattataatattaaatatacttctacacgtactgattcattacattgtggataaaaaaaaaaatgattagttatgacaaatatttagctaaaaattttagttcattatttttttagtacaataattattaattttgttatgtatatatgtgtctaacaaatattgtaaattttaagaaataatgatagtttagaatttatacttttctttttatctttattaattgaattaaaataattataaataatttacaaggaaaaattatattatataatatatata

SEQ ID NO: 48719 - DNA, 2059 bp, Cannabis sativa
taagaattctctcctcttcccatcgtctaaaaccttctgttctgctattgatactcaaacatggttcgaacccgtactactagttccaggaattttggccaaaatcctccgcctaattcctcttctatgattccagatgcaccacacaatgaagatctgatcattcctccagctcctgtgatcactggagaaaattctacaaaccagaatcgctccatccgacctgctcatgaggatagctctagcccttactatctcagttcaggggatcatcctggcctaaccttggtcactcctcgtctctccgatcataatttccaagcatggagacgcgacttcgaattatctgttggagcaagaaacaagactgtgtttcttaaaggaattctaccccaacctccaattgaagattctctccataaccattggcttcgctgtgaccaaatggtgatgtcgtggatccttcactctgtcactccagaaatcaagagcagtattatgtttcttgatacttcagctgagatgtgaactgaacttcattcacgttttgatcaaggtaatggccccagaattttcgagctccaagaaacgcttattacccttcgccaaggtgaggattctgttacttcttattttacgaagcttaaatacatgtgggatgaaattcaggaattaagaccacgaattccatgttcttgtgtcgcatctattgataacctaacattcttgaatcaagaacaggttttacaatttcttacaggattgaatgaatcatactttcctgttcgtgcacaaattcttctcattgattcgtttccctctttgtccaaagttttctccatggttatccatgaagaaagacaaagaaaatttaaaaactctcatctcccttttcttgcttctgttcaagaccaaagccaacctcctgctgcattggctcaaaatccttcagcctctgcagcctccaccaatccccgatccaacaaaaagatgcgcccctactgttctaacagtcacaaaccagggcatttaaaagaaaaatgatatttcttgattggtttgcccctggttatggtgacaagaagaaaactgaacaacccacagtccataatgcctcctcttctgttgatcaatatggtgtccttgtcaaccttaccaagcaagaagacattcaagcaattatttctctcctaacatagaagctgcagcctactacaacagatgcttttgcatctaatgtttctggtaacaattctaaacacttatggattgtcgacagtggtgctccacactacatttgctgtgatttttctcttttttctaatatgcacaaacaccctatagctaatactgttacaccctatagctaatattgttacattaccaaacaccctatggattgtcgacagtggtgcttcacaccacatttgctgtgatttttctcttttttctaatgtgcacaaacaccctatagctaatactgttacattaccaaatggatccatcattaaggtatctaaatcaggtgatatcaatttttcacccaattttcacatatcaaatgtactatatgtgcctacatttcaattcaaactttttagtgtatccagttttctaaatcacactgctaacagtatgctatttaccaaatctttttgcacattacaaagcacaatgaacaagaggattgggacagatgaaaggattggaaatctatatttcttgctgcaatctacccgatctcacagcaattctctttctcttacatgtaatcagtacaataactcttgtaatagtgtccattcatggcactctagacttggacatccttccatgttcgcaacaaattttcttaataaacaattacattctgcacataatgatgtttccccttgctctatatgttacttagctaaacaaaaaagaataccttttcaatctcaaaataacattgctgatttttgttttgatctaattcatttagacatatggggtccttttcatgttcatagtagaaggttataaatatttcttgacaattgtggatgaccatagcaga

SEQ ID NO: 48720 - DNA, 1182 bp, Cannabis sativa
agttgaataaagagtaagtccaataaattgtccaagtaactgatttgcttaaagttattacttattagtggaatttttatgagaaaaattaatagagtttattttctatggcataaaaagttttaagtttgtataagtactcaaagtttgtatacaaagtttttatcaaatgcatataaatttatactataaaaaaaatttaaaaataaatagaaaataaaaattttatataacatcattttatatatatttgtgattataatgaattagattaaaatattatcattattataatagaatcttaacaacttacaacactttaaaatttataatttacgaaacactcaactcatatttttctacagttctgctacaacttctttttctcacaagtagctaagttttttcacacagcactgctgtgccaaactggtgataagtctgttgttacctccctctgaatacaataaaacatatttactaacgcgactgcagtgtaatttattagatgatatcaatattgataatctcgtctattaattccattaatatttcaataaaattagtcatatgcttacgggccattcttttatttcttaacccatcggcctatccatgaacttagtaacattctacaaaaataaaaacaagcacaatttacacttattgtggtattattgaattttgtttgattaatatggcattttgtgtttgtagttatcatatggattttttttttttatttttacatttttcaaatatcatcttgaaatatccatctaatagttgaaggtgctaagtagagccataaattacaactaatgaattatatgcctcatgtatttattgtctatattaacttatcatcattaaaattaatatttttcttggttaaatagattctatgtttgtgagtttattctttgataaaaataattaattattaaatttgtagttataattaattataatagagagattgtgataatggactactttactattatctacttaattaatagtttgattaaaaatttcgttaattccattttgaacaataatgtgaaaaaataatgagaagaaaataataatatataaaaaaaaatattggcttaaatctaaaattatttttgaaataaaaaataatattttgatattttttcgcttttttttttttttttt

SEQ ID NO: 48721 - DNA, 1960 bp, Cannabis sativa
  modified_base (35)..(52): a, c, t, g, unknown or other
  modified_base (853)..(854): a, c, t, g, unknown or other
atagttcaggggcattttcaatgaccttaaaagtnnnnnnnnnnnnnnnnnntacatgtcaaagttcaggggtaaaaatcctaattagcctaaattatatatattccagatctttattttgtgtgaggattcttagattctcttttcttcactatattctttgctgtttcttttttttttagataaaatttataattaagatttttgacccctgaattttgacatgtactaaatcatatctcctaaactttttaagctaaaaattctcccgaactattaaaattaaggaattatttttaattttattcaattctgctaatgcgaaaattattcatgtactaaattatacccgcaaacttagatatttactgaatcatattcccaaaatttgacatgatactctaaaataactttattccactttactctttttcttattttttcacattcttaaataatattatatattaaaaaatataaaaaaaaaacttaaaaaaaatatcacacgttatatcattttaaaaaataataacttaagaaatatcattaatgcttagtgatatttttgtctctaaagtaaatatcacattttttaaaaattaaaaaaaaaaaattataagaaaataataaccatcgctcatcatttatatataagaaaatatcatttttttttaatattttgttattttaatttattacttaacttttttcaatttaatttctctctttttctcttatgaaagtaatctcttcttacctacttaaatagtgatacaaatataaaatttttttgtgtagtaaagggatcaacacatcagtatgttatatcttcacaaaaaaaaaaaaaaataannataaaataaaaaaatatatatgttatatcatatatgctcaaatgcttggttggatgagaaaagatttacactagagaagaaaaaaagataattgtagagaattaagtcaaactgctgggttggatgagaaaagatttacactagagaagaaaaaaagataattgtagagaattaagtcatggttgaaaatagttacatcccagcgaaagtttttcatgacctaggaaagagcgccgccagccagcacgtacaatcgtccttcctagcgagtcgcgttgaacgtcgtccgctcccagcagtcgccccggtgtacgtcgtctgctccgagaagtccccatcgcacgtcgtccatcccagcacgtcgcccattcagcagtcgccgtccgccttcatcccgtccttgtgatcgtaggcttcggaatgttcctggtctgagagtttctctggtggacctgcacactccggccatcccttcatggttgtccttgcacatcaacatatgtaggggttgaataagtcttttagcagagacgttttacaaataaaaaaaaaagaaggaaaaaagtcagcagtcggaggttaggtcttgtcgtatgacatggtttctttgtttctatggttctatgttgttttgttaatgttcaggtgttaaggttgtgtggtgatagttcggaggtttctaagttgccgggtttcttaattgtcgggtttcgtggttgttggttctttgtgttttttagcgttgtgggggctcttatggtggcgttgttggttcaggtttctttcttgatagttatggcttcaacaagtcggcacaatggggatactgaggatgaaatatttcggtttcaaattgaggaggaggatcttgaagaagttgcagttatcacagggagaggtgatgatggaattgatgatagatggtgtttagttggaagattcttgtctaataggttgattgattttgagaagatgcaaaatattttggcttcattatggcagccaggtatgggcatgtttgtgaaacaattggataataatagatttctttttcaattttatcatgaggtagatattcaaaaggtcatcaatgggagtccctggac

SEQ ID NO: 48722 - DNA, 1899 bp, Cannabis sativa
  modified_base (817)..(831): a, c, t, g, unknown or other
caattcccatatatatgtaaatccatctctaaattaagaaatggaaaaagaaaaagtaatgaataatgtatactacttaatacattcttacctttattagctctggtcttatgtataataatttatgaagtgtgtccaattagactttctattttgggatttttattttgatatatttcatatattcatatatagatagctgtgtctatagatcatcagaccacctgctggtgttgctgatctcgagtatcataatgttttaagcttaataaataattagaatgagtacgtcgggtgtctcctttacagtttttcttttataatacttcattaaaaaataataaattattataaaacatgtacgctatagcaggtaaatgatatcgaacatatatatttttgaaatcacatatattcttagctagaatacagtaaaaaatatataaaataaaataaattacactactttgtttctataaattaaaaaaaatgtgttctacacctctcaaaaagactgtttgatgtagtcataagcataatttagtgatttaatacactttttactcgtattgatatgccctctacctctacattcagtatctatttattaattttttttcgtacactataaaaagttgttacttttaatgataattttttagtcacaatataatttttttttgagtaaatgtgacttttaatcataatataatgttacttgtgactaaaatatagtattaagtaacaaattgtcactaaattagttttaatcacaacaagtattatgactaaaaatatatttagttacaacaaattnnnnnnnnnnnnnnnaatacctttagccacggacctttagccctcagatttaaaaatatattaatatacaattgttactttcatatatacatagtaattaaatagaataattagttaagatactttaaatttacataggacaccatgttttgaatacccttgctcctttttttttctatacgtatctacattttatttattaaaaaaatacaaatgaagtataaggttcaaacaaaattcaacttatgactactagaataggcggatgatgctaaaccatcatttcacttaaatttatagctattatttattattttagattatattaattaaatgtataactaagtccaccttaaaattcaatactaggtccgccactgttgtgacatgtttgagtcgtttctcataaaaaaaaaaagaagataatttgtggattaaatgggtgtgcaatgtatattaaacttaccaatattttgatttgtgtgctaatttattgcaattggtaaagtttaatatcactcaagtgtgtggtgtgttggctcctccgtaggccaactgccattgggtttgtttttgtttggaataggcttggggtttcaaggcacatgtttattttttggctagtagtgtccgaaaaacttcaagctagagatacttgctcagtttggatttcgctttgagaggatgtgtttgatctgtaagtggtgagcatgatttgcacgtttagtaaaagatgttttgatgggatgaaaaaaaggttcctctattttaaatcaagtgtgaactattacttctactattaatagaaataaaggtgatgtatatgatacgataatgaatgttatattccaaggaattaatcaaaaagataataaggactggtttgagaatatctctgatgagtgattcttgtatagccttgattatgttgaagtttggatgattagtaagaagattcaacttattcaaaatactttctttttttttttttgtatgttcatcactataaaaaatagaataattagtaaattttacccataaactttcgacaatattaattttacctcctaaattatacggctt

SEQ ID NO: 48723 - DNA, 2565 bp, Cannabis sativa
tgaaatgagttttatttaggggataaaacccaacacggttcacccatccaaacccaggagtcttcaattgcctcatccggtagatcaatgtttagaattgcagtagcatccaccgggctgaaccaatctttgatcatttgagcattccatctgttattacttaggacgaattgtttaacccaagataccccgtgagacacatctttaagaggcgtgggggtacggttagaagagggaacccaaggatcaaaccagatcgatgtcttagcaccatttccaattttcttacaaattccttgttcaagaacctcacgagcctgaaggacggctttccacatagccgagtcatctccatttctctctagaataagaaagtcccttccttttatgtattttgcattcacgactttgctccagacacttgaattatccgtgagagctttctaggcccatttggtcatgaaggctttgtttataataccaacacttctgaatcctaagcctcctttcattttggattgacagattgtgttccaagccaaaagatgaagtttttgtctctcctcagtatctccccaccagaaatctcttagacatttgtccactttatgcgcaatattgagaggtattggatcagaggcagcgacatatgttgctatagacgatcctaccgactgaattaagcaggctcttccagctttcgaaaggagtctggttttccagcttttaacccgctgcagcgccctgtctaccaagaatcggagatctctcgacctatttagagatctgaagaggggaagtcccaagtatgttgcgtcttctttcattctcttcatattcagcatgcttgtgatttcccttgcattagttgtcgagacacctttagtgaaaaacacagtggacttttggtaatttactgcttgtcccgaccaagagcaatagtcatcaaggcacttaatgaagcctttagcttccttaacagacgctcggccaaacaagattacgtcatcaacaaacataagatgagtgatggctgacccttctcttgaaattctgaagcctgctaacttcccttcagttttccttgttgtgataagtctagataggacatctgcagctataatgaacagagccggggagagaggatcaccttgccgcagaccacacaatcgagaaaccataccttggaccgatccattgatgagtaagcccaactttctaatttttatgcacttttccacccatctcacgaatgtttggtgaaagccaatccccttcaacgtattcagaacaaattcccaatccattttgtcatatgccttttccatgtctaatttgatcatcataaaacctttcttgccttttttctttttcatggagtgaacaatttctcgagccaccgcagtgttttccgctatcaatcttccgtgcacaaatgctgtttgttccggtgagatgatggaaggaaggaggtgcttcaagcggagcgccaggatttttgagatacatttatacgctacattgcaaagggcgataggcctgaagtcattgacccccattgggcaatcttttttcggaattaagacaatattggtgttgtttatgaattgaggaagtttcaaactcgtaaaaaagtgggaaaccatggcgatgaagtccatcttgaccacactccaatgctgaaggtagaagcccgccgacatcccatccgggcctggtgccttttcatgtcccattgatctaagacagccttcaatttctttttcggttgggatgcataacagtctcatgttatcttgctcactaataagcatatttaccagaaaattttcctctggcgcagataggagtggattcctggtaaaaatggcattaaatctcgagacgaatgactctgtaatagccttctgatcagtaatccaatccccattttctgtctttatagtctgaatatagttctttcggcgtctaaccaccattgaggccataaaaaatttcgtgcaatggtcaccatctcgcagccaagtaacccgagatttttgtctccaaaacacttcttctctacgaagcgcctcattcaacttagccctcgcatcacctagcgtcgtcaactgcacctgatctttgctttcaatctttgccagatcattctttgcttcagtgacctgctgatgtatcttcctgaagtgtgtcttgttccatctttgtaaatgatctctggttctttttaattttcgatacaaattcaccattgggttatggtgtagactttctcgccaagcgttgcgaaccacccagagcatctgggatcacggccccacatcaactcatacttgaactgagcctttgtacatctcactcctccatcaatattcaagagaattggtttgtggtccgaggtaccaacggtgagaagctcaacaatggcatttggaaaaaagattctccagtcagtagacgccaacgccctatccaaacgcgctcttctaatcgcagaacttccagtagagtttgaagtcttttggaaccatgtaaatttacccccaagactgttggaaattattt

SEQ ID NO: 48724 - DNA, 642 bp, Cannabis sativa
ccaaccaatccccccgctaccaatccccatgttgacaattctctcattgccattaatctgtccaatatcttcaccccagatgtaggttctgtttctagaccatccatgcccgtggctacctatccaccaaccatgtcacccaatattacttcccatacccttccttactctacatcacctttctctttgcccatatattcacccacacccgctgtcactacaatcactaccgcctcaccttctttgggttacactactgctaataacaaagaaaacatcccacctacttccactaccaagaggcaaagtgatcaactttccatgcggcagtttctcaaaagatgtcgtaatcaaaactcccctttgtcattaggagaaatttctggccataatgtttcctatgatgatatggattcggatggcttcattgacaattccgcggaattgctttgcaatcctgcgatccattatgaaaatcctaagttggaatgcacggggattggggaacccgactgcatttaggcatcttcgattgcttgttaaacaacaatcgccccatattttgtttcttatggaaacaaaacttccaccaaactctatctcactttttcggcaaaatttgaattttagtaatggtttgga

SEQ ID NO: 48725 - DNA, 962 bp, Cannabis sativa
tttttttttttttttaccattttgccctcttcttatcaaagtatctaatgttttgtttattcttaaatattaaattaaatattatgttcttaacagatctcacctgagtgaatatttatttaaaataaattaattaaagaaatttttgaaatctaattagtgtaaagttatgcatttttgactgtgttaatattattggaaattaaattttgaaataatacaaatatattgattttttttaatcatttatataaagtgaagaatatatatatatgctttttcaaaaaaataaataaaaaataaaaatatatatatgcctttttattgaaaaagtcaagaatatatagatgattgaggtagaacttatgactaaatccacttaaagaattaagaggatatggtagtttcttttatcattttattattaaggtaataagtatttaaaagttttattttataaatgtatagatttaataatattttttagcatcatatagttaaaaattttatttttgtttagttaactttacttagtttttgttaaaagaaaattttaaaaaaatttatgtcttgacttaatgatttaaaatatgtatcatgtttaagatactaatggagtctaaacaattaaatacttatgctattaaaataaattattaaatttatatttgttataaattctaaattttaagtaggtatgccacaattattttttattactctatttatttttatgtaatttttttacgcttttttatgttatgtattactttaattattgagtaattttcgttataaataaatatttcagtttaatttttagttcggtaagtagtaagtaaatttttacatgtcaatcgttaattaattcatatcattaaatttttttttatttaaatataccaatgagatgtggataatgattttatgaaaattctagaaatataattattaccgttaaa

SEQ ID NO: 48726 - DNA, 828 bp, Cannabis sativa
gaataccagcttttaatctggtggccattgggtgagtagaaatagttgggagagatgtaggctgtggactggaagttgtggatactggtgcagcagtattgctactggtgtgactgggaactgttggtactgcagcatcagtatgggtgcacggttgaacactaatagtaggaataattggagaattaggttgctgttggacagaatttgagggagtagataaggtgtgaggcaccgatggagatgtaggaatgggagatgaaggcacacaatgaacaggtggtaaacctgttgtgacagtaaggtgctgagagtatgcttttgtttgcatagcagcagtgtgagcataaggaaattgactctcatcaaagacaacatctctcgagatgtatagtcttttgtctttagacaaacacttgtaacctttatgagacatactataccctagaaatacacaaggtgtagatctatattgtagtttgtttttattgtaaggcctaagattaggataacacaaacaaccaaaaattttgagcatagagtaattaggtggtgtatgaaataatgcttcaatgggagagagattttgtaggacaggtgtaggcatcctattaatgagataggtggctgtcctaaaggcttcatcccaatatttcaagggtagagaggcttgtgcaagtaaggttagacctgtttcaactatgtgcctgtgtttcctttcaacaactccattctgttcatgagtatgtggacaagcaagcttgtgcacaatcccagaattttcaagaagtgttgtaaaggatctgaattcaccccccagtcagattg

SEQ ID NO: 48727 - DNA, 930 bp, Cannabis sativa
  modified_base (305)..(321): a, c, t, g, unknown or other
aaaatttaaaaggatacatttatcagttacttttatgagctttgacttaatatttatttgagccctcactcaaccaaatttctggcttcgtcactgcttaggacacagtatataagaacacactataaaaaataacaatttttagtcataacataaattttttaacataacatttagttataagttgtcactaatttaattttaatcgattaaaaatatatatttaatcacacacaaattgtaatttttgtgactaatacatttaatcacggaccttttagtcacaacataaaaataataatttnnnnnnnnnnnnnnnnnttttacttttagtcacaaattttagtaaaaacttttatagtgacgtgaaattcctaatttacttgagctatttttataatacttttatatgaaataaaaaatgatatttttcaaaatttgagagcttattttgtatagaaaaatgatttttttgtaaacaaaaaataggttatttttcattgaggtatagggtttcattggaaaaccaagtgtgtaaaacgctcgcttaatctcattctttgaaataaaatatctattaatataatgaataaaattaaaattacaagtacttgatgaataaatatatatatatatatgtccatttcacattttttttggtacatttttaatattctatcttttaatcttctctttttttttaaaaaaaaagaataatagaaaaatttccgtttgcaattattattaatttattgattaattattactcgtattcttaactaaaaacatatatatttttaatatctaagcaaataatcccaataaaggaataattacataagtactatttttgtaaaatatttacatttttatgttcaaagaatgttattttatattttttacgattttccaaaaaataacacgaaaaca

SEQ ID NO: 48728 - DNA, 1209 bp, Cannabis sativa
aacaataaatttatacctgagtaggaacaaagtaatcacgagcattgatttcgtaagaatctgcagcatcagcttcttttccctttttatccttgttgatttggaagaccaccatgtgctcaacgttctacataatatacaagtttatatttacaaaataataagtgaaaacactagagagagggagagagagtcctaacctggagattaggttcctccatcgaaagccgaccagttgcagttgacgtttgaagccaatgaccatgtaaagtgtgtttgtgtgtcccaaccgagagcttagcaagcgagcaaattgatcccaatgtacagtttaaaagctttgccaatgtccgatgctcttttataactggaacaataggatgctcgtgcctgaaacacagcatgtacggcatgaaacatatacaacaacaataaaggaaaattaagaaacagttcatgaatataatgaaactatactttattttacaaagtcaaattctttaacacagctttcgaaaccttcttcttaaaaacaccaataagaaataagaattccggtagatttcatgtaaggacttttatgcatcttaattagcatgtatcttttccttataagaaaaacttactaatatgacaagggacaataccttaacaaatccaaacaatgcttgtctgtactaggatggtgcttccctttgttaccggtctctggtatcggaagctttaagtgtccatacagtacattggcaatatctgctgctgtgtataacgaaaatgtcatgcctgccagcttataagcttctttctcaagattccttaacttcttccccaccaaatttcgtgctcggaggcatccctccatatcaacacctattccccaaagttccatgtctgcaagaatgttaaccttgacatacaaaaaattattctagtgtcagagattagtaccaaaagaagaactaatacaaatttgtaacagatcagatgaaagaattaccaaaggaatttcaacattcaaaagtgcttcagtgagttcatcagacacaatcaacttccagagaacagaacacaatgctcgtatttgtgcaactcgacgacagcaaccattatgagcagctctacgcatctgattcttccacctaccattttgattagcagcagtcgcagcctcactagataaccttttctttacttcctgtcatcacatta

SEQ ID NO: 48729 - DNA, 2677 bp, Cannabis sativa
  modified_base (2615)..(2633): a, c, t, g, unknown or other
aatgccacccatctccaatcaattatatgtattcctcccaaaggtaactcctttatctccttcaagttctgcagttttcttttttttatgaacatatatttattccaaatcttgcttagctagccaataagcggagtagcctatacattttatgagagtgaattttgtcctgtcacataataatcttgtggtttctcagattgagttgattaatggttgaaagtaaatcaaatcaagtctagaatacatttatactataattaaagtacatcaaaaaaaattttatagtacatcacggaatggtatcatttttttataataaagggacaaatttattctcaacattttatatacattattaaaagttcgattctttaataagctagattaacttaacttggttgtgcacttgtactttctcaggtgaaaacaagaagtatgtcactattggtgagttttcttattggaacttaatatcttggatttagtatagactgatactaagaatcttgatatatatgtataactgcaattttttgtcttcttctataggtgctacccttggtgctgcagtagtgacagtagtgcttattttaatttatcgtgcttacaactctaataaacagggaaaagagtacaaattgagaatagagagatttttggaggattacaaggctctaaagcctagcagatatttatatgctgatattaagcagattacaagtcaattctctgaaaaattgggagaaggagcttatggaacagtttacaaaggaaagctctctaccgattttttcgttgcagtgaaaattcttaacagctcaaaaggcgatggagaagaatttataaatgaagttggaacaataggtcaaattcaccatatcaatgtggttcggttggttggatattgtgcggatggagctagaagagctcttgtgtacgagttctcacccaatggatcattgcaacagtacatatcttctccagattctgaacattttcttggatggggaaaaataaaagacattactttaggcattgccaaaggaattgaatatcttcaccaagggtgtgatcaacgaatacttcatttcgatatcaaacctcataatgtcttgttagaccaaaacttcattccaaaaatttctgattttggtttggccaagttgtgttccaaggataaaagtattgtgtcaatgactaccgcaagagggaccatgggttatattgcacctgaagttttctctagaaattttggaattgtttcatacaagtcagatatttatagttttggaatgatgttactcgaaatggttggaggaaagaagataactgatgtgaaagaggaagtttattatccggaatggatctataatctcttagaagaaggagaagatttgcgaattcatgttgataaagaagaagatgctgagattgcaaaaatgttagcaattgtaggactatggtgcattcaatggcatcctacagatcgtccttctatgaaagttgtggttcacatgctagaaggagaacaaaatttgactttgccaccaaatccttttacctctagtgattcaacaaaaacaagagttgatatgccaagaaggagaatgaacttggaattagaaactataactgagttggagtgatataattcaacgacaagtttgtatttactttgtatatgtttaagatatgcacttgaatgtcaacatggtgagataataacattttcatactgtttaaaagagttgatttaacatgtgtgtaataaaataataagtgttgtgaaatacttgctatttttagtaatattctctgctttagcttagattcctttggatttccttctcgatccttccttctctagtgatctttgatttggattgatgggagcacagagattttcatgtagaaaaccctctgatgccttgttaggaaaatggatgcaatagacgcagggtaaaataggaattatgcaacagcctcatctagttggacaccttattattggggaaatgattagagcatctcttctattagaatattagtcgttgtaccattatactgtacatatttttctgtgccaatgataggctggcagggcatacgtgtcctactctagaatattcttgtaaacctgttcttgctatatggggctggacctctataaatatgattttttttactttatattatttacatttgttatttaattattcttaattgctttaatttgactcactgtcgctgactaaaagcaagattaataattcgactttggcctttggcactgagctctaagtctcaaacctagccctcgaattgacctcggagcttgaccctaaacctaaacctaaaccttagcttggaccttgactctagacccaaacttagacttggacttgacttatgacctaggccttcgaccttaattccaacctaatcttggatttcgatctaggactcaaaccttgtggacgctgacctcgacccttggatcccggccttggaccctaacccaacctcattcggaccttcatcccaactttgactttaccacaaaataatctaagttcataaataataggctaattgttgggttttatgccctnnnnnnnnnnnnnnnnnnnataatcagatttacttattgatatagatcagaaataacatttaa

SEQ ID NO: 48730 - DNA, 1799 bp, Cannabis sativa
  modified_base (27)..(28): a, c, t, g, unknown or other
atacttgtaagtagatctaagatcctnntaaaataatttccaacagaaaaagccatctacaatcgacgcattctttaaaaggaagagcacagaagttccaatatctaatgactcatccaatcaaccagcagatcttgataacttacatccagaatatcgtattgaaaagtctgtaaaaattcaaattatagaagggtttgatatcaattcattagagcgagatccaggattacgaccacaaatatgggagtatccaattgagaagcaagatgaagttcgcagagcgtacattaaagccggtccatatcaatgtatactttctgagtaccgtagaactggagagacgcataagcgttgttttcagtcatcatggttttacttgtttccatcttggttggaatattctcctagtaaggatgcagcattttgtctactatgctttatatttaattcaaaaaatggatctcgtggttcagatgcatttactatcaaaggatttcggtcatggaaaaaagtgagggatggacgtaattgctcatttttggcacatatcggaaaagatctcacttcaccacataggaatgctgagaaagcttgtgcaaatcttatgaaccaatcaacgcatgttgcaagaaagtttgcaaactttacatcgaaagaaattgttgaaaatagacttcgcttgaagctttcaattgagtcaattaggtggctcgcatttcaagggtgctcttttagaggtcgcgatgagtccaaaacatcaagcaatcgagggaactttcttgaattattgagttttatagcttcttataatgataatgcagctgaagttttagataaagctccacgaaatgcatcatatacatcaccaacaacgcaaaaacaaattttgcacgttttggcatctaaaatgaggaacgcaattcgtgaagaaatttttgatacaaaattttgtataatagttgatgagacacgagatgaatctaaaaaggagcaaatgtcaattgttttgagatttgttaacaaggatggttatgtgcaagagcatttttttttggacttgttcatgtcaaagatactactgctttaacattgaaacaaggtatattttctatcctcactaatcatactcttgatgttcaatctatccaaggacaaggttatgatggtgcaagtaatatgcgtggacaatggaatggtttacaagctttaatttcaagtgaatgtccttatgcttattatgttcattgttttgcacatcgtttgtgactagcattagttgctacatctagggaagttattcctgtccataaatttcttaccaagttgaacttcattgttaatattgttggtgcatcatgtaagcgtaatgaccaattaaaagctgctcaagcagtaaatattgctcatttacttgagattaatgagcttgagagcggaacaggactcaatcaaattggtgctttgcaaagggcaggtgacactcgttggagctctcacttgaaatctatttctagcttgataaaaatgtttagtgcaacatgtgaagtcttattgaatattattgaagatggcactacacattctcaacgaggagatgcagatacagcttatgaggcagtaacttcttatgaatttattttcattcttcatcttatgaaaaaaaatctagagatttctaatatgctttgtcaagctttgcaacttcaatctcaagatattttaaatgcaatgcatcgtgtttcatccaccaagattctcattcaaaaactaagagaagatggatgggataacttagt

SEQ ID NO: 48731 - DNA, 974 bp, Cannabis sativa
accatttttgttttttaattttaaaaacaaaaaatatgaattttgaatttttttttttagctttttctaaatacaaaggatcaaataaaaaaaacacattaacatcttataataataaagtaatttgaaatatcagaattcattatctatctataagataacacaaaactgacaaaaccatacataataaaataaaataaacatataaactatttccaattttgaataaaatattaaaaaagtcctaacaatagtcgattttgtataatagtattttaacttcaagaatctcttcatctccatcgataaatatgtcttttttctccatgtttttgagtctaaatagaagcttggccattgtcgataataagcacttcactatctattcttaccatctatttaatctacatgtaaatataaaactattcataaaattcctaaaacaaaataacaattacaagactattagaatgaaccaaaagagattccaatcattacaatattatgtagattaggaatacaatgatcaaatgtggagaaggaaatctcaagttataggatctaggctcactgagttgggtaaaagagtctaatatatgggggcggcaattaatccttacaaaatactaattactaaaaagggcctactttaaataatgatgcattttgaaacctgttataccactataccaaagcaaggtaaccagataattccctactatatgataattaaatcgagctctcaaagcccatccccttctctctattccttctacttttgaaaaaccccttcaaagactcttccttctacttttgagaaatcccttccaagacaacttatatgtctatgattgtgattttttttctttaatacatactaaatggaaaatttaaattggaatctcttcttgtctctaaaaataatagccagttccaacttttgcaaagttttgcaagttgatcataggaaacat

SEQ ID NO: 48732 - DNA, 1612 bp, Cannabis sativa
taatcctacttgttctaatctatgtggacgatatcattgtgactggaaacaacactgttgaagtgaacaatttcattcagaaattgaacaaaacttttgccttaaaggatctgggacagcttcatttctttgaatagaggtgtatcgtgatgaaacggtgatatacttaactcaaggaaaatacattagttatctgttgaagaagtatgacatggtacatttaaaaccatgtcctacacccatggttgcaggcaagccattgtcgaaaaatgatgggaatcaactgaccaatcccattgcctatagaagtttaataggagctttgcaatatttgtgtcacacaaggcctgatattgcctttgctgtgaacgaattgagccagtttcttcaaactcctaccacaagtcactggagaggagcaaaacgtgtgctgagatacttgaagggaactgtgcatcacgggttacacattggatatagtgagagattgaaacttgaaggtttttctgatgcagattgggcttgttgtctcgatgatagaaggtctgttgctggctattgtgagtactttggggatacattgattgcttggtcatccaaaaagcaatcagttgtctcaagatcaagtacgaattctgaatatagagcattggcacatgtctcggctgaaataacttgggttcaatctcttcttgctgagctgaaattcaagttaccaagtatcccggttgcctggtgtgacaatcaaagtgctagtgcacttgcctccaatcccgtctatcactcaagaaccaagcacattgaaatagacatccactttgttcgagacaaagtaatcaagaaagaacttgacatactacataccttgctcagaccaaattggaaactgcttgactaaaagcctcacacatactcggttctggtttctcattgacaaactcgggataaaagaatcaccccttcgtttgaggggtggtgttagaaaccatgagtgagtatgtgagggtgcactctgtttcctctgcactctactacaacatagtttaattccctgcagctgacagtttgttattatgaaatcattgctgagggaatattctttccctttttggttatgtattgttttctgtgtatgacacttgtcactattgtattgattcccattgtattggaaatgcctatttaatgaaaagttctacctctgtctcaaattaggctaagaaatccattgctgcattttctctaaaacttaactgagagtatgatgagtctgtcatattcactggacatgttagagtttgttataggttagttcttcaagttgttatttcaattagtccagctggtcaagttggtaagcaactcctcgtaagttcctcttgtatatatactctgttttacacatcaataatatagttttgatttactatattttaatattttattatcgcagtattttaaaaattttagttcgctcttacagttattctttttgttatatcagtagtttagattttttagttatacaatctttattctgtccgttttccattttacatagacaatttatatcttcatcatattcaatcaagttttacaccaaatggttggc

SEQ ID NO: 48733 - DNA, 1178 bp, Cannabis sativa
tatatatatatatatgtatgaatgaatgaaagaaggatacaatttggccaacacaggttgttgcaatggcaagaagagagataattgttccaacaagattgagttggagatctgtcactgaggcaatcccaactccaaacagtaaaactaacagagatagctttatttgttggctgcaaattaagttatatacatataaatattattaacaatatatatgaaatcatttaaaacaattatagtaaagtaattaatgtaattattacctaaattgtttattgagaaataatgtttctaacaacacagtgaatggtataatggcaagcttggtcatctgcaggaatttaccaattaataattaataacaaattagtatgaaaattgaaatgtgtatataatatatggtattatttcacaaatacataaaaataacaaaaaaattattaaaatacgcttctgcaaaattttaaatatttttacgattattatgatgatttataaaaattgcagtattttgatgtatttttatattaattttttgttatttatatattataaaaaataaggtattttgatgtatttttatgttaatttttttgttatttatatattattttttgttgttatttttctgttacttttataccgttttcttgttatatttataaaataccataaaaatatataaataaaagaaatctttgagtataaaaacataaaatttttagcaaaaaatagttcattgtataattatccccaatccttaatataaacgggttaaatctgtgtttagcgtccacctagttcagaaataaaaaaaaaatactattttcttataataatatatatattatattttttttcatgacacattaatttcaaaggtaatgtgtgtgtatatatacctggtagaagccaatagagttgaaacccaaactcaagttgagaagaccaatagaaacaccattaagaataccaaaaagcataacagttttcatgtcaatcgacttattctcaaacagtttgaatctttgagcagcatgtagtgtgcaatatgtcaccatcagatgccaactagtcaatgttgtagctacaaatcacaaaccaactctatttttgtcatttcctttaccgaacaataatcagtcttctcataacatctctagattgaattaatt

SEQ ID NO: 48734 - DNA, 2094 bp, Cannabis sativa
attttaaaaacaaaaagtaaaattttttaccgaacatgatttctgtttgaatttttaaatttttgattaaaaaaacaaaaaactatttttaaaatagttaccgaacggagcctaagtttatgaaaaaaatatttttagactcttatttagagaaattataatactttcaaaattaataaagaaaatgtgtagaaaagagataaatttttttaagcctctaaattaggtggatcttagacagaagtctaaccctcttttaactaagaccggagctaaccattattgtagattgattatagagatgtatcaatagatacatgtggaccatttttatggatcgataacaataaatataacttttttcttgaattacagatttatcattaatcattaattttagatttaatacacatttctaattacaaatattactactagctatcttttaatttttcaataatcattattgatattctattttttgtgttaattaacttatataatttgccaactcattaaaatagtattatacatatagtaaaataataaatgtaacatttattatttttttttttctaaatttaacactatatttaaatcttgtatcagagatgaacccacctttattaacaaagtttgctgtattataattttatatatctcaactatttctttgatagaaattgaaaataacaataaaataatttgtaattcctcatttggaagcttttgtaattgagcattgctattagtattataaatatccaatacaacaaaaaataatgggtaacattacaatattaaattataataattttatttattgtttgttatgatacctttaaaatttctcttattatctgaattagtaacaaactaaaaattattgggaataattacgtatttttagtaaacaaatttaaaaattttacatagatcaaaaatttaaaaaaaaaattacaaaaatacatcaacacaaaaaatgttttatttttacactttaaattttttatttataaaaatacatttttagtttttaaaaaaaaataaattatttttttagttattttgcaattcatttataattatattatagttgttatgagaatatttttttagttatttttagtagttttataatttatttacattttatgtatagttctcgtgtgaggttaattttttattattttttagttatttttttaatttttattaagtaaaatatatttttataattttaaaaatttacaaatttatttttatatataaaaattttagactctaaaattataaataaaataatatttttttttttaaatttcccaaagtttttcttatttgtactatgtattatttattggaccactttcttaaattagcacagccaaagaagttagctaaacatggatatgtgagcacataatttttctagttacttgtcactatttggttcacacaaaatcaaactttattttattttattttattattatttgtgtaaaaaaaacatgaaatgtcagtagtatcactgtatttgttccctaccagaaaacaaaaacaattccttacttacgtcactgaatacgtaagtaagtcaattattatttcagtaattttacatccttaattttccacggtgttgattatttgttaaaatatgtggcttgttaaaaataatttatgaatttttatatttacaaaaatttagtgtttgtgttaagttcaattctattatttcaatttaaatacggatcatctttttaaattaataattttactatttaaattttgataactattaaattatattcataaaaacaagaaaaaagaaagattcaatatttttttagtaaattaaaaaaaatattaaaattttaaaactaattaagtgatttaaaaaagaggaattaccttatatactattttttttaattgttttttttttgttcaaatttactatttcggttgttctagtggtttatctagtggtttctatgcatgttgctacacggattttggttgcgatttatgttgctccattagttgctataaaagtttctctacagaataatttcgtaaaaatgtaaaaaa

SEQ ID NO: 48735 - DNA, 1076 bp, Cannabis sativa
gtgtgtataatgtgattaaaaaaaatcaaaatattattgaaaaaaaattaaagaaccactattcatctagctaaatgtggagaaagatttaatttaaaattttgtgaagtaaaataaagatgagtttacctcatctctcaactgattgagctaatatttaacatcattccttacaaattttatatttgagctattataaagtatcagttgggagtgctcaaaccttctcatgcacttttttataatttattttattatttaggtagaagactgagttagtaattagggtagtcttgagtggtcgagtgttgaccatctccaaattaagggtggaggacataggcactacggcaggaaaggaatagcagtagctcttaatttttttaatataaaacagcccataaattaattaaaaaaaatgttatttttccaagtcacaaatatgaattttatggattagaatttaaaaaatttaacaagactcaacactacttcacacaaaataaaaaaaaaaaaaagtcaaatacgatacaatctctttaatacgaatttaatattattttttaaataaaataaaaaattattaataatattataactatgtaaaaatatatattaagcgattcaatattgaattaaaaaaaaataaatttaattttctttaaaaaaaattaaaactatttaaaaattttagttttattatatatacaaaattatataaaataaatgtacataaatttttttaatggaaccctaaatttatcatttttttttcacaactctagctttagtataacaaaattggttaaagtgggttaacacaaatacgatacgatcttttacgggtcgggttggattagagttgagaaaattaaacgcagactgaaaatgaatcaatacgtttgacacgaaatataaaaacaagtgaaataaaacatgataagaaaacgcacaagaatacattttatcactcctaatatataatatacaaataataaaatattatataatatatcctatatatttaagtaaacactcaaaagtacactataaaaatattataactatatatgcac

SEQ ID NO: 48736 - DNA, 1332 bp, Cannabis sativa
  modified_base (27)..(38): a, c, t, g, unknown or other
aaaataaaaacagttttatagaacatnnnnnnnnnnnntatttttactttttttaattttaaaaacaaaaaattgaataaaaaagttgaaagttggattaatcaatgataagttattatcagaattaattaaaaaagaagaagttgcatatattatttaattattacctggtctgcataacattggttagtaatttcgttgatttctggtttattaaagtactcgaattccttagcggcacgtgcttcctcaacctttttatggttagtcccaaccatcgatctggaaccagagtccactcttactctatatcccactactcatccaaacaaaataaacccatgtaataagttctaagtatatataaacaacacatgcttaatcacatacataataaaatatgaaatataaatttgaatatcattccttgtatcttgttttaacaattgaatataactagacaatatctcttaaaaaattaatttctatacatcaacctatgccaccacaatttcaataatatttatattagactggtgctaattcaacttaaagctacaaaagtcaaaaacataattagctaagtatgtcataaattacatatgatagtagatctgatgaaatcaagacatatgattatgaatgataaaaaaaatagcatatcttaacgtgccctgcatttataatgggttagtgatttttaatattatttatttaatcaataataaattgtaccaataacatagggtaccctatcttggtgctcggcataattgccccttaatatttctcataaaaaaagttgtgtacataattttatttatttgtttatataaattgttttagatgaagaataaaaaaatattttggtgaactttgtcattaaaataacatgccccttgtacttatatgaatattaaatatacctattaaactttagagagttatcaaaaattagtactatgttacattcggtcaattttcttaattatcttgctgatgtagcataatattatctgatttagtttcctatcctaagcaaattaatataaaaataaacttttctatgttttcactttttatcttttgtaatcaatttagtttcaagtttcaagttttaactttctttttagaaaatttagtttacaaaaataatttttatgttaaaataaggttttcattataaattagtttgaaattaattttattgtatttttcattaagtttttttaaaatttattttttttttaaaattttcaacgacataagcagtttcaaaaatttaacagaagaaatattaatttttattaattgataaagtcagaaatatat

SEQ ID NO: 48737 - DNA, 810 bp, Cannabis sativa
acagtatttttgaaaaaatttccgtatgacagtatttttgtaaaagttaatccaaatttcagtatttttgtaagtttcccaaaattaaatttgaagggtcatatatcttctcagaaatgcctatttttaacactctttaccacttttgtttttaagaaattacataaaatatgattattttttcttcagttagtttagtaaatatgaaattcttaactttgcgtattttttttatgattttttctgtttattttttttttcacatttttattggatttttctttatcgtttttagaaattgatagtggtaattgactactaccaaatcaattttcataataatcggttaccatgatgatgttgtggtaactgatttaagatagctaattcaatactaatactaatactagttatggtaaaaattacaaaaaaaaaaaaaaaaccaaaaaaccaaaaaccaaaaaaagtcataatttcacgatattttttttatccatgtttataatttacaaatttaaatttctatatttttttgtaaatctccctatttcaacatttttacaaatatagggatggttgttttgtggtgttttaattttaacatctatgttatttgcaagttattttttatgttatttttatattgttttcgataaaaatgtaaattaaaaaaaaaaaaagcaagaatatgaaaacaataattttaaaaaatatatatataaaaaaatatataattttaaaatattgtgtaaaatatcttagattattattggaggaaatagtaaaagaggtagattccttgataaaaaa

SEQ ID NO: 48738 - DNA, 805 bp, Cannabis sativa
tagttaaggttttgtattaaattataaccattttaatatcacagaacagaacatagaaacacacaacacttagcaattctaattaacttttaaggcagtaaagtttaaggaaacaaaaaggaaaaatcataatgtgatcaaaattaaaatcttgtacgataacaagaaccaaattcctcagtgtgacaaaatagacagatagtagcatgattcaacaatgaaatgaaatatatttatttagtcaaggaagctaaaataagagttaccaaaagagtttttatgtgtttccacgacccttcaaggccccgaaaaatggacaaggttataaatgagcaatctgagcactaagatgatagcaaaacaagcagacaacaactactaactgaagcagcaatagatgattaagatgtaccaaaacagcttgtatacatgaactaaaagataccaaaggagttgatcaacttaatccaaacatgattatctcttttctaagtatggtatcttctactaagttattttggatcagaaatgttgcagtttgtatgcattgaaaatcatgattttacaaaattaaaaaaacaaacattacaccagaactattatgttgcaatacaagtaataaaactatcaacccggagattgagttaaacctattatcttacatgaatactagctttaattgtaataaaaatattaattctttctactgctgttgatattgaagtgcagcgaccttctcaaccgtaatagtcctcaatggctcagagatcatggaagctcgactccttgtcgataattcttgtgc

SEQ ID NO: 48739 - DNA, 879 bp, Cannabis sativa
ctgcataaggataaattataaactattcttttttataacatattaatcaaatataattctaaaataattttaattaataaatatttttttataattaaaatactaattataacttcacataacttatcaaaattataataaaaaaaaataaaaaataaatatacaatgcaatttccgctattataaatgatgaaaaattcctttctaccgagtttagctctttctaaaacttttccactttcgtattggatgttatagcttccactgcatttctcagcttgcttgtctacaaaatggacctgtaggcatagaaattttttttcatctaatgaaatttagcagctacagtgacacaaacagatgaacatattataatgtaaatactgaacaccattacaattcgcagatccttaaaattgattcaaggtagaatataatcttcacatataaccttctacgatacaatatgtgaatgaatgcagcaaataatgtgaatttattatttgtattcaagattctaagtttgtgaaggagaaaatgtaggctatttcatttatatattaagttgatactgaccaaaataaaagatcaatgtcataattaactcacaattagaatttaaacattgttctataagcagtaatgaaacactctatagcttcccttgcaccaacaaatctctaatatagtaccggaatcagatagaggaataacttaaatgactaggcatgtgattttctctcacacggtttgcggtttcagagtgttaacgcagattttcgttaactaaaaatttgaacctaaatgataatttgcacagaaaaataaaaacagtaaagaaaaaagtatgaacacaaaggattttttacgtagttttgc

SEQ ID NO: 48740 - DNA, 2833 bp, Cannabis sativa
ttcttaaatcatcttttttttggggagtatcatcagtcaagtgatgatctttgtcaatactccttaaataaagtcgagtcgtcttactccattccaaataattcgaaccaatcaatttatggtccgtgattttagaaatcatgggagccacatcagaaacaactagtggttttggatttgattttgtctctgccataacttcaaaaacaaatatcaaaacagacaagacagagtcgaacaatgaagaacaagtaaagaacacccaaagacaaagtagggagaaaaaccaaactacaacctgaacaaacgcgagtaggtttaagaggaacctaaaacgaaccgaagatgattcgtcgtcgaaatctctgtcacacgcgcctccacgcgctgacgcgtggggtaggttgcagaagaaagaagcagcgtgtgagccacacacgcgaggaatccggcgaccgaactttggggtttggcagatcggcgactcagcaatccttcaaagtgggcggtgagaataaatgattcctcagaagatggttttcgaaaaatgaaccctaattgaaaaacccaaatttatgatccctaattgagaaccccaatttcaaataaaccctaatttcgaattttgaattccaatcccaaaacctgctttgataccatgtaaaatatggtaaatgaattgtagattttattcaaaggaatagtctgtatttatatacaaagttaggagactaaaaaggaaactacctaaatacaattaacactaaattttttacaaccaatatacagctaattatattctaacataacatatattctttcttcaacgttccacccaactcaaacagataaagataggatcttactaatgaaaattcacaggttacaatttccatgataggcaatgtaacatttgggtgaattttccatttcacaaaatagtgttgaccattttcttgatagagattcagtagatagaatataaaaaggataccgaacaaatttggttagttggttatataacccagctaatgtcaaggcaaccactcccttgcgtgctgagccctagcctgctgtatcaccaaagataatttccaaaacccaatatcctactatgttcaacttatcaacagataattttttttatactagaattcccgcctaaccttacaatatatggtgagcaataaattgttgcaattgctatctaggtacccagagggactagaacctcaaaccatgtaggagcaaaccacaaacatttgagctacctcttggtgtcaacaattaaaattaaacaaccttcatgcacacaatagtttcaagatattacattcccaattcccataatttacaagtcattcttaaaatccagcccactaaaaatgaaattcaaaaaaattatctacctatcaagattgttacatactggatcgtaaactaatatcaccagattttgggtcaacttctaagcacaaacttcatctaggaaaccttgatgtttctgatacacatgacaatattgatttccgctctcatgctaaaacaggaagatctactgctacgcctcctagttggttcaagtatgccaagctggccacatagaaagctatagtactgctgtcatgtttacatgtatttccttttatctggtataacagggagaatttatattttcagtcagtcctcggaactagggagaataatttgtttgattagtgtagagtgtgagcagtgaggattcattctggaatttgtaattgcccttggatcgatcagtggagagatttctagcctctcaaatgcaagactattttccagcatcaatacacttgacaccaaggttattcagtcattactattgctgtgtatatcagctatctaattaatatttgagcttaaatttgatctaaaaataatagcttaggaatcagcatggaatgctgaacaataaaagcatgtgtgaagtagcgattttcttttcaattggaagttaaacaaccatcattttatacaaacaatagccaagcaaatcaactgcccaagaatgaccaaacaataaagatcaagtaaattacagaaaccaagtacctttcttcacagcagaaatgaattagcaaagattatgcataccacacagagctagattgcattacagaaaaaaaaaaataaaaaaaaaaaaaaaaaaacaggaattttaacaagtttatcttcctcttcatatttggcagatggttaaccatttttaattattgttaaatcaggagtttctttgactttattctgtctactatatgagttatttcaatccagatatgtataagagacataataatataaatttgttacttttttatgaccaacagtacaagaggacataatataaagattaaacaaggaggtattacaaataataaaagtattttcatggtttggcatgtgacttatgaattagatactgaacctttgaaggtccagctgcatgaagaatgttgcaagcttcacgaccatcactttcagattctatcctgtaacaggtaacacttgtcaatttctgttttgtaatatacttccttcatactttgataacacattattaaatcataatatatacgggcataagtaggtatcttgtggagatcataaagaagtaaaatttttttgtgaaatagaaaaatttaaaacatggtttttgtgttgtttgttttgtttgttatgtgttttattgtgctttatgctataacttttgttaccatggtttcctccgccacaaatgagggttttcaatatatttgagtgacccctttctcttttcgaaaaaaaaaaaagaaga

SEQ ID NO: 48741 - DNA, 948 bp, Cannabis sativa
  modified_base (76)..(79): a, c, t, g, unknown or other
  modified_base (473)..(487): a, c, t, g, unknown or other
  modified_base (878)..(880): a, c, t, g, unknown or other
gagtgcaatcccatcaattattataaatatattcctcagtgggtgggaaactaagtttaataataataataataannnnaataataataataataatagggaagatgattttcatcaaaatggatttttattttaaatatatataaatatgtatattaagagaaggaagggttatgtgaaaggcaggcaggggtatgggttcttggtgagaggtcattctatcaaccaaccataaatataaatgtattctatgatgctttgggtgaagaaaagcaattagacagaagatcctattttctttttttaattttaaaataatataatataaaaagaaaaattgcccccactatcgatatgggtcctacaaaagggtttcaccacactgactatgtagcccagcccactcaaggccatcataattggtgtaacagaaagctccatatgttttattactcataataataataataatnnnnnnnnnnnnnnntttttttttttttttttttgtaccttttaagttttggttgtaattttttattggggtttctatatgattttgtgttgtaatttaggttacagcgctagttgcaataagaatttttatgtaaaattacaaaaaaactattttaaagtgtaaaaatgaaaaatgctcttttttattttaattttttgtttacagcacgtaacgtttagttacgagtaataaaatagaaaaaaaaatccttaataaaagaaaaaaaatcgtttttattcaattttttgttttattacatttttaagtatctaattatttgttttttccaattttgacaaaataagtattacctccaagggaaaagaagtcattccaatactaaatgtctttttttttttttttnnnaaaaaaaaaatatttttttttaaagacactttttttcttgtgaataaatatttttatcaatttgtgta

SEQ ID NO: 48742 - DNA, 1208 bp, Cannabis sativa
cttaagtaagattgtaatcttactctaatatccacatacttacatatttaataaaatatggccaaataaatatcaataaaattttttgggatattacaaataatattgatgcttattgtattgtaaaaaacaactttggggcttgataagaaattagtgtggaatgattctcttccacctgcttgtactgtaacttgttcttcatttctcttttaatgaaagttacaggttttcaaaaaaaaaaaaaaaagctttttagaattttatatttcaaaacattgcatgacaatgtaaattctcttgcaaaagattcctcacaagaagcatagataatattttctttttttggaaatattcttactcataaatgaagatattttattttttttattgcaaaagaaaaatactttgttcttattgctgaagtatgtttttgtgaaaatggaaactgttgttctcatcaaatggggatttatactttttttttggaacaaaaatggggatttattcttttttgtaatggagaatggggctttattcttattttcacgtgttcctgttttgttttagtgttttacactgtcatttaaatataactatgaacaactggtcaaagtgaaagaagtgcctatgcactatgtaaagatataattttacatatttgtaaattgcacatttgttaaaattaacatttttttttttggatatattatgctaaaaatacaacaatctgttaaattatcttttatttctttgttaaatatatgtgaaagttagtgacattttgatttaaataattaaaaaaaaaaacacaattcttttatttgtttattttttatttttaatgtaaaaaagtggaattccaacttaaacttcctttttacaagtagaagggtaaaatcgctaaattaacagtatcaccatccaccacaatattattttgggtagttcatggactctcttaagatgaatgtattgatgtatttgtttcggcatctagaaaaaaatttagtctaattttttttatattcatatacgttatagctatttaagatatcatataaaattttcagaaatttgaaataatttacaatatagaaaataattttcaaacagtctattttacatgcgtataaaataaaatagtaacgcgtgtaatataatatttgaatgcagtttttggtgtattagattttttcaaatttttt

SEQ ID NO: 48743 - DNA, 875 bp, Cannabis sativa
tgtaccaaactttctcctattaagatagtcattcacccaactttatgatttactcttttgctttatatatcttttacgttcctatctaaaaagaaattactttaggaaagtaaagctctttatgtgataagcatgaattagctgtaaagaccacaatttaagcacagtagtattcaacttttaggttccaaatccaaacactaaaaaacaaaacaaacaaatgaacagaacgacaaggagaattcagtatccaatttcttcccaaaattaaataaacaaataacaactatgtcacgataccctaatctgaaatttatagagtaagagaaagaggtaaattaaggtacagttagttagttagtacctggtaaatcccagggctcatacttccaaatctcaacctcagtgatgacctcaatgctcttttcggagccctccatctttttcttgaggtaaaaggatatgagctcctcatcggtaggggagaacctgaagccagggaacatggaggaagcagctatggagagctgcgcctccctggaagaagctcctgcttcgtccatggcggaaaacgacgggtttctctttaaacggcgtcgttttgtcgtaagagagagttatgaagagaaaccgtaataaagaagaaaagaaggaattggaagaaggggaaaatggtttatctttttccggtgggaaagaggaaactgaccaaaaacaaatttaaaatgtaattgaagttattgttttattgcaatctactctctttctgttttctcttttttactttctcattttttgtttgcgtgtcctaagcggttgcccttgtcgaagggcacgtcataagaatgagaattgctaaaatgtactcttcatgt

SEQ ID NO: 48744 - DNA, 1193 bp, Cannabis sativa
tatatatatatataagtactctattcccacctgaaattgacagctttttttctcttttctttcttacaaagatagaaaaagtgatcaagagagaataaaaagatgagtagtaatctgttacactaatttatttatattaatatgaaatgaaatgaggatgatgatgatgagagaagtgagtttatgttcaagatgtcaagattgtggaaaccaagctaagaaagagtgtgtttatatgagatgtagaacttgttgtaagagcaaaggctttcaatgccaaactcacattaagagcacttgggttcctttatacagaagaagacatcatcatcatcatcataatcttaatcaatatcaagaaaatattcaagatcatgagtattactatttcaacactaccaaaagactcagatcatcacatctcatcacttcttcttctactattaataataataacaataatattctaaacccaattacaacaacaccaataccatcttcctctacaccaggtaatatatatatatataaaaaaatataaaatatatgaattatatgtatatacatacccaattgcatataattcttcttcttttcctcttctactactactactgtttacttaacctaatactatatatgtttagattcatcataagaaagggatatatatatatatataagaaattatgtacaaaccatagaaatgaaaatcttgtattatatatataatctaatatacaacacacacaattaatcccccaatttgaagggaaagtggtacgatttcaacaattgcatattcatcttcttcttcttctactactgtttactcaacctaattagtactatatatatacacaaaaaagggatatatgagaaattatgtacaaataatctcactatatatatgaggaatatgaaatcatgtattatataatctaaaaaaaatacaacacaatcccctatttaaaggggaagtagtatatatatatagctcattcagtgattttctactgtttacaactcaacctagctataaatatagctatatatacacatacctatatatgtttagattcaaaagaagatcaaaagaagaaaatccaaacaatacagtgaaagtattatatttttttatataaatatatatagttaattaatttcccatttctctctcgatctaagactct

SEQ ID NO: 48745 - DNA, 1169 bp, Cannabis sativa
gtcacataataattatttataaataatcacaaatttttaattttaatcattaattttgtgactagaaataatttttttaattatcatattagttttcatgaaaaattagttaagccatttattagcttggacatattgaaagagacaacacattttttttcttgttttatttttttttattttgtttttgcagctttatatagacctttcttgatcacgtgcctagctactaaaatccaatcataagattttaattcatattgtaatttcttatcaataatcacttttctcttatcacaaagattttcttcaactctctcaagattattgatttgaccaatcggagcttcaaaagtccgatcatgaaaccctagcttagcttctatatatatatatacataataaagttcgaaccctaatcactccatactcactcattttcttccataataattctcattattatcaccaaaacaaaaaatggggagtaacaagaaaaagcaaaccctaatttctactacaaacgttgttgtaaaatcagatcttgatggcattggaagtcactcaccaatagtttcttccttcaacgacaagattcgtcccgtgctcgatgccgttgacaagctcagaaacctcgccgtcatggaggaaggaatccagcttcccaccatcgtcgtcgtcggagaacagtcttccggcaagtcctccgttcgagaatccctagcaagaatcaacctgccacgtggacaaggcatctgtacaagagtcccactcataatgagactccaaaacagctcgaattctcagccggagctttttctagagtacaaccagattaaagttccgaccaccgaagaaaatgtctccgaagctataaacacggcgactcaggtcattgccggagatggtaagggaatatctaagacccctttgactctcattgtgaaaaagaaaggtgttccggatttgaccatggttgaccttcccggaataactagggttccggttcacggtcaaccggagaatatttatgatgatatcatcatggagtacattcaaccggaggctagtattgttggaaattatttgttctaaccaacacactttaagaagcaaaattaatgttatatgcaaattggtatttttctaaaatttattattttatgtgt

SEQ ID NO: 48746 - DNA, 3798 bp, Cannabis sativa
gcctttggtttagaaagggggttcgtctagattcctttcaatggtcgaatatgatggaatttggttcctggtggtgcagtattcaggattttgaatttcagttgttcacggcttgtacctgtgagatgctatggaaatggcgcaacgatatggtgcttaatggcaggcagtgtaatctggatatggtgtacatcgactgcctgcaaagaatgactgaattcctacaaaacaagttatggtttgatcaatctgatcctcctgaagttgcccctttgctgcaacaaactccaattagcaatgatttctggcgcgttcaagtggatgcttctgttgttggcaatgaagcaaggtatgtcgtgatacatctgcaagtgtagactcctgaatcgtgggtatatgttggttttgcccatgttgaaggcattcttgaaggataattgtgggtatctgctgcaatggcctttgagtcaagagaccttccttttggttggagcacttatccactttttaattattgtttatccctttgtaagtccttttacggatgttaaagttgtttttattcctaggaaggagaatgagtgtgttgattccctagctcgttgggctagaatcaccaaagttaagaacactggttggttaagggaagtggcccccttttgtggctactagtttctgtttgccttaaataaaactttacttataaaaaaaaaaacctcatcaagtcgccattactaaaggtctagtccttgcaccaactttctccactaatttaggacaacaattgactaatctttcaccagatcttactgctcattatcagtaactaatctttttattaagctaacaactccaacaatagaatgccaaatctgatctagcacctgatgttgttgcttccaacctcaatggtaacaattttatcccttcatgtttttggattgtgggcagtagtgctactcactatatatgcttttgttctaatcaattttcaagtttcaccaatgttcctcatcccaaacatgttattttaccaaatatttatttgactgccattgctaatattagtacagttcacataaaccaacatattattttaaataatttcctgcatatctcctcttttaagtacaatttttgttccattaattcttacttagaggaccaaaataatatagtgttcttcactaattcttacttagtgacatggtcttcttaattcagccatacattctcgcctgggaactaaaagatttagccttgttaccttctctgtgatacccttattcttccgtagggccctcacttggttagccatattggcatgaaagtctttcattgccttcattgcggctgaatatggaaaaagggaaagtaataaatattagcaagaatcacaagttatcatacgcacaaaagcaaaagaaagagcaaagtcaaaatgcgaatagagatccaagatcgatccctaaaattggattcagagcctttagatttttccaaagaaaaggcaagtatgttgtcccgctctaagaaactttcacactcgaagaaactaggataatgaataaggatgaaggagtctaacctagttttatgagaaggagggatgaagtgtgtgagactctcaacaatctcgtcaatgcaaaggagaaattgtttgacaaggtcctcggtaactgcttggagaggtctccactagaccctatttcccataacatgtagttcacagacaaaagaattaggaacacaagaaggaaaacaaagaagggtcctaaaattgcatcgtccgacaccaaaaaggtccccaaacatatggaaattagtcacgacaacatcattcaagaccttgccaaatcccgcataaacagcggtgatggagagtggaaaatgcaaaattatcggaattaaatttccttgaagcatcacaaagttttctaggttcgattgtccctactaattcttaaattttagacagcaacttgaaatgtcaccctgcatggtggcgcgcaacagattaccaatggtaaccccataaaaaacccaaagccacctagcattacaattcaaaatatgatacccagaacctatctaccaagaacacaatcacaatatgggagcaatgtggaggcacttagttataagagtaggtactgggggtgttgggctttgaaaggttgaacaaagctttgccttaaacataacattttaatggcattactcatttatgttgatgacattgtcattccagtaacaatggtgttgctactacaactttcaaaaaaaaatatggaccaaaaattcaaactcaaagatcttggaccacttaagattttctttgagattgaaatagatcgatcctccaaaggtatatacatttccaaattgcctttaattttataattgctcattaaaactagttatcttagtgttaaaccagtttctactcatggaatacaacttaaagttgagttccaccgaaggatctttgctctccaatcctacttcatacagaagcctcatagtcaaactgttataccttaccatcactccttcagacttctcttttgcagttaatagactaacccagtatttggcttctcctcgagtaccttacctttaggttgcttaaagtatactgcaatacttaaaagccacacctggtcaaggcttattctttcccaatcaaaataattctcatatctcagcatatgctaaaaccagtctcaacatcaaaattttctcaaatgcctattggggaagttgcattgacacaaggcgttcgatcctaagttactgtgtctttattggaaactcccttgtctcttggaaattaaaaaagcaaccctctgtgtcccgcttatcatctgaagctaaatatcgagccacgacacatgatacatatgaaatcacatagattcttgccatcttaaaagactttagtattaaacacaacctcccagctacacattactgtgataatgatgcaaccattcacatctcgtagaaccctgtttttcatgaacgcactaaacttgttgacataggctgccatattgttcaacgtaaagtaacacaatgaaccatcaagatgctccatctcccatccaaaagcaacttagctgacatcttcaccaatgtcctctttggagcttctttcaaggacattatctccaagatgggtgtcaataatctttacactccacctcgaggaggactattagatattaagttagttaggttgcttttagttatacacatggagaatttcttgttagagctgttttgtttcagttattgtaacaaaatctcaattgagtgattcttgatctcttgtagtctatataagtgtacttgctaatttccttctcaattcacttagaattatcagtaaagaaaagttctcttatctgattttccaaacttaatattactatttcaacctattactaaactacataaatttataatatataagttaatatataatattaaataaaatgtaaaaaacatcgaattgctttccattccatcacgagagaagatgaggggggagagactcaagagggagggtgagaatgtagtgatgcaaaaagtgaataaatatatcttgcggggcaaattacaatatatatatactagtaaaaaatcacgtgcgaggcacgtatactaaattttatgttaggtataatctactttatttaaaagtgatacaattactaattgaaaaaatattattagttattaagtgattattattatgtatatctaaataatataatttataatgttgacaat

SEQ ID NO: 48747 - DNA, 560 bp, Cannabis sativa
aaatattatttatcagatatattttttaaattaacatatgatctttctataaatacgttttttatgtcaatttttctataagaagtttaatacagtgattgaaaaaagtcactgcttataatttttataataaatgtgtgatggaaaagttgttaggaaatggcactataagtctttcaacttggtctctctccctaattaggcgtttcttgttcattcattcaaataattaaattttattaggtatgaattgttcttttctttgggtccaaataaatttgatatctatttaagatatttttatgtttttttccttagaattagaacagtcaaactatgagaacacaatatgattcgaaggggtgctgtgcttctatatacacattttttttcccacattcattattatttttttcttttttgacaaagtgattaaaatcactcatgaatttacgacgcccaagtctgacactggcgctggaacctcctcgaaccaggatagctcatcttctaactgcagaacatgatttgccaaccatggaccgctaaaatcttagagc

SEQ ID NO: 48748 - DNA, 1815 bp, Cannabis sativa
  modified_base (1765)..(1783): a, c, t, g, unknown or other
aagataatgctaactttaaagactcgaaatatagggtaattataacctaacaatggaagacattctattctcattagacgtggatgaatcagcattgaaaagttggtggagcaagggaaatatcagcaccggtattcagttcaatcgcaatagaagttgagtgtgtcatctcaacttgtgatggaggtattgttgtgttggtgtgattcgaagatgagacatggatgtttgttggaggagtaggaattgacaaagcaacataactacttagtgaatctaagaacgtgacagcatctacattgcagatcatctccttaggtattggactaggacttaaagctggtggtaggcttcgaatttttgtgcgtgaaatagagaaattaccaggcctaccagaagcatttgagacattggcaacattattcttcaaaccattaaccacaagggtatgaacagaggatgaagcaagttttccttgagaagccagatcaagaacaactttagaagagaagttgttctgttgtgaagattgtgaaggcagagtttgaactaagctgtcattagagaccataatgcctttgcccttttcacgagtggtgattgagtgtggcaaagcaagaggttgtctagtttgagggatgataaggttaattgtgttgcgagcaaggcatgtcataaaaggccaaggtcttgctttagaaaaattttgcctgtatcaattgtatcctgaactaggcagagccaatccttccatccaaggtccataagggagatcagggtctccaccttcatcaatcttttaaaaaaagaataggacatttgtcaaaaacatggcctataataccacattcatattagaaatctagtagtctttcgtaacggtattctagccatagtttatcagctatccatgggaaagtaacagttttccctctaagcagaggcttggagacatctatggcaactctaatccttagaaaaagaccccatccttcattgagagagtcctcatgaacatcaatgaatgatccgatcagattactaataacttgtgcaagagtttcagatttacttaaaaacgacagacgatagacttgtatccagaaaaaagtagtggtgtatgcttccattgaagcattctacagaacacttgggaggcaaagaatcatatgttggttatggaaataccatggtttttggacagaactcttctaagatctccttcacagccaaaggagaccatataagcatcaaattcgtaatttgatatggtcacatcaaatctttgtttccattgagtagtgatgaaattgttgaattcctttgggttgtagccttttttggaaaaaaatcctgcaaataagtcggtgggaaacaaggcgtggcggaggaatagcaatgttagtagattgataacttcacgctctctgactgagagtgcatgggacaaatcgggatgaaaggattccatgaagaaaactaagaaattgaaaaagaactgaaggaaagtaatggagagataaagaaaaggcaggtgatagtgaatagaaataatgaaataaagattgagaagcagttatctacggtggagtatggtggctagagaagttatggacggtggatagagaagttatgggtgatgggagtggaaataaactgtcaagaaacagttaaaaagatgaaagagaaacaactgccacagagcaaacatcaatggcagacaatgcttaatttcctttattttattgggtgactattcaatggnnnnnnnnnnnnnnnnnnnatatggttacatttttctttaacctgtaatag

SEQ ID NO: 48749 - DNA, 2625 bp, Cannabis sativa
acttatttttaaaaacttcaaaaactattttttgttctcatttctaaaaataaatttttgaaaacaaaaaacagaaaataataccaaatatgctctaaagctttcttctataaaaattgagtttcaaaagttttatttctccattttgaggtttatgtgacaaaatgtaacaaactaatatggagaactgaaaatataatctgatttaagacaaatttattatgcctaaatctagagtgattatgtggctaccccttcggaaaagactccctacaagggatcggttattcaattttggtataatctaagaatctacttgtttactgtctggttgatctcttctttaattactcctatagcgagaaagtttttggaggaaattatcatttggtgtggtctttcctataaaggatccgagattaagaagttgattattatctgttgaaaaagaagctttcgaaaagaataaggaggatctttgtaagtatcatttctttacggtatttagcatagtcgaaacttaacttcctatgattattgttcttgtaaaaatattgccattatgatttaagttagatttcaattcatgaatttgagtaagttcaataagaaagataaagattgattgggtgaaagataaagataatgataatttgttagactttgcatttttgtatgttgtatacgtttttattgtgaatatacatattctgattttctataataataatataagatggtgtatataattaattaccaaaatctggcctgtttcatccaagatgccaccggctgccgatgcataattaactcctccaagtatcctagttcccaccgtagttggatttgcaaacggaggtacataaggaagacccagaagagctcctacatatcaatataaattgttatattatatgttatatatatgtatattcaattttatagttaattaattaccaagcatatcagcaatagttctgccattagtgaatcttccagtggggcggcctccattaaaatcgcatccgtaaggataataattagctttggccaaagagctaaggaagttgttgttgccgttgtcaactaaagaatccccaaaaacaaacattgcaggaacttttactgtgtctgcacacgaaacaaccgtagccattattataagtatgccatgaacactcaccaataaccataaccacgatattattttcatttcatacataattacttctacactatttctaaatatatatatatatatatcctatacagtagttgctcatatactatatatatggtggtaattatatattaataattatgtgatgacttaacgtatgttacgacacttaatttgtaacgtacggcgttgtagtatctcaatgaacataaaatgctgcttttcagcttatttttgggattaaagtcattgttttggacgtcggttattaacattttcctatgttgataatcatgattgtatctctcctatgttcttatgcatgttagcatatgacatcatacatgcaacttcttccacgtgaatttcttaaccttttcctcataattttcaatagcattgctaccaacaccatactaatgtgtccaagggctgaggtattgcttgggttggagtggccatggcccccctcaatctcaacaaatatttaattactttgataatataattattatctattaaaaaaaacttttaaaaatactgttattttgaatttttttggagatatataattaaaatttataatttattaaataaaaaatgattcacttaaaatattacatataattttgtattccaaattcaatagcatttttcttttatggaaatatttgtaatttctattatcttctctgcataaaatgatatttttgatttccaaacaaaaaaaaaaataaacaaaatctttttgatctagaaaaaaaaaagtaaaatataataactttaacacttcccatgaatatttttggaaattttgactaattaattactaatgtatattgaaaaatattgaaaaatgttattataattattaaaaaattcaatgttaagtattaattattatatgatatgaatttttttatgtaattactaattattttgctaaacaatacaataaaaattaatatgaaattatcacttttacatcgaaatacataatttattttaaaatataatataattattagaatgtataattaggaaattaatatcatagtaattatacaattatatctaaacactaataattttttcgtcctaactctgcccctgaatgtgtcttaagtatagttttggttatttttgagttgtgttttttaaatatttttaatgagcttagtttcagttagtctaattttacattttaatttgtttgtgttttcaagttttgtggataaagaagaattagagtaaatgaagaaaaaatagtttaaaatagaagaaaaatataaactttaatgttggtgtgcaaaaagtggtgtcttcaaaagttttgttaagtcttggcagatttttgaagataaaactaaagatttaaaaaatattgagttagcgccatgacatagaaagttaatgttgcggcgctaaactagaaaaaattgatt

SEQ ID NO: 48750 - DNA, 683 bp, Cannabis sativa
acatggataagcacagtctatttctttggttatcttcctaccgaagtaccaatctccaacggcttctgcaatggtctgtacacaacacagtacgtttatctaatgaaatgtattacatatatccaaaaacatagcccatatatttgctgcaaatataaaattagaatgaaattttttgtcaatttggtttgagggttttaaaatttttaatgttatgcatgtagttttcatttcaaaaaccaaatagtaaaaataatgcaaacaatattaattgagctggttttaaatcttgtagtataatcatcatacaagttgaaaagtaatccttcattattgattacatacaaactttgtcgtgattttcaacaaagctaaatatacaaagctaaatatttttcctcgagaaatactaaaaaaaatttctagtgtcatgtttaacatggtcatgttgttattagtgtaatttaatattgaatcttatttattttacattaataatgattatagaaaactgctaactattcgtagaacttcatagaacgacactacataaaaatactaataccatttataactaggggtgggcatcatccaatccaatccaattgaactgaaccgatccaatccaatccaattacaaaaagttggatatccaattacaattggattggattggatgttaa

SEQ ID NO: 48751 - DNA, 1137 bp, Cannabis sativa
cttgaatactcaaagtttttagtattgtttattttccttcaacaagtgccaaaatactacattaagtagtatgcagtttctttaaaactacaaatcttattttaattaaatatgattgactgaaaaaaaaatagtattttgacacatatgataactattacctacatatctaatctatatttttgtgtgtgtatcaacaaaatacatttctattcaaagaaaaaaaaatatacatatagcaagtagaacagtactcttgatcaataaaggcactagtattaacaagtagctgaatgggtcctcttgcaaaagggaaagaaaagaaaaaactataaaaaaattgagattttttttttggagaatttaattaattagatattacacaactaatagtctaataaaaatgctatgagttgaagatatttatcaactagatcaagaaaattgtgtataattaggttggtgttaaaatgcattttttttttgtgttaaaatgcatttattattcctttatgtattcatctagcaattcccaccaaccacaccctctccctctatccttccctcaaaccaaaccaaacactatatagaactttttctctagtccacacttgtttaaagccacgtagcaaaaatttccatcctttgatcatatcaagatcaacggtcaagatttgtttacaactaaccccctttgcctttgtattgtgggctaacactctccactctcatgctcacctacctcccatgccataccatacaattataaagtctttcttcagccatcacatttgaaaaccatatttatttatttatttatttttccttctttccaaaattcacctatataacacccacatatcacctccctatactttcaagaaaatcccatatcatattttcttccaggctttcattttttcctctccatatactacatacgcatttcatcgaacaccttcataactctctggtacaatatataaccgaaggatatttcttctatacaatggagacccccaccgtcgctgaaaatggtcatcaccacagccaaaacggcgtgtcgttggagagtttctgcacgaccaagccagcggctggagtctccattgatgacccgctgaactggggtgcggc

SEQ ID NO: 48752 - DNA, 3689 bp, Cannabis sativa
  modified_base (40)..(53): a, c, t, g, unknown or other
agttcatatttagggtattaataaacatacttgtgagtannnnnnnnnnnnnngtaaaataatttccaacaaaaagcacaagaagtaagtccttgagcttaattaaaaagtcttataatccatttgaaatagatgtgaaacctgaaatagagtgaatcctttgtagattgaagttggttttagatcaaacaaaacaccttggtttacaaaatgttgaccataaaataactttacatagaccacatgcccttttgttagatgattcacaagtttatggaagagagggtgataaggaggctattcttaagctattgttgtgtgatgatgatgttgaccctaagatctctgttattcctatactaaggatgggtggaattggcgaaactactcttgctcataatgtatattatgataccagtgtccaagaacacttttccttgaaagcaggggtaactgtatattacaattttgatgttcttaaaataacaaaaattattttagagaagatcactgaaaaaagatataaaacgaatgagctccatcaacttcaaaaagacttgaatgatgttttggctgggaagaaatttctttttgttcacgatgatgtatggaatgaaaattacgagttgtgggatcttttgaaaagctcttttcaatcttgcgcacgaggaagtaagattattgtcaccacacgtaatgaagatgtcgcactgaagatgaagaccagagatgttcaaacttaccagcttaaaaagatgtctgatgatgaatgttggaagttatttgcagatcatgcgtttgataatgtaggctctaacgaggtggtgttgtccgagttccaagaaattggaagagaaattgttaacaagtgtaagggccttcctttagctgtaaagtcgatggctggtcttttacgatctatgtcaactcctgtcgagtggagacatgtactgctgagtgatgtgtgggagtttcccaattctcacaatatcgaaattgttccagctttgtggttgagttaccgacttctgccttcttatttaaaaccatgtttttcctatctttcaatatttcccaaagactacaattttggtgatattgatagagaaaaactgattttaatatggatggcagaaggccttttgaaacctcaaaaagaaaaaagaattgaagatgttggagaagactacttgaatgctttaatagcaagatcattttttcaaagaaacacaagagatcattctctttctatgcatgatctgatgcatgatctagctatgtatgtatcaagtcaatgttgttttatttatgatagttgtaaggacttgcacaagcctagtagcaaaactcatcatctatcatacatgaaagacttgaaagatacaatacagtttgacaacttgtctagagtgaagcatttgcgtagcgtgttggctttaccaatgtcagtgatatactctacaagaaagaccagattaacacatgaaattgttgtaaaggatggaggatgcttaagagcactttctttgtcagaatcttatatccaagagttgcctaattcaattggaaatttaaaatatctcaggtatttggatgtaggcggcacagcaataaaagaactacctgcttcaatttgtgtgttgtacaatttggaaacattggtattgacatattgtaaaacactcacacaattacccaccaacatttcaaagttaatcaacctgcgccatttaatgatgagagacacttgtttgaaagagatgccgccaaggatttgtgatatgatgaatcttcaaacgttgagtgattttgttttgtgtgaaaatgacggatctaggatcaaagagctgagtaagttggagaatttgcatggaagcttgcagatttcaggccttgtacatgttaaggaagtgagtgatgttttggaagggaacttgaagaacaaaaagaatttgactgagcttattttaagatggaacggtgaagcagatgatccaggaaaagaaagagaagtacttaatgcactccaaccacatgagaatttgaagaaactgaaaatacaaggttataacggcacaaacttaccagattgggtaacacaagcatcattctctactttggaagaggtttatctagaatgtaaaaattgttgcttgtctttgttatcatttcagctacgacgttcactgagatatcttcatatagcctgttgtcgaagtgatattcagggtatttccttaaataagccatttccactcttagcaagattagagctcgacggaataactacattggactggtcttttacaaatacaagtgaccaaacatgtgagatttttccttgcttgaagaaattatatctaagaagttgtgggaagataaatatggcattacctataggtaactttccatctttagaatattttgaaattcaagattgtgatgaattggtgactatatttccaccaagtaacactcatattgatgttgcatatccctcccttaaaaatttggtcatatatacttgttcaaggttggagtcattttcagaattaggattattgccctttactttgaaacgtttatatatcacagcatgtgattgatgtgctcatagaaagaaaatcaatcgctcgcatgaaatggaatttacaaagactctcatcgttgactgagttagaactttggtattatggaggagccatggattcatttcctgaagaattgttacttccaccatctttaagttatctgatgatcggtagatttgataagcttacaactctgaatggcaaaggttttcgctgcctcacttcacttcaacgattggaacttcttgacttgagcaagctcgagtgcttaccagaagaaggactgccccaaactcttactactttgaggatagaacaatgtcctctgttaagtgacaggtgcaaggaaagaataggggaagattggcccaagattcaacacatacctatcatatacatatcttagtaataatgagtctcttttactcaacaggtaacttttcttctttatttcaatttaaatgttctgtaattgctaagtgtgacattttatttttatactttttattttgttactagatcaatgagcttcttcaacttttatctcttgatgctgctgatcttgccttcatgggaaatgtctttggcttgactttcagagggttgtcccgtttacttgatgttgttacgttagttggatagttggatagtttgtcatttgtcttaaagagtctttacaaacattgttaggttaatgttcgagtgaaacctatggtgtgcttagaataataatcttgtacatgaagtgtaatagttatgcactaattgcactttttgtctttggtttgtgagtgattttcttttgctttagcttgtgttattgttttttttttgtggtttatctttacttctgttgtgttgtgtgagatttgtattttttttttcttttgtttttgtgttgtttgttaccacaatattcttccgagaggattttcaataaactcgaaaagagatctttaatggacatgtgactgtgtgtaaattataaaataagacatatttatttagcataatcacgtttcattcctatgtcaaccaaataaagtaatctttatatttctaaacacagtaatattgttttcctaggtttataattcc

SEQ ID NO: 48753 - DNA, 1825 bp, Cannabis sativa
atataaatacttaaaatattaaatttgttgctaataaatatcagaattcgaaacatagtagcataaatctttaaatttctaaacttaacagttttattggcacccaatttaatggtcttgaacgaagaccaagccaaagaataagaagaagagagatttgagtttgggtttgattcatttatagtttaatttttactttgatgtgtgttaagatttgggttcgaattttattgtgtgtgtttttaatttttgagtttgactgttttactggggttctactgtttgagtttgtgtttatgaaatctgtttttttctttatttattttcataggttttgataacttaaaatttgatgttgtttctattgattattaggattgagagttcaatttttcatacaggaattaaaatttgccttctcgtttcattgattggaaaatattaatagaaagtttatagaataaaaattttgaatatatgaaaataaattaaaaaatagtatttgcatcgagaatcaaagtttattgttaatctccttacaaaaaaaattattgttaatttgtaaagataacatggttggaagaagatggaaaataataaataatcgatttttatttcacttaatatgtatataatattttttttttaataatatgaatttattttaattaattttgttttttaaaattattttttctaaaagaattattagtttggccaatactatatttgcatgtggcactcttgttgattaactaacaaaacgttaaattgagtgttaagtttagaaatttgaagatatcaataggaactacaatgatgacattaactttatatgatcaggatataaaaataatgtactatagaaaaatttgattcataatctcacacctgtttcttctacataatctcacacatactttttttttttatgaaaacgggggtgtcaacacacccaattcattgcaaaaaaaaaaaaatctactacaagcacaataaaacaacagagaaataaaaaacaccaacaaacagaacaaatgtaaattcaaaaacagacgcagcaacaaaaatcgaactacagcatccataacactcaaaacagcccggcttaacctgcattctttttccactttacatagtcattcaatacctcatgatccatgtcgctgtactatagatacttcctgtgactcgagcctcccttgcccgtttcgcaatgttgtgcgccatgaagttacatcttcgagagacatgtccaattttccaattttttaatctcctgcaaagctagtgaaatcgcctcctaagatacactaggttgaagtcgatcccctctcatattcctttcagaatgcttcaacaacccggatattatcactttggaaaataactcgctcaatcttcatttccaccattaattcagctgccatacacaccgcaaaggcttcaccaatttttggatcagctgtgtgtcgcctctctattttaatcaaaataatagatccctggtcattacgcacaatggttgccgccaccatttccccatcatcataagcaacatcacagttgcaacaatacctggactcagaaggggggctccaagcacaaaaatcatcaatagcattagtggccactagtttatgctccctgattttactattgacatttgttataacctgccaaaccatggttcgagcatgaccacacaccacagagttcctttctctccacattgcttccactatgcacagtccaacaatcattacatcctcaaaagaaatgtttggaggcctgttacgcccatctaagtgttgggttttatgcc

SEQ ID NO: 48754 - DNA, 1476 bp, Cannabis sativa
ttcttgttaaaacccggagggtacccatgaattttataacacctttcgatagtgtgtccaaggatattacaatgagtataaaaggggcggttcttcttaggatgttgagtctttgaggtctgattgtcagatttctggcctgcattattatttccttgaaaggcaaatgccatagcagggttcgggttactggtatgagattgagtgcctctttggtgctcttcttgagtaacaaggtgaaagactcgacttatttctggcaaaggatccatgagaagtatgcttccacgaacttgtgaataagaatcagaaagtcccattaagaaggacataatatgttccatgtgatagtgatcttggagtcttttcactcctccacaagtgcacccattgcaagtgcaagatggcctgaaattggtcaattcttcccatatagttttaagtctagtgaagtacatactaacagtttgattatcttgtttgagattcatcaaatcttttctaagattgtaaacatgggggccatttctttggtgaaaacggaccttaaggtcattccaaatggcagaggcagattcgtcatataggatactagatgaaatttccttagaaacagaatttagaatccatgatatgacaatattattgttccttatccaagcattgtaaagaactaaatcagagggtaagggtttaggaattgaaccgtccaagaagccgatcttgttcttgacggagatggcgagttgcatagccctgctccaagccacgtaattgtcttgtcccgtgagaggttgagagaccaaagtgtgtccaggattgtctccatggtgaagataataggggttagcaggatcttcaataggatttcttgaagcagagacttgcagagaagaaccttgagcttctccaatggcggtctggatcatggcctcatcttgagtaccttgattggcttgattatcagaagacattgcagaaaaacaatcgaaagagaaacgattgagattgagcaagaaacgagagagagatcagcggaagaacacacagccttgccggagaagaagaacacggcttagctggggaagaggatcggacaggaaagtctaactttcctgctctgataccatattgcgagaaagaattgagagcattttattgatctgaattgattaagtgaacaacaaatgaatgtacaggactatatatatacagacttacaaccaacctaactaactctgcaaaagaccagtaggagttagttaaatttcttaactaacttaactgatatgcagtagaaaaagaagaaagaaagaaacaacagtaaaaggacaaaaacagaaaataactgatctgcctaaactaaaatatacacaaattctaatattctaatacttgtttgagaccatgtgaatctcccaattagcaatttgctactttattcaacatccttgaaaacaatacaatttccatttc

SEQ ID NO: 48755 - DNA, 839 bp, Cannabis sativa
tctctctctactgcattttttgtctttagctttttcttcccaaaatacaaaagcctttgtctttataaaaccatttgttcatgtcctcctcaagtttttatccaattttttagtctccgctaccataggccttcattgagagataatactctatggtcaagtccacacattctcagtggagagcaacctttactaacacttgctcaaagtcaaagcattaagattgacaatcaacggtgatattgataaatttgaccaaattttttcggccgtttttttgggaattgcggtaattcagcgaacattctgttataatatacttgtgtcaaatctacacaagatccctttaattatttttaaggctttaaatgctaatcatattaatacaatgttttttctctctaaacttcaattctttatttttggaaggtacgtgatttttggacacaataataatagggtcatatttggaatgaaaattttgtccttgtgtaattaatacatattaggagtatttttgtccatttgggataggtacggactacgggcttatttacccaaaaagtaggcctgttcatcgaattcggcaattcggaccgaccgcgacaatccaaaccgttgtagaccggttagaaattatttttggtggttcggttaattcggacagtttactgcatagtagttcagttgcggtttgtaataaatagttaatggttaaataggatcagaccgtttataataataattaatttatatattttttatatatgactatatatataatgtatgtataattttaaactttttgtgtttcaaaaatctgcatgaatgttatattt

SEQ ID NO: 48756 - DNA, 1645 bp, Cannabis sativa
tgagaattgaccctccactagagtcttgttgttgatactgtttgctttgctgagattgattttgatgaggataaaacccttgttattgttgattaagaaactgcttttggaagctctactgacgaccctcttggttgaaaccataattattctgatagtccaatggcgtgggcttgctccattggcaaacagtttacatctatagggcaggtaccagtattatgagatcctccacacagcttgcagacaacttgagcttgtttggcttgtgcagttaccagcttcgttaatgcctccacctgggctgtcaacttagttatcgcatcaactttatgcattcctacaatctttttagagtggcctctctctgttgaccattgttaattagttatggccatctctttaagtaattcaaaggcctcattagcacttttcctcataaaagctccaccagctgcgacatatatcaatgttcgagtgttgctcaataatccagtaaagaagttatgcacttgtaatgaatctctcctaggcttcgtaaagagattcgttgtcatgttgggtgaagttgttgatttcagctctcaccttggcaatcttcgtaggaggaaagaatttggaaaggaattttagggccaattcctctcaagtgttgatagaatatggtggcaaagataccaaccaactcttggctcgctcccttagtgagaatcggaacagccttatagcctgatagcgttatcgctaactccattcaccttaaatgtctgacaaagctctttgaagttagctaaatgcatgtttgggtcttttgatggcagtcccccaaactggactgaagattggaccatctgcagtatggccaagtttcccttgagattgtagagctaattggaattaaggaagcacttagttggatcaagcgcaaagcatgtcatggtgtttttcttgaaacctattgccttattgcagtccaagccatccacagtcaggtattgatgccttctactttatgtatgctggtgcaggactatcaacaactattatctgagttgattcattttaagttgtatttttttaagcgatctgctaataaggctgtgccattttcttgcgcgtaattcttgttatttgtcagttcgtacccttgatgtaaacaattctccatctaaattgttaaacattattttggttgatatcaatttctaataaaaatatcctttccattcaaaaaaaaagagagaaaatgtggtaattaaaatagaaagaaaaataataaaggaaaagaaaacttattatttgttgagttgtgtacgagtcaatgttattgcctcatcatattacattttatttgctgatgataaaaggaaaaagaaaacataaatattgaaaaatgcagtagtgttataattctattagctaaggcagtgtttcatggctggttttgatgttgatgttgaatatattgacccccgtatacatcccatcatccatctcgatgattttagaggtaccatcgtagaaactgtccttagcataagagaatggaacttcgcacgtcccttgtgtcacttcaagactaactcttgctctagtcttaggaggcactctaagggtgtagtcagtcttggttaaagcttcaaaa

SEQ ID NO: 48757 - DNA, 1511 bp, Cannabis sativa
tagaaataattttgtggctaaaataaaaataaaattcaagatattcattcttcaagagatcattcaatttggtgtgacaattctttagcttgatacctaccaagctataaagatatgttgtgtacttgtgtatatataattaaatcttgagaagtacttcatatcttattggagattctattcctgtagaaagctttcgttcaattaatttaaattaacattaattaattttgttcataatcatcaaatgagaatatttgacatatataaaggacaattataatagtaaaatttatatttatgctaaatcaacacttttggtgtactattttatattaccgatttatttttacattctaatcaaataataaaaatcacattaaaaagtatatttattttgaagttttttcattttttacattttaaaataatttttttttgtatttttacgaaatttcacacagatgttcctatagaaaccaacggagcaatttaaatcgcaatcaaaatccatataacaaactacatagaaattacatggagcaatccaaaccgtaaatttgaaaacaaaaaattaaaaaaatagtatatgatataatattctcctattttttattaatataaatataaatttttattaatgtatgagataattcaaaaataataaacatatacctatttattttattcgggcttcgaattatattataatgtctaatccatattattttcccagattttcctttctatatatataaatagtatatttatttatatgtataataaacacacaaccttcaaccgtgattcaatgcaagcattaattattattgctaagtgacaatgcaagtgcattgatctttaatttctgtcctttatgtatatatattataggactatgtatacttatatgtgtgtatgtatgtctttatatagaataatattcacaaaataacataatgacaataaagttgcaataaccatttaaagtgtttttggttttttattaacctaggaattaatatgcatgcaattaatatacaaaagaatttgttaaaaaatattattgatgtttagtattttctttagtatcataattctcggtatatttaagtataggtaccaaatttatactgagctattagtaccaataataatgctctttttaattagagcaaagataatatattatgatggtattaaatttatataaaattagatcctcagcccaaaagttctcccaacttctttttaatttattttaataatttttatttaaatatttatctataaattattagaaggcccccaaaaaaattaaaaaaaaaaattgtttaaaaacttatttaaattttattcacaagccccttaaaatctagagatggttatgcatcaaattattaaaaaaaaaataatactgattagctgatatatagggttaaacataattaattatgattaagagaaacaacaccagcaataataattaattaagttaatttcataatttg

SEQ ID NO: 48758 - DNA, 2789 bp, Cannabis sativa
tgcttaggcaccctacggatgcagagcaatggaagtagtcaaacacatgtcatccatccttcgcaattgaacccaaaaatatgaggttgggttcagccactgatgggttcaatttttttggtaacatgagtaactcttacagtatgttgcctggtatcttagtctgatataacttacccccttgaagtgcttgaaagcggagtcattgatgttgtctctattgattccagggcgcactgcgcctggaaaagacatggatgttttcatgagacaattgattgatgaattgaaagagttgtgggagtcaggtgtccaagctcgaaatgcttataatgagattgtatttacaatatgtgctattgttttgtggaccattaatgacttcccagcgtatgctttgatgtctagttggagaaccaaagggtacaaggtgtgccccactcgtaatgaacacacctcttccattagattgcgcggcaagattggttatgttgggcacacacggtttcttgaaatggacaacacatggtagagaagtaaaaaatacgatggaaacattgaggaaagaccacctcctccagaattgttaagggtcaatgttttagctcaactagaggatatacaattttgtttgcccagaaaacacaagatatttcgttgagtcaagcgtaaatgttctgtatctgagctaaattggtcaaaaaaatagtatattctttgaattagagtattggaaggacgagtccctcggatataatctcgacgtaatgcacatcgagaaaaatgtgtgcgatagtgtccttggaactcttttaagtatcaagggcaagtccaaagataccaagaaagcaagactttatttggaagatctcaaaatacatcgtgaaatatggttgtatatgaagatcgcaatatgaattagaagaaactgtctgctagttacacgcttagtcttcccgaacgatgtgaattttacaaatttatcaagtctgtgcaattcccagacagatttgctacaaatttagagaataatgtgaatgataatgaagacaagattgttggcctaaagtctcacgacttccatgtgttgttcaaatgcttgttgtcaggggtattcaaaattttttgaagaaagaagtctgagatacaataattgaactgtgtgtattttttaaaaattgtgcatgaagacattgaatgttgaagacttggagagcatgcaaaaaagtattctagacattctttacaaattaaaaaccatttttccaccgatattttttgacacaatggttcacttagttatgaatttaccttaacaaacgatacttggggaacagtgcactacatgtggtgtatccaattgaacgagccatatccgtgtacaaacaatatgtaaaaaattgttctcgaccgaaaggatctatttgtgaaacttacatagttaacgagtcattaaacttttgttccatgtacttttgggaagttaaaaatcagtttaactgaccaaattgaaatagtgatgtcctcccaagtaagcctgaaagagaattctctctattcaagcatgttgggtgacccattggtaagaggaccatagtgtctttaacaattatactgaagtgtaaaagtatatcaagtaagatattttttgaattcttaatttacttttcttcactcacgatcttgtcttgcaaaatctatttatgtgtagtgagcatatgaatgaactataacttagggatgattaaaatcttaacacagttgaagagaacgagtttccaagttggttcaagtctcaagtgagtaattattgctttccaatgattctttcattcaaatacggcttcttgtactagtattgcttacattttccactaaatgataaatcaataacctccaagtggataaccttggggaaatatcagatgagttttacgccatcaaaaatctctctaatccagcatgttattattatcctgaatgtattgctaacggtgttaaattcctcattgaggactgggattataatcgtaacaccaaaaatagttggtgcttagaaaaggtggataaaaatttttatggcgtactcaagcaagtctacgagttgacttactttaaagattatagtgttatcatttttaggtgcaagtggtgaaacacaaaaatgatggttttttactagtttttgtctcccctgtcaatggtaccaaaatgaacaattcatacttacatcccaagaaaatttgatttattacattcctggcttgaagaatggagttgattggaaacttgttaatattaacacccccataatctacgagatttctcagataaggatgatgatgagaccacaactatacaagaaaaatatctttgggaatatagttagttgtacaacttccactattggacaatgtcaaatatgtctgtgatgatgtcgacccaactgaagtgaccagcaggggccgtgagcagcctgattgtcgagatttagatgatttcattatttatagtgatgatgaagacgccatagcgatagtgataatgaaaattatataactattaatgatgaagatgattattatgatgacttgtagactttaaagtattgtaatatttaaactcaatattaattaaatcaaatacatgtttcttttgttagtaagttgattaattaattatttttatattaataaacatagcttgtatgtgcagcatggctgacgcaagtgcaagcaacagtaagaaaagtgagttagggaaatgtacaaagggaaaaatattgaaga

SEQ ID NO: 48759 - DNA, 7638 bp, Cannabis sativa
aaaacttggttaaactaactaacagccattaaaacctgcttgaatccacatatctaaacataagtaagtttctgaaaacaaaaccaaacactaacagcagctacaacaatacaaaacacaaagcatgcataaatccataacttaaaacccaagaaagctatgaaggagttactagaggcttacccaaagcttgaaaccaccaactccttgctgaactaagcttgaaatgaagaagaaattgacaaaccctagctgcctctaggtgaattcgagagacagagagagagagagttgagagaaaatgagatttttccttttctttgattttttcttgaaaatgagataatacactatagttgattaattaaatcaacataaaatcagcttaattcacctaacttaaagtcacaaaatgacaaaaggctaatgaggcaaaatgaccattttgccactcccacactaaaagtcaaaaagggcactaagggttattttgggaaattctaaaatcctgacaattcccgacattcccaatgtctaaactataacacttcgctctactaaaatactaagatgtgattctaatagacaaacaccgccttccaatgttgctcggcactgaaaatgcaaaattatgaaatttccatatatgacatataaaatgtattctgaattcaaataaatcatcataaattaataatttagaattaataaataattttcataattaaacccctaattatctgctaatttccaaatttaagctaagtagtctttacacctggacccgtaatgagtcttgcaagtcaacaattgaagaagcgtggtcctcccaggatatggacccaaaaaagaagattaattgtaatctcaaaagaacctatcgagctttgcaattatggaacaagaagagaatctgtgacattgatcttataattagggaattggaaaagcgattatcgaagattcaaagccaacaaatttttgaagagttaatggaggaagaattggttattcaaagacgactgtttgtttcttggataatgtaagaagacatgtggagacaaaagtctagagatttatggctgaaatgaggagatcggaacttgagattcttccatgtctcaacggttgttaagagacaaagaaaccagatttaggcccttcgagcaaacagtgcagactttgggatgagaggagaatgatttcaaacacaatcaattgctactttgaagacatgtttacatctagcaacctctcttttcctcaagagttgggagacctgttgagttgggaaacctgtttgttaagaaagttagtgaagccaattttgccattgctgctattccttccttcgaagaagttagagatacaattttcaatcttcatcctttaaaagctctaggtccggatgggcttttaagatgttttttccgcaaatactggagtatatcgggggaacttggttgatgttgtgaggaacatatttcaaatcgaagaaatgatacctggactcaactataccttcatttgtctgattcccaaagttgttcaccatgagaaaatcgagcaattcagaccaataagtctgtgcaatttcacatacaaggtggtggcaaagataatctcgaatatattgaggccctatatggatgggctaatttccctagttcaatcgacttttatttatgggcgttggatcgcgtaatcatcaattctcactcaagaactggtccataaaattcattcaaagcggggaaagggggccttatggtcgttaaactagatatgcacaaagcttacgacaagatagaatggagctttatacatagagttttagtggagaatggttttgatagcaaggtttgtcaattaattatgtcctgtgttcgaagtgtttcctactctgtgctggtgaatggaagtcctctcaagaagtttctttccacaaaggggtctccgccaaggggatcccctatcccccttcttatttcttctagtacaggaggtgctttcaaagcttattaacagaagtggaagttcaaatttgatccatggaattcaaattgctatatcaacaccgtctatttctcatctaatgttcgcggatgacaccattttattctcttgagccaatgtgggggaagcaaaagaattgattcagtgtttgaaggtttacgagtcttagtcaggacaagtttgtagcaaagtttagtgttctcttttctaaaaatctagatagtaacaaaaagaaagttttacttgatgctcttaaagtctctgagtcgagcggagatgagagacatctgaggaacttatttgttttcaaagaggaggaaaaaggaaggcaatcttaaattgaaatcaggaatgatgagccaccttgaggaatggaaaatgacgtttctttcttatgcactcatttaactttgattaaatcggtcgcatcttctttacatgtttacagtatgtcaacaaacaaggtatccatttctatttgccgtaacttagatgatctggtaagaaaatactggtggataggttgtgccaataaggatcgttttatggccttcaaagcctgggatcaaatttgtcaaccgaagtcctctggcggcctaggcaccaaaagattcgaagatctgaatcgtgctcttctctccaaattggcttggtcagtagcgaaccaagaggacaagccttcggtgcaatgccttctaagtaagtattgttcttttgacagcttctggttcgtgaagtcaaagagtaataactcgttcttgtggaaaagtttattggatgttagagatatcattctcaaaggttcaatcattttggcgggagatgaaaggtcgatagatgtgtggaaagaaccttagattccgtggttggatttgttaagttttcaacatctaacggatagcttaacaccgaaaggatatactgtgtccttggtgcagacctttctattggtcacgaatggaacaaggagattgtagttcaaatttttggagaggaattaggaaacaaaatattggagattcctagaattcctttccctcgtgaagatcagactatatggaaggttaacaatagcgggaagttctctattaagagtgtctactgcctagatcaagcctatagatttggtcctcaaagagatcattggaagtgggtttggcatgtggatattcatcctagagtgtcagttactctttggagaattctgaatgaagccatccccatcaagagcagattaccgtttgttatcgataaggactatgtgttgtgtggtgcaagtgaggaaacatgtttgcatctgtttgaagagtgtagtgtagcaaaagcgttatggtttactggggatttcccaattcttagtgacctgatacctactacttctatcctcaattttgctgagtttttgttttcctctgtccccatcagttacaaaactagaatggttctcttcatggggacccttctctctgaagattggtcattgaggaatagattaaatgtttttggagacactgttaatttgcattgtgtgagaagaaaattgttcgagtcttttgaggaagctttcaacctagtgcggtctgatgcaggtcatgctcctgatcctgattgtgctccgatcttgaaaggttcagggtcctagtgtgagagcagtatgggtgctactgcagtcatggttaacatcgcacaagattcgtgggcctatcacttatctcctgcttctgcatcttcatccttggaagctaaattaaaagcaatttagtttgcattgaaatgggctctacataatgattggctagatatctctattttcttcgattctcaagtggttgttcaagcgcttaagaagagaagccgcatacttagtagttttaaatttaattaagaagtttcatagttgctcttttgcctttgttaatcgtaagtttaactcttttaaggatggtttagcaaaaatagttagattggctaaccaatttgctggttcctatcaagagaagggaatttcccctgtgattcccatctctatttctattccttttaatgaaggcagagttctttcaaaaaaaaaaaaagtctatttctacacaaaataaatgtctttctttatccaagcacaccaattcaccgaacaacccaattattttgatacaagtacaaaaattagtgaacatgcaattctttattgctactaaatatagaaaagcatgctgagattacactagaatacaaacgtgagtgataatagtgacaatccatcatatagaataataaaatgactttaagaagttgaaaaaatttgacttacagtaaatgcaaactatcaactcaatagcaagtgtagagacatggaacttgcctagtaaaatcatatggtaaaataaatgaaaccaggctaaagttcagataattagtagtgtttaccagggaagaaaaatggcaaaaaagaaattagaaatatgccgattacaaatgcccctttcttctctgagacaccccttgatttctaaagctgcaggacctttattggttaaaaaatctctttcttatcattaacaaaaagaaaacttctccaaaacctttctttaagaaatataagaaaacaagagacgtatcaatctctgtgaaacaaagaattgcctataaaagagcaaaaagtctcaccaatcagcttcacaggtccaccgcactgtatacaagggcacgcctcaacttattatagctcgaagcagaatgcatattattatctttcacattcaattttgatgcatccattgcataatatccttccgaataactccctcaaacctaccttcgaggtagtttgatcttaatccttcagtgcctttgacacacaagttccggtactgggtcatagtaccaacagggtttgtgactcgcatctgtgtaatgcttgcaaagggtttggaccacacgtttttgtatgaggaaaacagatgtcgttcagattcttgatttctggatgtttggttgttccctggagttttgacatggtttgactttgagtttgttgcctgttttgtcatggtcatgcttgagcttccacttgaggaggatttttcaaggggaccacggatctgagctgatggtttcatccgatcaagacaccgtaaaatccaattcccaagatttcggcccacttctatgtctcgttgttgtacattgtggtgaaccttgagggccacatcaaatacagcacgggttcgtcttttaagaaacaaagaaagaaagaaattaattatagcctttgcattcaaaatgcaagtccaagtgaaataaaaatgccagctccattcgctcttaatgatgttaatacaaatcacttaaaaatgatgataaattacaatgaaagagtattgtagacattgacgatcattcagactcagacatttgtagcctaagaacacatatagaccaagtaactgagtttatgaatgactagatgtcgtgataaattagttggcacatgcttgaataacaacttaactaagtagtaaaacatgtgatcaatttcatccatcaaaaacaaaatgattactcttacctaaaccatatataaccctagtaaataggttcaggacaatcagaataaattgatacatcaacagcacagtgacaacaagatagtatttcaaatgaaataatcacagcattatccaatactatttgaaacttggataacttaccttagctcaaatgaaataatcacagctatatgcaatcaaacatgattcacaagcaaaaaatcatttcagtacttgtaaaactagatagtatttcaaggatacataattggcttttataagttaagcaaattggtgaactttccattcatttcgattcaacttcccttagactggtaattgctacaagccaaataatgcattagaactctgcaaaaacacaacttgaatttttggagctgtacaatgaagggcacatttttattcacaccttttccaatgagccattgatcagatctaacagttgcatttaaagttaattcctaagaagaaagaacacatcttcataaaagggaaagatacgcaactgttatggtttcaaacaaaattcaataggaatgtaacatttttcatttggctcaatgaattcttgatcaagtagtcaccttaaatgtgtgaatgtataataatcgagttaatccattactctttaatacaattctcttctgtcaattgtaatttgcaataacaaatcaatttttaatagcctccctcagtaatgcaatcaatttgatcatcaaaggaagcaactaatccacacataatttgaaacggtaggctaacatagtcactaattgatttagaaagaaaactaggatgtcgcacaaatcataaaatgctgacctaatttaatttgctacaatcattcatcaaatttcgttatctgcttgttgagtattgttatcccctttatgaactttaatatacacaaaagcttcaaaggctcaagaccgaaacctagtctgattatcaaatttcaaacttaacaaagtcatgagcagtctctttcacaataaattccacataaaagaacccagaaatcagcattcgaatgcagacataagtcaagttttgtgatcataaaatgatatatagtaaaacacccatcatattcgattgtatagaaacaaaaaaaatgcaagcatatctaactgaatgaatacacgagctttaaagctatgatcaagagcaatagattacctctgaacaaattgacggatctttggacgcttagaactaatgatgcgtctttgaatcctgagagccaatctatatgtacgcttcaaacccagaaaataggccgtccccaatgtgatctcccatagcaccattattctatcctgctaactttttcaccgatgcgatgtttcctgaaaagtgttcgtgtttagtttgttgttctaatgtagaattcatttttctttaaatgttgtcttcacaaactactaaatgagtaataagagatgacacgtattcctaagcattagcagttgtaagtcttatgtacggtgtaatgcgcaagactagaaatatgttatgcagtgggagtgatgaattagtatcagcttagccctagatagaaacattgggtggtatttaaatacatactcaagttactatgatgggtgagaatcaatatgctagactataaggttggatcttttggacccagttggtcacaacagaaagtctgtttctagaataatgactactcttggggtggaaccacaattgagaaaagcgttatgcaatttctaagtacatagcttgttttagacagctaagtatgagactggccaaaaaattctattctaaatatggttttacttccgaattgaataaaccgctggttttgttttgtgacaaataaagatgtgattgccaatcttaaagccacaagagatgaaaaacatatacaatattgcaactccattatcataacacaacctcaatttataaacaatgaactttttccattaaaattataatttataataaataagaatttccataaattctcaaaaaattaagaaactatggaaacaaacagcctcacacaaaaatagcacaataaggt

SEQ ID NO: 48760 - DNA, 1027 bp, Cannabis sativa
  modified_base (718)..(719): a, c, t, g, unknown or other
taaagttaacgtagaaactaaaaaaatatcgttaaaccaagaattatgttacatagccacactttatatagtatatatatatatatttatagatatcacatatactcgtcttgaaatataaaaagtaaaaataaatttatgaatatctatatatctatatatattcacatgtcaaaaggtctaaattttcttatttgtaatttttctaaattttatttaaaaataataaaataaataatgtaacaaccattacatgcaacaagggtgtgtagggcatgtatgttgggcaatccttgttgcatgcacgttgattgtctcctcttctccgccactctccttccccatctctccaactcccccttttcttccccatctcccctactcgcccttctcttattttccatctccccaactcgccactctccttccccatctccccaacatgccactctccttcctcatctccctaacttgccctttctcttcttctccatctccccaactcgcccttctcttcttccccatctccctaactcgccactctccttccacatctccccaacttgcccttctcttcttccccatctccccaactcccccttctctttttccccatctctccatctccccaactcttcactctccactactacaaatatcaaaattcgcgatggtcctaaaaacaattttttttttggaccgtcgctaaaaaaattanntaactatttaaaaccgtcgggaaaaatttagtattcctgacggtttaaaatcatagtaaacaaaatagttgacgtttttataataaaatgcgaatttttaggagagccttatacccaacggtttaaaaccatcgggtataagggcccattaaaaaatcgtcacctacatcttgtcatgtttcccacgggcccacctactttttttctatttcccacatgcccacctgtttcttatcacctatttgttctctatttctcacattctaaaatgaaaaacttaactctccaaagtgttggaaattatttta

SEQ ID NO: 48761 - DNA, 1093 bp, Cannabis sativa
ataataataagggtaaatactattttggaccctgtgttttgcataaattactaattaaaccatctgttttgttttttttttcttggtaattgaccatctgttttgttaaatgataaatttgatcctatattttctaatatggtaaaaataataggaccctgagctcaattttcaaaaaatttattttttttaatataaccaactttaaaacaatttctattacgaacaaatacagaaaatgtaactagttttgtcatagtatatctacatcagattattattaagttttattttaacaaaaaatcagttcagggtcttatttgtacaaatttaaaaatataggtccattttgtcgtttaacaaaacagaaggtcaaattggtaacttttacaaaacacagagtctaaaatagtatttactctaataataatacaattttaatcgtagagcaattacaaacaagagaaaagtactcttaattaatttgttcgtaaattagaaaagaatagggaaaaaaatagtaatactccaacccaatattaatagattagagtctttctccttattattttttaattattcaaggacctaaaattgtgtaaactctatattaattaaaatagttaagtgctcaattagatccaaaatgttttgtgattatttcatttccatacttaagattaagatcaaatatcatgcatgcacaaacacttgttttactcaaaaaataataaaggactactctcgcaataattaattattatcaaaattataatactaatatttttgtgtagtcgtaaaaaaatttaaaactcgttcaatcctccataaattatacattaaatatctcaaaaaaaatgtaaaattaataaaaattagaaatcaatcatttgagctctagacttaaaattacactttctaccactacactattttattatattttcttataagcgtgcaggaacccgagacacacgtcaagctcgcctcacatcttaggatcgatcctattttggtgtatattttaaaagtacatatacattggtttcttcattatgtgtaaagaattttgtaataaagaatatgtggagcc

SEQ ID NO: 48762 - DNA, 2134 bp, Cannabis sativa
tttttttttttttattttccatgtttgtaattttgctgcccataatgtggctagatgtgtcttccccagaatattacaggtgttatggagatatcttgcatacctatttctatcttttataatgatctcgaggtgtaattttctttatttaacgccttattttcaaaaaaaaaaaaaaaaaagtatggcaagaaattatgagacaaaaaatttcccagtcttcagtttctctgagtttgctatttgaagatttttgtcaagcctctcaaggtactcactttgaaatcgaaccctgaagacatgatgatgttccctcgcaagagtttggaagctgggtttggcagaggaaagcgttactaaagaactagaaccaaaggagtccaaagaagatatttccaaggtacgtttatgtggaatcacaatgctttgctgttgaggtaccaaaaaaccaactatatgtgactctgtttcgtatgtggttgtgcctgtaaagagtgatagggccgacaccatcgcggtatatgatgatttatgtaattgagtttttcagattttaatgattgaagttggttttcgggtcattgagtataatagagaatctgttttgatttagaaattgttaggtattttcatgtttttgtttgcatttatctagttgtttcgcaatattgttgaatacctcaacttataaaaaggtccaatcattcttctcacttttgatataaaagaggttgtttagtaaaggaacttaaaaccaatgacaccctaaaagaaaaccctcaaacctaaaccatgacttcattcattcccgtcttctttccaaactcacttcttagatattcggagcactgctaattgcaatatcctgttacaatctctttctcaaccttcacttaaaaaatataagagagcattttttttctgggttttttaagggctgtgtttgttatagttacaacatcattataaatttttaaaaagctccgtgttttattaacaaaatgataaactgctcactattttgaatattgttttgtcgttgccttgtagttgagcttcctccaatggctcaaggaagccttaacaaggccatactcagtggaaactctgctaatgacaatcgaaaagttgatacttttgctaggtaaacttccaaatacccactactctgttactctgccacggacttacttttcttttataataatgcaggagacaaaaattgttacagcatagaaagtctcttcctattgctaccggtatttttcccagaaactcttcctctttatcttttatatttctcattcatattcatgtcgattagtttatttaatcactttttgtattgttaataattttcattgacagtcgaacgacgactcatagatgaagttcggaagaatgacattttaatcattgttggcgaaactggaagtggaaaaacaacccgtatgtcattcttccatttcacacacacacacgtacatatatgtatgtttgattcccagtcattgtaatggggaaaaagctgacccaacccaatgagtagtttagcttgttactaccctttttaatctaataatctatattgtgacatgctttatagaaataccccagtttctgttcaatgctggattttgtaaagaagggaaatctgttggaataactcaacctcggcgtgttgctgctgtaaccgttgcgaaaagggttgctgaggaatgtggtgtggagttgggtcaaagggttggatactcgatcagatttgaggatgtgacttctagctcaacaaggatcaagtacatgactgatgggctattgctgaggtagagtgtacagatcatcatttgtagttcctaaatagttgaagtcactaaaattcagcaatataaatcagaatattctttatctataaaatagtttctaaatttatatttgcttttctttggattgcaatctgtaagcattattagaaatttaatatgttgtctttttaaataacagaaactatagtataaaatgtaaaactaagtacgcaaaaattgtaaatagtgtgtacatgtattttgagactatcaacttacaaggctacccttgtttgccttttccagatttcattggtaagctgatattgatt

SEQ ID NO: 48763 - DNA, 949 bp, Cannabis sativa
ggtgaagaagatgatggaaagaataaaaagctaggagaggcacttgttggttctgttaacaacaattaatgacactagctagtcacattgttcatgttccacccgtgttctgttagcagtttaccatttccatccatctttagttgttaacttccatatttgccacgtgtactcaccatattgttcatatggacacaatgtacgcatgacacaatatctctggccacctaccttctcttatttctcatttctccactctaaccttttatcattggtgactctccctcttttgctctcagtctctgcgtgtcttctacagatggtggaatgcggcttggggacattggcaaaaatctgctcatcaagcagcaatacatcttgaggagtgagattagtcattttaatgtgtttcagagtttttttctgtctcaaatattgagaatctagttgaaaatttgtttgtgcagtgactaattgtctatatatattattttgtgaatttgtattgtattccttatttatttgtgtttttttttttttaatttgaattattaaaaacgatatgttgttagagacaaatattctacatgtaaagctgacattattccatttcgcttcttatcaaggtaaagaagtaattttttattgtcaagagagactttctgctgcaacgaggcacgcagaatcggttgcagtgcttactcatgaacttggaaagaaatttcttgaggtttgtttaagttaagacaaatttgtaagtatgaaaatgattatcagtattagttacatgttatgtatgtaaacttacaagtttttcatgtgtaagtattttggttcattgtgtataaacaaactattacagtataaagttatctacatgaattacacgtacaatcaacgtgagtttgcatacatgttttaaaattaaccatacttgtcctttgctttt

SEQ ID NO: 48764 - DNA, 1023 bp, Cannabis sativa
taatatgaagagaaccctaaagtattttattttagggcccatgcattagtatttttggatcctatatatatccttccatgtgcttttgattatatcactgtaaattgtaatcattattaatcctttaatagatcgatcgtgatctcttattacttccttttgaaatttatataaatgatatatatatattttcctattgaaataactctgaatagcatgcccataataatataaagaaaaataccacttggctaagtattgagagcatatggtaatgatgagagatcaagatcttttgtaaaatattaaaagagcattgttataagctacttcagggaaataagtttttgcgctttgtgccgatgaaaatatttatttttgcactgtcaaagagttaaaactttttccgcaagattaactagagagttagataaaagtagtggctactcatggatcttttgctggcgcaaattggtatgtgttgggaaaacaaccttttaaaaaataataaccgattctgtatagttgacttatgttgacgtttcttcgcgttgacaaaagtagtgaactttgtaggacttgtatattgcatcgacaaaaattaaattttggaggttccatattaatattttcccgcgcaatattgcactcggtgctttgtcgtactaggaaaagcctattcgtgatttggtttagataactttttacagtagataatcacccttaatttgcttatatatattttttattatttatgtattttaataatttataatgtatcaacaatcaataagaacaataaataagaacaatattgaatagtaattacaatctaattaacccttgattaggtctaaaataacaaataatcatcaaaagctaaaaaaattattatctcgtagtaagattgcaacgacctacaccgattagaactgtttaaaaaatatctttaacaagaatattgtttgttataattgtatttcaaatatcattgattaggtttaatatacttactaattataa

SEQ ID NO: 48765 - DNA, 1119 bp, Cannabis sativa
acactcagttagcttaaatattgtacgtggatcatgaagaagacaattatatggtgttctatattttaaaacattagctgtaatctataattaattacatattattatatgtatatatattaggataatatataaggaaggtaatggtagccgaaacaaacccttattatgtagtgaaattagtatggtaatgaatgaaagactaaaataagtccatatgcatcatcatcaatgaagctgctattattttataatatatttatatatatatatataattaattatttggtgaaaagatgcccactaattaagagtgtatacgtacatatgtatatatattgtatacgtagaataatatatagacaaattacgtacacagtaaggccataatgaaaaaaaaaaaaaaaaattacctatagtttttttttttttttttttttgaatggaaaaatttacctatagttaagttacctataaacttcaaattattaagaaagtgagcgcttgtatacatactgtggaagaatcgaaatgaaattttgtggaattctatatgttttaattactgtaaatataattataaagaaagtgaaatacatgttattaagaatagaattagtttctttttaatttatcaaagaaaataagtcacgaaagataagaaatgaattgaaaatttgttaatagtacttaaggcttgttaatctcagccttagctaattctatatatcacacaattaataatcttctaaaatagccaataggtatataattaaacacatttaattaataataaaataatactgacattctaatattttagaatattaataaatttcctaatttttaatttgatattgaatttccctaagtatatatctatttatggaatattttttaatggttgtcaattgaatgattatttgagcttgacaattaaacaaaagaaatgctaaaagacactagtgatgcttagtaatatcttcacttcatatgttagaaatatatatatagagagagaatatagagaagaacaaacaataatgacaatatattttttgaaaaacacaatatgtgaaatacaagaaattatataaataaacctgaaggaaagtcgag

SEQ ID NO: 48766 - DNA, 1947 bp, Cannabis sativa
cctattttgaactaggcctactttcgcgcccatcccatttagaaatctgaaaagaaataattcttttttaaaaatacacttgtgtgatttttgaaaatatatacaccaaatatttttttttttcttaataacagttcaataatattattttttctaaagaccccacaaaatctgactggttatatacatttatagtgtgttaaatttaaattgttttatttttttttgaaacagaagttaaattgtttttatgttatatatatgttaccttatatataaaaataaatatttaaataatgaacatcttttttatttggttgtgataatgagagagattagcagccacacaataagttgatagtatataatagaagattccacacacaacaaaagcacacatgtcatatatgtataaattgttttcttcattatttattgtataaagacaaaagattgaatgagaaataaataagaaaaaatttcataattattaaaaagacaataagtttataatattcagattaatttacagtttttttttttcattttttttatcttgcatattttaagtttttcttctttaaaaaaaaatagagaagttgtagttattcataaaaatgtaagtaaaagaatttgaaataaaaatagtaaaatatattttaaaaatatatcattttagatggtttgtgactttgtgtaagaatttaaaaactaattaaataatttacttaaaaataaatgagctcagtgtcttaagagagtttttcatttcaaactaaattatattattttcgatcttctacaagtaaattcgatgttttgtatgaaatttcatatcttttcgatgacgaaaaaattatactaaaaattaaattttaaaaactaaaaagacatgaacaacaataccactatttttagtagacaattattatcttttgagagaaatgaataataaatcaatttatataatttgaccttgttatgatatgaatttttctatattaattaatatgcaattgagctatattttcttcatgcttgcatgtctaataaccctaccttaccattattataaatatgaaaacaacactctatactaatcaagattctataaaaatcgtcccaattcaaatatatataatataatatatatacatatttatatatatatatgtatatatatattcttaaactatattcagtgcaatgatttagaaagattccatattacttattaatttattattatttgattccaatcctttttattcttggcaccaaaaaccaaattattgttattattattatgtaaaaaattatatagatttaaactattttggactttgattaacatgtacgtataattgaacagaaaattagtattattatattgaatgttattactctctttctccaatgattttataaggaattggtttatttgttatctatatcatatatttttcttctccaataatgatttttttttcctttaattttttatgatttttgtatagggttatatatttaacttcctttcatttatttatttttgtaaattagttcttctccaatggttttataaacagctctcatatgccctttttaatttttccgttgtttgaataatatactaatattatcaataaatattttttttttggatagcacttgtattatactatttacaactataatggatagggaaatttaaaaaaatatgcataaaatattctaatacaattcataattgaaaatatatgaccactttatcaaaaactcaataatacccctctcataacaataccccaactctctctcttccgctatatctttcagttctctctcaaccgaacccttcaccaaatcaaaacccccctcaccaccgcctacaacgtcggcccctcaccaccggctacaacgctgaccccctcccaaatcgaaacc

SEQ ID NO: 48767 - DNA, 1019 bp, Cannabis sativa
taaagccaactattataagttgcaacagctttctttagattcatctgatgagcaaatagatggacatactgacttgagaggttaagtgagtttaatcccaacatgtcagttataaaatgcaacataaatgtaggtaataaaaaattgtagatttttatacaatttccctacctgcattttcaaattttagaatgattttatataatagtaaatacatgatcaattagatcttaagcaactcatgttttgaataccaagaatcctcgataaaacaattcattcatctttagatgataaggatagttaaatgatgcatgacactcaacaaaaaaaaaaaaaaaaatacaacagtactaacaccaacaaagaaataaataatgacatataacacctatttcctttcccacaatggcacgttaaagaaataatacttaaacttgaaggacaaacaatcaaacaagggaattaagttaaaagattattagtatatttattgtagcaaagggaaattgatatgtcaagtatgttgtgcttttgacagcaattgtccatccaaagcaaccccatctaagaataattatcagaaagatatgtgatcttagaaaagtaaacaattaaagatacaccagatccttttctaattaccttccagtccttaaagtcaaatctgaaaacaaaatggctataaacgtacaacctcgcctgaagcaactgcattggcagcaggtgcatttctgttagagattttattataatagaagaaaatcaagacattacaacactattaatacaatacaaggaccaacaaagagattaaataattattacagcaatatgtatacactatatagattgcatatatatatatatgaaaggtagaagaaaaagagacaacaacatatctatgacatttacgattaggtcatataggctatgacagacttcgcaagttaactaaagatggttcattgaaaaatatcatcttgggtgaattaccaatttgtgaatcttgcctagaa

SEQ ID NO: 48768 - DNA, 846 bp, Cannabis sativa
aaacataattattaacactaataattaatttttacattgctaccacaataaattaagaaaaacgctaccaaaatcactaccacattaaactaacaaataaactaccaacatcaatactacaataaattgataaataaactactaaaatcactaccacaataatttgacaaataaaccactataataaactacaaaaattaaaaacccattaataaattgttaccgtactaccaaaataaactataacttcgaaatcataaatacaaacaaaatgacataaaataaatcttagcctaacaaaatagaaaatgaataaaccaaatccaatcaaaaataatattaaatttattattttgggtattaaaaggacccgctaatttttattattattatttttttgaaatgtaaactttcctattttcttttaaagaaactaataaatttatgctatatatttcattttaattattgtaaaaataggttaattattttacttattacacaataattttcacatcagatttaacattgatcaacagtggacgtgaaattaatttaataaagaaatgcgcctcgatcactagataataatatgagtgatgattacttcgactttggattcaattaccatacgtgaaacaaatttgaatgaataatgtagtcaattttgtatatatgtgtatcatcacgaaaattcaatcacatccatcgatcatagtcaaataattgaggaaattacacaattaatatatatatatatatatatatatatatcttttaaagtgaatttttacacatttttttaaaaatttatgtttattatttttttaatcattttactaattt

SEQ ID NO: 48769 - DNA, 1072 bp, Cannabis sativa
ctcaaatattgatttataccaccattgtttttaattgatgcataccaatttaaataaacattatacatgatttagcatatatttataataacccatttacagtaacgagtagaaactaatacaaatagtgacataaattactcttaaactacacattaaaaaaaaaagagtacaaagttttacccataaatgtggtgataaaattcattacttttaagaaattgaagtgaaatttaggaatatccaacaagttattaggagcctaatacaaaaatgtcatattaaaatcatctgaatattctacatctttataccttagattatgagtatttataggcaacgataggacagttaaggagcaaagcaatgtacatattctcattcttaagagttgtattttctagatcccctgagagtgttttagttcaattttatctttacatatattatagctatttatgacgattctctctctcacacaaccataataaaaagtattgaggattaccaatacttggaacgaggttcaacgccttcgttcaaaaatttctttttctttattttctaagcactagcgaactcccacatttaggaaataactccttggaatcattatattaagcataggtttattttagtcaattcccttttaaacagaaaccttacaaatgagcatttggtctcttttttacagattgaaatcactatttgattttcaaatttcactatccggtggttgttactaataatttgggtgtttatggaagtaaaaggaacaattattggagatttcaagatgatcagtaacatgtcggtaaaattacatattattaagtatattttggtgaataattagaattaaattatttgtttcatgagtttaaatacaaaaattacttaacttgaatatatctaacttattctaattttgtgttaaatgtcagatctggagaagaaaaaaaaggaaactaacaaaaatactggaatttgagtgttaactttttacaaaaatacggtcacacggtaatcttttcaaaaatactatatctttataaaacaccagtaaaacaca

SEQ ID NO: 48770 - DNA, 969 bp, Cannabis sativa
aaaatctaaataatgtaaaaaaaataagagaatagaaaaatagaagaaaagctcatacaacatgccatgtcatctaccctaacaacacaattatataaatatatagatattgattgatacgtaaaatataaatagttatttataattaaccccccagttaatttttctacaattttacccccatcttacaaattctccctccgtcactggaaagaacagagtatgctttagtttagttttttttttttttttgataattgagttatgccttaattatgtcggaccatttttctaatactacatgcttatgataaggaacaaaattctaacagctaaactcaaaacactttttaggttgaaactaaggtaaaagtgcaaaccagggtagctccgtgataaaataaactcaaggaaattatcattattattattatttattagatataccaaaccaagcctcgcttgtgattgttccatagcaatgaaatttagttaccaaattaagcctagcaaattcactacactaatatagacgcaacgcagtaaacgacaaagaggaacaacttcctttccatattctctctctagtaattcactacactaaaatgaacttagcaaagcacaaagaaaaaatcctcttgcttccctattctctccccatcgatcaactctgttgacaagagagttaaaacccgacacagtgccgggttttgattcttgtgattcattccattccatccaaataacttaggattcaattgacagatccttgaaggtgtatgaaatcgctttgtcaccatttaccacttgcccatttccttttaagatcctgcaattgtaacaggccatttctttattagttcttctgctcgtaaaataaataatttaaattttgtaaaatgataaatcaatacgaaaagcacatatgcagaatccataatttgtaaaaacaactaaaccataccatcg

SEQ ID NO: 48771 - DNA, 636 bp, Cannabis sativa
aaaaaaaaatcatctagctgtgtagacaagaagagggtttaacagttccagtattagatccataagcattgttgcaacttgacttgattctcttgagtgattttgctggtttcaatcgtatattcttgaagttaatattggtacaaggcactgatttgctacaatttagattcatagccacttctgaagctgatgtcccaattgccccttggaatttcacatcgtctatatgaactgccgtgggctgcattcaatacatttatttcacacacaaaaaaaaataattatacattttgaaagaaattaataatattgagagatgcatattttctacatggatgggattccgtgaggatctaggaacaacaatttgccgtctaaataaaaaacgagacgaatataaaaaataacgaggaaattagactctatatcctttttctattgttctcttttatttttaccttcttttttaaaacttgtcatttttaactctctttttctaaacactttaccgattttacccatgtcacatcaatataccgtccatgtgactcccttatatcagggtattttgggtacaatacatataaaaagagaagtatgtttcaattaaatataaaattagaggtagttttg

SEQ ID NO: 48772 - DNA, 1909 bp, Cannabis sativa
gaatgagctggcgctagaacgggattttgcgagtacgtgagcattgtttgtaactacacacttggcattccactcgtttgaggagtggcatgaagtgtgattctaggaaattgcactctcgaagcataccgagagcctccagaagggtaatattgtccaaaagatgttatttgggcttcttccagattgatgtacttctgagccctcttctgaaaatcttgaagactagttgcaccttcctgttgttattcattctaggagtgagttcccgtccggatcctagcttgcaatccatcatctactttctttgtcttggaagtctcctctttgaacctcttgatgaagttcttcaaggtttccaaaggtagttgtttaatgttagacagagcactaacttcaagattgatctttctggctgctatgaactgcctctgaaatcgatctacaaattattccaacaatccacaaatctaggctctcacttcttgaatcattcttctacagatcctcccagtgtcagtgggaacataagcatttggcgtcattgctcaacttcataactgtcataaatctgttgaatctagacagatgatcacttggatcagtgtcacctgtgtacatagtcatttcagacattttaaagtttttcaggagttcaacctcgagtacatttttggcacagggtgttcgaaagcatatttaaccaagatcttacttttactaaataagtatgttgattattactaatctaacatccaaaacatggaaccttaaaacaattcaaattaaacttacaaaatggcaatggaaattaatgtatcattccgttctgtactctcactcttgttttctttctgtcacaaagtgtaataaaaaatgaaaccaagatttcttctcctttgaatgtgttcataataatcttccacaaaggtttgagtatcaccttgaatagtgtggactgatactcaaacacctttgaaataatttttgagagagaatttcttggtgaattttttaaaataagaaagaagagaagagaaaaggttattagacattaggttagactagaattctcttctcatcactttctttatagggattttttcaataatatacacaattaacaatctatttacataaatgactttatacaaataattagtaaatattaacgtccatgttagtaataaataccgtaactcattatacttttttttttttgcttttttaaactgaaaattttttttcctttaaaaataatattcatttttctcttttaatagtttttttaaaacaaaaaaaaaatcaattattattttaactaaaaaaaatatcatcgcaaattgtaaataactgacttacacaatatttaatataataacgagttccaaaaattattcataaaatgttttattttttcagatctaaaaattacaatataatatttaaataagtttatttttatagtattttagataaattattaaaatgtgacttataaagaacttaccacataatttattagcaaaatttataagcatattaatttaacattagttgcttataatgtcaataatataccaatgaattatcttttataattttttttttactattttgcgtaaaaaggaaaccttttagttatttatgagattaataagataccaataagttacatttttataaatattttatttaagataatagattatattatattattgtgttatttaaaacaatttcacattactttttaattttagtaacatttgtagtaccttcaaatttatttaacaaacttatatgttacaataaaataaaataatttaaataacttataagtgagatttttgataaatttaagtttattgtggaaattaatcgaataaagatgtgattaaaaataatt

SEQ ID NO: 48773 - DNA, 1721 bp, Cannabis sativa
gtgtttaaggaactagtgttatggatgcgactttgctgccaaattattgaggcaccctctgctctttgctggctacttggtggcattgtggaagttgctctcttgattatgcaaattacttgttaggccgtcgttcttcccaatctacaagtaaaaaaacttcacataggacggtcgtttacttgtcaatcttgtactttgtattaggttttatcggtcctcggcggtgtgtttctgtttagattggagtgattattgtaccagtaaccggtcctctgaattatcaaaaaaaaaaaaaagaaatcgggtcctctgagcagtctctgtcgtctcatttaacaattttagccgctttgtttgatcgggaccagaggtagagttctgtgtttgatttgtctttctaatccattggattcgttttcttaccgaaaattttcatcttgtttgatcatcccgttgcgctcacaatggttttaaacatcaattctttaagggggctttcaaaaaaatctgattaattagaatattatacttgtcagtaaaatttataatcttgtttgttatacatgagaatttttaattagattactgttaattgaagttttcacatgatttgttgtggaagtcttataaaattattagtatattaaattaattgtattaaaattatcttcttatgaagaaatcttattattttctacagttaattttcttggacataaaagttaaaaatttaataccatgggaatgtggaagattattattactataaagatattacatccacaccaaagagtatttttatttttgtttaaacctattgaaataagaatatgtctcgagagttagaaccaaaaacaaaaacttagctttattccataaattggaagggttattaacaacaacattgacatgtactcacattgtataaaaatataaaaaacatataatgttttttttttaattgttattcttttaaatcatgctcttgttacgaagttgtgcattttttttttgtcaatttcggccaaaaagtttcgaaattgagtttaatgtcatgttttttttgggctcaaattcagctataaagttgcaaaattgagtttgatgaagtgtgttaaacttaattttacatatttttttaggtgtataactaaagaataaagataattattaagttaaaaatattttatttttgtttttagtttttttttttttataattttaaatattgttaattttatttgtatgaatgaataaagtatactaaaatataatatttaaataatattgagagagaaaaaaactctttaatactccttatgtgtttgggcatcttggagagttttctaatcttttttttttttttttttttttcatttaatgagtgtgaatgccctaatttatttaaaattacatataaaattttagaatttcatatagtttacagcgttgaaaatttaattcaaaaagtttgagattcggggctggggttaagtccaagtttaggtcggaggcaaggggccaaggtcctggccaaacaacaggggtaggggttcgaactgggacttgggtcctagccaagataactggaggttagaacaatgatcttaagaagaatatttcacatggttttaaaaagtactgaggtggaatttgttgaaaattagtcctaaataaaattaactcattaatgacataacaaataaagacaaatgaga

SEQ ID NO: 48774 - DNA, 1156 bp, Cannabis sativa
aaaatagtgaaggaatttatgaatcaattattgtctgggctggattgggttacatttgggttattctaatggaatgtgtcttttcattaaagaataattacatggaatactattttttgtacaaaaaaaaaatcacttttacgttgaaagattttattttatatttttacaattttttatgaaaacaatacaaaaacaattaaaaaattacataaaagtaacagaatatccaaacaacatttaaacaaaaacaaaacataatatatcaataataaaaaattaacaacaaattaacaaaagtacaacataaaatattatattctgtaaataaaattataaaagttgtaaaaatatttaaaattttgtacaaccgtattaaccgtattttcgtaatttttttttattatttttgtgtatttatgaaataatccatttctttaataagaaccgaagacattttgtttctcttcaaaaaaaaaaaagaaaaaaaaaagacattttggttggtgtacatgtttgaacaaggacctcatatgatattgtcatgtttccaaaagaaacttccttgacagaacccaatttaaacattttatgctttcagtttgttcctaattgtaataatcctactatcctagcttccaaaacattctaataactatcgaaaacaagaagaaaagtattactagaagcttcaatttggattttgtcaactacaactacattttgtcaacatcactttgatcaaaacttcaatttttgttgatcacacttcaaaaataagtctaccctatttatgagatgatattctttcccagaaagattgttttgaaatttaaaataataacatcaataattctttttttaaaaaaaaaaaaaaaaagtaaaaaagttatcttgctttttaagtttgttgatttgtacggattttgttcgtttttgtcaaacttgctaagatgaacagcatttatggtaggccttcttattaatcatatgtatgaaattttaaatgttggtgtgctatagagtcaaaccttttataataatttgaccaagtagatcaacattattatcactagtaacatgtaatttcaataataatttgaattattggtattggaggtaataaattatgtataaatatattgattatcagtta

SEQ ID NO: 48775 - DNA, 2397 bp, Cannabis sativa
atctaagatcctggtaagataatttccaacagaacgatgttatcacaatcttgttcatgagcaaatcctagagagaagaagtgaagatgcttatgatcccaccagatatgtcccactggtagggttagaaaataggcaacttcgataatgtcaggctgaatcaaactaaaaacactctaagttggagcgagaagccatagcagccagagctgcacagggaactgttcctcaaactcaactcggtccatctataaggagaccctgaggaagacctcgaggttccaagactaagagacatgagaataactaaggaaatcccacaaatgctcaggaagaataacccggggatgcgagggatgtcccaatggatagaaaaaatcaacccaacccaagtaatacaagaaatcaggaacatcgacgcgatgctccagaaacttccaatagatttgcgaactaagggaatgaatgaactgatatctctcgcatgaatgtagaggaaagacaaccatgaccaggaaactaggaaaatcctcgtaatgatggaagaaatcttgaaaactaacctaggtccggtggtcgacccctaattcatccacaaaggccttcttgcacggacagagaaaatatgcacacttacttgagtaggggatatatgtctaatatcttttgaagaagaagacccatgcgagatgagatgcgtgaagcaagtttgagtacaggagaatcacgatcctacaggcatagtaggtcgactggaataaatagataaacgtaagacgggagcagatctcgatgttattttactgaccaagaaagtataagtaactcgcatagttactagtctaaaagttacttaaggactaggtccgtgagtaattgtgagcaaaggcatcgcgagcctaatctctgcgagcgattaaattgaaggcaactagaccttcgcgatatgcacttgatttgcataatcaacttaatcaaaatgcaaatcaatagcctgtggatcccattcaactaaaagtaatacaattggaggacaaatttaagaaatatcaagatggggaatatggcaaacttccaggatacgactcagataaagaaactgagccattccaccttgacatcctaaaatcacaattttcttagggatttagaaacccatatgtctcgcaatatgatagaaccgctgatccaatcacccacataaacaattttaacaccataatgcgagcaagcaatgtttcaaacaacttgtgttgcatattgtttccaacttccttgacaggcgttgcgagtagttggtttgaaaaatttaccaactattccataacatcctggaaacaattatcgaaggatttcaaaaagcaatttcaagatgcaagagatcgtcaaccagaggcttcatctttgactaacatcgagcaacaaccagaagagtcccttaaaagcatacttgagtcgcttcagtacagctgcagcaaaagtcagaaacttgaatgatagtatttaattaacagctcgccagactagaattacaactgatttacataagtagttaactgtaataaaattcattaattatgtatttttgtcaccatattctttacaattgactataataaataaaattaatggcactttaccaaactataactgaaatcagaataattaatggaagaaatgaatcggtttaaaatagaaaataatataaaaaaaatattttactatgttgtttaccaaactgtacgaaaaaaaaaccagaattatattattttatttacataactacaaaaggtaatcagaatattttaatttgacaaaattataattgttaaaatatgtaataattttttgtttatagatttttaaaagacatatttgtctttttaatttttaattaataaaattaaaataaaataaattaggaaagagaaatgtattttctataaaaatggggggaaaacctttccctttattttcttcttaatttgtgcgggctccatactttatttttttctaaaatttagtagaccattgtatgagaataaatattataccactgattccaattccctttaagtaaatataaatagagaattttattgtaattattattttttaattaatattataagaaaattctaccatgtaccctttatcagttttgaaatttatgagaattttttaatctagttttttcatggtcgtgtacgttaaagttatttaagatatcttataaaattttgagaggtttgaaaaagtttagcatattaaaaataaggttcaaatgatctgttgcacgtgttaggggtgagcaaaaaatctaagaaaccgaccaaaccgagtaaaccgaccgtccgaacactgaaaaaactgacatcgaaaaaaccgaaaaccgaa

SEQ ID NO: 48776 - DNA, 600 bp, Cannabis sativa
ttttggctcttcaatgctagccaactctatgtacttattagtatacattattgtcctttttggtataatattttttatgaatatatttcttggcataatcattattgtaccatatgtctcttttaacttggagatttaggaacattaattattaatgctattcaagtaacatggtaaacatattcatacattcatgctattaattatagaatttgttgggagagattaatagtctttaattttatttaaagttcatattgatttttttttttttaaaggaaaactcctcgaacactctacccaaagagggaaaaagaaactattagaaagacttttatttttggaacatctttgtcagactatatttaaaaaaaaaaaaaaaaaactggcagctttgtattattctattaaagctaatggctttcacttgaagaaagcatatatttatgtaaatatgtatgttatagtatacttaaaactgaaacaaacactatttttttgttccttggaagttagaacttccaatgctcacaatgtttcccaagcttttatcttctcatcctttattttctttattttcatacttctatagttttaaaa

SEQ ID NO: 48777 - DNA, 1233 bp, Cannabis sativa
cttcttgagataaacctaagatacatcggtatctatctctatgaatcttaatgcctatgacataggatgcttcacccatgtctttcatctcaaagttcttttaacgaaattattttacttcacgtagcaatcctttatcattagatgcaagaagaatatcgtccacatataaaacaagaaaaaaaatcttactcccacttttctttaggtatatgcatttatccttaatttaattaaataaatcaaaacatataaacctaatgaatcagcctagaaaatccatataagacaaaaatctaaaactctatagaatgactattttacccttctcttcaatacttaaactaaatgtaacctaggggtattttagtcatttctaactactctaactaaactaacaactcgactttctaaattagtttggtatatttctaatacaactcatcatttaacgtcgtgacatctttgaccaatccatcgagtttctacgatgttgaacccaaaaatattttattttaaaaatggtatacataatacccacatgttgcgataaaatcaccgtaataaataaattacgcttaattaatcatttactccacatttactaattaactcataattagcttaaataagattataatcttactctaatattcatataattacatatttaatgaaatatgttcaatttaacataattataatttttaggatattacagtggggctctatgtctgaagggttctgagtcagttgaggtctggactgcattggattgactcttcaattactcgcttccatattacttcttggagaatggtcttgagagactctttgtttctggtctaaatgacctctttcgaatcaggatgagtcggccttggcagtcctagcaaattgtagcttaggcctagactgaagttttgtttgacttagttgttgggcccaagtttgggccttccttgatcgatactggactttaaaattgtacacatcacgagtttgaaaatccagataacagaagttacaaaaaataatataatagttagttatatttatttatggtattttgttggagatcttagttttttaattttctttcttacaattagcatattttacagcatacgatttatgtttatgtaaattcactttttttttttttggaaaatttacgcaaactattatttttgataatttttttacacagttatgtttaaatttttttttttt

SEQ ID NO: 48778 - DNA, 747 bp, Cannabis sativa
gatgcataactaacgcaaaaaccaattaaactaatgctaaaagctgtgtctgagcataactgacgaaacattccacccccatattttttttttaaaaaaaattcatctttagtgccacttttctttctagtgtcaaagtagcaactgatgcaaattaattgttaatagtgttgcttaacaactgaaataaaaaagtgagcgttgacttttgcatcactcaagtttgacctgacgcagtgaccgacactaaaatccctttttgtaataatgcatcctgttaggctaattttagtctaagtttcgggtcgtattttcgggtagttttcgttctttgtttctagttttagggctctttgacgcttgattttttggttttaggttcccggatgtttaaaggaagtattcacaagaatagaggacaagagatgaaaaggttgagataaaaaatgtataaagttctttgctgccaaagaccgccgcgacggggaaaagctttatcgtgacgaggaaaaagcttcaccgcgatgggacttggcagaaagttttccacattgagaattctccagccatcgcgacgggcaattccttcgccgcgacgaagccttaataacaggatttttagacaattttataattttacgaattttaaatagaaggcttggtttaattagaaggagtttgtgaaaagtgaggatgattgagaatttgagccgtagaaacaaaggaggagacttcaagagcggcttg

SEQ ID NO: 48779 - DNA, 924 bp, Cannabis sativa
gtaattcccctacctaaattataaacaactaaaaaaatattaaataatttactcaagtttgtatttttataaatataaatattcaaactgtaaaaatatatataatttccttattaacatatttttataatttcatttcaaatttcggtttattttaaaatttctaaattacatttaagtgattaataaaaaaaccaaacatatcacaaatatgtgtagtcaattttagttgagtgcaaaattcacatggatatgtatgatatgaggtgggactggttatagaaataataattatattctatttctaatgtatatatatatatgtatggtcaatttatattaattatttgaaaaagatagacacaaatattataaaagaggacattttgatatggtagtaataagacctaaaagacaaaaacaggactactcattaattatattccactaaattataaaattgagttattcttctaatccaaagccttaacttgtctcaatttaacattacatacaacaatatattaacaggacaagaatatatataaccaccttttatagtatgcattcttttatatattatttgaacagtaatttttatttactgtaaaaaaatttatttttagtgataaaaaattaattaatgactaaaattaaaaaaatcataatttattataaatttttatttttatgttataattaaaatatatgtggttaaaaatattagttacaaaaattacaatttattataattaaatgtatttgtagtcacaatacttattgtgactaaaagtaaattaatgatgacaatttatatttaaatattatattttaattacaagtaaattttcattataactaaaagttatatatttagttaaaaaaaattatattgtaaataaaatatatatctattttatataa

SEQ ID NO: 48780 - DNA, 751 bp, Cannabis sativa
aatatagttaacttggttgtatcgagagtttgtcatgatttggaatttgagcaaactacccttagttattattcaacacttgatttatgtggagggaaaaatggtcaatttgcttgacctttcttattttatcttttgtggcaataaatatgattattacataatatttaatattattacattaatcctagaaatcaagtattcttctcttgaaaagtctagaaaccatctctttatcatcaaccctccctctctttttgaaaccctaagcaactagctaggaaacttgtttttatcagcttcaatcaattatttctagcagaattgggtgattcaattcaaggtaacacttcctagttcctttccgtttattttctttgagcataagtaagaaataatacatgaatatttgaaataaggtgacaattggtgtttgagttagagttctgagctttatttaaactttttttttttttgctttgagttgagttcattgattgttgtgaggtgtgagcaaagtttgagttttaagactcaaactttgctctccaatggtaaattaagtttttgggtgaattgttgaattctattgcttgaatttgtttcattatagtgcatacaggtattttagagatttttggagaatttgggttcgaattgtggccttggggtcacattttgggtttcctgcattgaaccggtcgaccagttcagggagacctataggaactggtcgactggttggtcccca

SEQ ID NO: 48781 - DNA, 1170 bp, Cannabis sativa
tagcaactaagagaacattgcatagatcagatgacttgcccatattttttatatacatgtatttaactaacaaaaaatctcttcaaatatagtaaaatatacagtaaattttaacttgttggtatttgtttttatggttgcttattcgttactctggagttctttatataatagtggaggaggaattaataagttttttttaggtcctatctttagtgttggcatatgatctaataaggcaattaatatcacctaacgttaatatttttttattttattcataatatgatttctcctgtcaaatctcataaatgtggtagaacaagaaggtaattttttttagaaagacttatttatggtccaacagatattaattgctaattgtttgaaaattcccttcaaacattttctcattaatatgatttcttatctcaaaaaggaaaaaaaaaagtagaatatgatttcagattcgtatacattttacataaatttatataaattgtgcacttaatatcttttacataaattataattggtataaaatcaaaatcaaaatgattatggtatcaattattttacagatataaatacggatggaccttaccttgaatgtaaggaacacaacagtacaatggatgtgacgagcatattaaaaacataatttacactcattatcttgagtaatgatgttttaacaatttccttttgtacacaataatctgtagtcaaattagcaataactcgattttatgagagattaaatttttataaatgaaaacaaaaatttacatatgcttaacttaaataagaaactctcatgatgaaaaatataaacaataagattattgagcagttttttttttaaaaaaattatagtctttagttttggatgggctcaattgatacgccttataaaggtcgtattgtattaaataataaataacactatgtttggattaagtaatgtattgtattaattattacaccaaattttttaatacaacttatgttgtattatttaatacataataaatagtccgtattagcttgtattataatatttataaaggatttggggtcaacaccaatttccgatccagacccgaaccctggacctgatcctgggacctcggaccgtggacccagtccggggaccttggaccccgaatt

SEQ ID NO: 48782 - DNA, 907 bp, Cannabis sativa
caaaattataacttaggtaatattatcgccaaaaattaaacttaaatatttatttacaaatttataccgtaaattactctatatataataaccaattcaaattgttttatttttagattgaaaaaatgtacattccttggaacttgttaattagtcacataaactttagactactaactcaaagacaatatgtaccaataaatattaaataatactttttttttttgttgcttaataatacaataaaatattacaattagaggaagtattgttaaataattaatttaaagaagggcttgtgttgtgaccaagttattaggttcttattagttaaatatcaactaaaagttggaagccacaatttcaagatcaatatcatggtattagcttttaattcacgaaagtatgaatgaaaaacatagtattatatacatataaaatttcattattcttataattagattccctaaaactttttttttcttttcaaattattaattaatcagattccctcaaccattatattagaagtctaatgctttaaaatgatttaggctaatatttaagcggataataatatgtaaatatattaagttgtattttggttgtgcatgaaaatattgaattgaattatatgatcatatgatatctaaaaaaaatttattgtaaaaaattaatttactaacttgataattgtctatactaaattatgcccccaaactttgacatgtactcaattatgtcttataaacttccatctatatgctcggattccgttagtaaaattaaacaaaatttcttgaatccaacagtcaataattcaagaataatttgatacatgttaaagtttgagaaacaaaaatcttaattaactaaaaattaatacgtctttttttttttttttttt

SEQ ID NO: 48783 - DNA, 1452 bp, Cannabis sativa
  modified_base (41)..(41): a, c, t, g, unknown or other
taatttcataaataatcataaacaactgctaatttccaaantaactaagcgggctttacaatggccatggcatcatttgagattttttaatcgtccaggtgttggtcacatccgtcctcgtcaagatgaccataaaagtccctaccatcttaactatggagatcaccctggctatctcaatgttcctaaacccctaataggccaagacaatttcctttcttgaaaaagagtttcttcgatctctattgcaaccaagaacaaaataagattcattgatgacactctccctctccctcctgctcatgatcccaccctcaattcttggctacctacaacaacatggttatggcttggattcgtattcaatttctcatgaacttacagctagtatattgctccaagacaaggttgttgacatgtggaatgaacttcacgatcgctttaacctccatctccaacctcaaacaaggtgattctaacatcacttcttacttcactcatctcaaagtaatttgggatgagctccgagaattccaatcttttacacgctgtacttgcagttgcacttgtggtgccatgaagaatccaagactactacaatcgagatcaaattttacaattcctcatgggtctcaacgagtcctatgcttatgttcgggcccaaatacttcttcatcaccctattccccccttgtctactatttttcaatgattttttaggaggagagacagcgtggccttggttttaatcctatcattgttgcagcttcaaagccctctagtccacgttccaagaagccaagactgacttgcttcaactgccacaaaccagggcactgatgtaatgaccgaatagttaaatcatgggaattagcagacaattaagaggtttacttattattatgcgattttgtgcctcttagtagaaattagagcttattgtcaaaaataggcatgaggaaaatattttttcaataacggagatatatttgaatcctagatgcattatatatgttatatgtgaatttttatgaatttcatgttttatgcctggtaatagtggaatgggacgtatgacctatatagtcacttagatatggtttagtattttataaatagcagggcattttagatagacattcgatatgtcaggattataagtttgaccaaaatatattttggtggcaaggttacttgttggtaaagcaaggcgtaaattagtaatttaaccctagatttgtttttagtggctagtggattattagtgaaatcctaagtttaattaggttattctacaagctgaaataaaataaaaatttatttctttaacttatccttcattcatttttttaatcaaataaattagaaattctctctctctctatctctctcagccaactctctctctctcaactcacagtcgaccccaacgccacccacgaacccaaaccc

SEQ ID NO: 48784 - DNA, 587 bp, Cannabis sativa
gggccctaggcacaggcctagcctgcctatgccagggtcgggcctgccaatcgtgaatgtatttaagcacttttacttgaatcaaatattagacaatacaactccaaatttaaaaaatatggtgtgagcaacaagggcgaaatcccggtgatggttcatcttaaatgtaaagatgaaaaactacataaggataataggtgaggataatgaaaacaaaggaaaactatagtttagcttaaatgaatcactaagccaaatattaacaaccatacatcaggggaatacctaaatccaacatttgttaattaagaaacaaacacaaatgacttgagcagagaacatatcatattctataaaccaaacatatataacattgatgaattaacgttatgacttacttgcgataaatcatcttttcctggttgtatttcctggccaatgccattagagatggctcgatgattccaccactgagcctcagaaccaaatgcaatgtggactttgtggaaatgactaaaggaaattcacacaattttgttaaatttctcagacaaaaatcattgcaaacagtacaatattcataattg

SEQ ID NO: 48785 - DNA, 1398 bp, Cannabis sativa
gcttaaaggaaattgaccaaaacaaatgagcatgcgttcagaatacatgatttccgtgaatttcaacaaaaatagagacctcttcatcattgttcaatttgcgtttttaacagagcaatccagttagtatagaagagggaatacaatgaaatgtagtaatcaccttatcgatatctggagaattgtcaataagagcagcgaaaagagacgacggagataacccagtagaagcaagaacacaatccagaactgccggaacagaagccggaggtacttggcggaagctattacatagagaattaattagagaaacggtggcaatgttgtcgtttatcgccataatctgagcttccttctctgtgtgttctggtcaaagagcgggaaagcaataaccgtgtttgtctttcagacaagactcttaaaccctaaatcatgcctaaaccctcaaacctattttcctttgtcctattattttatcttcataactattttttttatttttataaatatacatatattatttttaaacaataatatacatttaattacacaaaatatagatttactcatttctaattttaattatgtgtaattttaattatgcgataaattttcttactaattgcatttctttattactttattagtttttctctttaaaaaaattattgtattacatttgtaactgttattaattattaaaaacaagtacattaaatctttaaatacactacataatagaatagtcactatagttttaatccataagagagtgacatcatcatctctagccactcactcaaggccttagcaaaaggggaacaggttgcatatgattttgacccacccgggccaaaatggcaaaataaccagctttctaggactctgctgatgctgctacaagaggaactaaacatgcctccagttgtggagatgatggaggtggtgtaacatctaaatatttaggcttcttccatccgctcttctaactgttctgcaagcttttttgcttgactacgaagagcttcctctgttagctgtccatcttcgccaatcactagttcgtccaagttgacaaacaatggcgcctcacctccactcacggtcctcaaaaactcttcttcgtgggatcaggcacgtaagatagattacactatcaagtgttaatgaaaacaaaaatattattataatgaatgaaattaaaaaagaaatgtagtacaatcaaaaaaataaaccaagatcaaggagtaaaaaacttacatttttgttgaacaaatttataacatgctccttgttgatgtctatatttttcttactctcctagttaatcattattgggaagtcatgtgcctttctgacagcctttctgacaacaaaaccatcagtaatctctaatgt

SEQ ID NO: 48786 - DNA, 4204 bp, Cannabis sativa
  modified_base (515)..(517): a, c, t, g, unknown or other
  modified_base (545)..(547): a, c, t, g, unknown or other
  modified_base (575)..(577): a, c, t, g, unknown or other
cgtccaaatattacatacattgttaggatgttagcagatatttaagcaaccctggtatggaccattggatagcaaccaagagggttatgaggtatcttcagaaaaaaaaaagattacatgctcacacacaggaagtcagatcatttggaggtcgtagggtattctgattctgattttgctgaatgccaagatagcagaaggtttacatcaggctacattttcctgttagctggaggaactatatcttggaaaagtgtcaaacatacacttatagcttcttccactatggcagcagaattcgtagcatgttatgaggcttcaaatcagggaatacggctgagaaactttgtcactaggctgtgtattttggagaatgtagaaagaccactcaagatattttgtgagaatgaatcaacattgttgtattccaataacaataggagctcatccaagtcaaagcatattgacataaagtttctagttgtgaaaaaaagggtgcagagtggacagatatnnnaaagggtgcagagtggacagatatccannngtgcagagtggacagatatccatagagnnnattgggacaaactccatgataacggatctgctcacaaaaggattacacccaaggtctttcatgggcaaactgctcatatgagtgtagtattgcttgaggatatcatgatttagtgggagtttgtattttttttgctttatgtttgtttaagacatttatgtatttggttattttctgataaaaaataaccaaatacataaatgtcttaaacaaacatataatgagtttggttaaatacataaatgtccataagtattactattttagttaaaatataagcaatacttgcattgtttggttaaatactttgggatcaaaaatgagttttgtcttactttggtctatgggctaaactctatcattgagagaaaggaattatggcaggatcttgcttctcttcctttccccgttaagccttaggtcataatggtgatttcaatattttatttatgtgggggtcgacttggtggctgacctgtttcgtccattgagcttgaggatttttgcaattggttatctcttggtttagttgatgaattgaagaattctggttctatctttacttggaataacaagcatgataacagaagaatttattctagaatcgatcgagtttttaagaacgaagattagcttgatttggatccctctactgaagctttttatcaatgggatcttcttttagaccattgcttgtgtaatgctagaagtttgcagattgggaatttggagtttaggccttttaaattcgtcaatatatggacagagcatcaagattttaaatagattgtgttggacaattggcaacagcctgcttgctgtactgggttatttcaaattttggaaaatctaaacagagtgagaaaagttcttggggaatttaataaaacattgataggggatatccaataagcttatacttcaattaaggctcgctttgatcaactccagcttcaaattcaacataatattcaatctgcaaagttatttatagaagagaaagagataaaggcaaccttgaattcttattctaaaataatggaaagctatttgagacaaaaaaaaaaacaagattaattggttgcagtttggggttgaaaacacaatattttttcatgctagtattaaacaacgcaaggaatccaattgtatagcctcttttgttgaccaacatggtaatttggtagattcatatgatgaggtggtctcccattacttaaactattttaaaggttttattgtagattcatatgatgaggtggtctcccattacttaaactattttaaaggttttatgggtagtccaagttcgtccacgagaggtatcaaaaaggattattttctcatgggtactactctaaatattgaacaacaaatgcatttgatcaagcctttcactagttctaatgttaagagagctctgtttagtattcctaatttaaaaagtcctggccctaatggatttggctcaaaaaatttcaagactctttggactgatattggtgaggagatctcaaaagttgtgttatttttctttgaaataaggattaatattccttctcaactaaataacactctacttatttaatccccaagaatgagaagccctttaaagttgttgattataggccaattgcttgttgcaatactttgtacaaatgtatctctaagatgatgtgcaacaaaatggatgttgtgttgccttttctcataaacatgaatcaaggtgcctttatcaagaaaagatccattacccacaatgcgctcattctataggatttgctttgtggttacaataggaaaggaatttctccaagatgtctcatgaagattgattttaccaaggcttatgacactatagactgggattttttagaagatcgagctcctgaaatgttaattggatcatgacttgcttaagggggtctacctactctttagttcttaatggtcatgtgcaaggaagatttcaagaaaaaagggattaagagttgcttaagggggtctacctactccttcgttctcaatggtcgtgtggaaggaagacttcaatgaaaaagagattaagacaaagggatcccatctctcttttgttttttgtgttggtaatggaatatattactcgattattactctttattgttggtgcttcagatttcaggtatcatccaatgtgtaaatccttaaagatttccaatctttgctttattgataatttgatcttattttgtaaggggatagataaagtcatttggatcatccaagaagcttttgctacctttagtagctgtttaggccttcatgctaacccgaacaagtcatacatctactttggtggaattgatgaagcgagtaaattggctattcgggatctagtcccttatgaagagggtcattttcctctcaagtatctcagtgtgacaataagaccaaaacttaatgaaaaatagtggactgtaaaagcttcatatttgggcaagtaggcatctgtcttttgcaggtagagtgcaattgatttatttagtattgttgggcattcattgttattggatgaatatctttatgttgccgcaaaaagtagtcagggatgttgataaactctacagagactttttgtggggtgcgaaaggtaatactagtaaaatgcatctaccttcttgggatcatgtctgcaagcctaagaactatggaggattgggttttcggaaaggatccaagtagacaaggcttcgattgctcatttcatttgggctattactacgaaacaagatgtcatgtgggttaaatggatcaatgtcatatacttaaaatgctaagatttttgtgtggttgtttagaatgctgatgtgagttggtactagtacaaacttcttaatcttaggaatatttttactcgagagacaattatggatgctggaaaagggggaagatttcgggtcagtaagctttacaattcttttcttactcctcatgctaaagttgataatcacaaaataatttggtgtggactatccgtaccaaagcatagatttattttttggtaagcctctcataataacttattaacaagagatcacttgttggcaaggtatcgccattaattctactagctgcccaatttctaaggttggtgaagactgttataatcatcttttctttgattgttcttttctaaacaactcatgcatgttattcattcttggcttggtaatgccatttggccggtatcttactcgtattggcttttatggttgaatggtcaccgagatcgcagtcttcctcgaattggcttgttgtggttgtttgtgcaactacagtttattttatttgatggaatcgaaatacttgtatttttgagcaaaagttttttatgatttcttatgtgaataatttgattagaggtgctcttaaagtaagattattacttgttaatagtaggaatctctctaagatagaccaacaaattttttattttatttgtaacatgtaagtaagtctgtcttttgttattttatggatgttagcctttgtaacatttgttctattttgattaataaaaaaaaaatcaatcagtcaatataatatttttcgtgtataacaaaaaaaaagtatattaaaactgagggg

SEQ ID NO: 48787 - DNA, 773 bp, Cannabis sativa
ggatggtttgacattcaacaacgaaaagaacgcaaaggggatgttatgtccttcgttataaataatattttgcactgaaccacccaccgacctagctcgataatgacacattattctacgaacttactcgtcgtggcttggtttgtaacttctattaaaagtacgatgatagtttggagatctggctcctacgtcagactcaaattcatcctcaatggaggaaataggaagtggagaactagaatcgtcagacatatttaactaaaagaagaagaatcttgaagcattaaagaagaaagatatataacttaagaaatagaattttactttttataaactaaaaaagttgttgggagagtatcatagtacatacctaacattaatgagcattaaatacccaaccaaacaatgcaaaatgtttttctcaaaaatatgtcgatggtttttcgatgttgtatcgatattttagggatagtttatcaatgcgttgtcgatagtttggagatagtttctcaataattttcatgaatgcgatttctcaatattttgctttttaaatattcttatcgatggtatgtcgatattttttcatcactttgtcattaatattacaaaattttgtcatttgctttccatgactaggacttttctattattttgaattttttagtatttgtatcgatggtatattgatatcttatcgatattttatcaatggtttgtgaaatccacctattaaatgttgttatgcttatttatcaatggtttgttga

SEQ ID NO: 48788 - DNA, 673 bp, Cannabis sativa
atggtcgatgtgggactctacttcagtcttgacaactaagcttagcacccaaacgtgtcattaagtgatgactctttcttaaaacaactaacttatattaattcacataaaacaaatgcaaccacttggattattatatatatatatatatatatatcaatctcttctggttgtgaaaaatattcgaatgttcattaagttatatataatcattttaacatcagagaacacagaaacacataacacttggaaattatttaattgcttaatgataattaattttgaggtagtaatttttaggggatatcaaggatagtcataattaatgttccaaaatcattgactttctcctagtaaaattgtgacttagaacattagtcttctcttcagaaataataagtttgaaatctctcatgtttttacaactcttatcaacctctgctacaataataacaggaacaattatgtgtagaacttgtgtgaatatagataaatagaatcaacaatgaaatgaaatatatttattaagtcaagacagctcaaaaattcaaccatgtttctcattgttacatgctctaatatggtatactatctacatccaattcgtaacaaaactaaattttgtatgaataagaatatggtatggtggataaccgtcaatggcgggcggcaa

SEQ ID NO: 48789 - DNA, 1395 bp, Cannabis sativa
cccttagtgcttagagatagggaaaataagcattgactggtgccctataaatagtattgattttttatgatcattatcaaaaataaaagaagtgagattccatattaaattgtacaaatagcttatgacacttcataaagggcactagtcactataaataccttttagcaattcattataaaagtagataattgtcccacctaaattttatttctagcttcgtccctcattaagaatgagatctttatgggaaaaaaaaaagagagactaattaagatttttgtctcctgaactttttcaagtcgttaaaaattctcctgaagtattgagattgttgaattaaagaatttttatttaatttcattcaatttacttaatttggtgattgtccatgtactaagttgtgcttccaaattttaatatttataaaatcatactatttcaactttaacatatactaaattatgttcactaaattttcatccacgttaaattttttttttaataaaattaaacaaaaattcttaaatctaattaatttcaatagtttaacaagaatttttaataatttaaaaagtttaataaatataatttaatacatattaaatttaaaaataaaaatattaaataataataataataatgagatttttaagaaaagaaaaagtgtggaagaatagcacacacatcgaaactaaaataaaatttgagtttggtaagtaaaagagggtcattgattacgtataagatatgaagtttgtgtatacccaagacagtaggccgtagctactatgtgagtaacaggcctaataataatatattattacaaaacaaatgtattaaattaattaatttgacttcttctcacatatttatttatttatttatttataggccacgtaagactatgtagtagaatagaactgggtctctcttcttcttctctctactaggcacaagttacggtgaactctcgcctcacgtgagtacctcatcctctctcatatttgttatctctatgttgtttatatttagaaatttcatttattattcataaaaaatcctttttataaaaattactttcttaataaatttatatcactttattctaataattttatattatacccaaaaaatcattttttttattcttatatataccaaaatcatatttttttttgaacttttaaagtccttaaaaatactcccgaattattaagattgttgaatttaaagatttttatctaattttaataaaaaaagtctaacatagatgaaagtttaagaaacatgatttattatatgtcaaaattcgagaggtatgatttagtagatattaaaatctgtaaaacatggtttattacataaacaatcactgaaatagtaaaattgaat

SEQ ID NO: 48790 - DNA, 610 bp, Cannabis sativa
taaaaatcttaattaaccttttcacaacagaagggctattagttcttttctattttctgaaaataaagggcatatttaaagaaggaacaagattaaataataaaatctcatgcaagaaatgttgagaaagcaaatgtgagagcttaccaaattgggaatagtttgcagtgaggttatattttattgagtaaatgtcaacaaaagtaacctttgcttcaggaaattgtcccctgaacttctgacaaagatcatgcagttgagaattgaaagcattagcagcgttattgtgagaggtaacacatccaaatttgtcgagctttgatgggtcttttccaaattgatcaacaattcttggtaggcatccgaaaggactagtgttgtgtatccaaaaatttctagcgccctcactgtataatctctgtaagaatggaaacaaagaaaaataaagtaaaggaacatggggatgaaaattgcttctaattaagatcttcattcttccttatcgagaagaaaaactacctttaatccattctcgaattctgataagagacttgggattgaagcaactacttggtcttctgattttgaataaaatgcaccatcaagatcg

SEQ ID NO: 48791 - DNA, 4441 bp, Cannabis sativa
ttttctttttcttttatattttttatttggtttagttgtttggtgaaactcgtttcagttagctttattatttaacatttatattttgttatgatttttcagcctcaaaattggtttcacaagtttcaagtgttctgtaatgaggttgctctatttttatgatgttattatatattttttagtttgtataaaactagttttattattgtctgatatttgaacaaaaatgtctgctttattttaaataaccaatttctgacatacttattattttattgttttcgtaactggattttttttattattgttgttcataattgagttttaagtttcagttttttatttggtaatttcaagaaattagttttactagttaatttttattttgattgctttattaataactggtttccccttccactattttttttgttattcttttatggtttttattgagtttttgtctttttaattttttttgttttctttttttctctctgattttagtttctgattctttttgttatatttgttccattttgtatgcttaaatcaactcttatttttgagcaagcaaataaaaaattaaatatcaaaataatgaatgaagttagaagtttggttattaggtattgatataaaatttatatgttcgaaactggttttcaaatttagtattgtttttaaaagtttagttagttattaggcattgtgtatttttcattacattgttgatgaaagtggtcttttttttttgcttcttttaatattgatgaaattattttttttctgcttcttttaatgaaattattagttttttaaatattgatgaaactgatttttaaagtttgtattatttttagattataattttttgtactgtgttttttttttcattatactgttgatgaaacttattttttttctactacttttattgaaataattagtttattttaatatatagaattaattagtttattaatttattaccttgataaaattattttaatattgcatcaatttctataaaaaaataaaaacaaaaacaaaaaaaaaatagtaatttaaaaaaatagcagtaaaaaaaatcagcttctacagttgatattttatttttagtgtttcattttttaaaagataaaaaagataaagaaaaataaacacaattttaaaggttttttatgacattcttttttaaataaaatgaacttttcctatatttttaagttttttttttaaaaaatgccattttttttattaagaggcctaataacagccaaagaaaacaaacaaagagcgcaacgctcaaacagagaacaaagaaactgctaacaagcagcaaacagaaagaaacttaaaaaaacttgcctgaagaaacaagcagcaagccgaaaaacaactaaactagctaaactaaaacttaaagacaaaataaaaggataagtaaccgagtcagccatccaccaagggagaaggtgcgaaaccgaaaaaactgggcgcctcaaaactcccaaacagttgagagtgcagggccctttgagccgcattgtgggccacacaattgtgatttatggggatctaactgatctcccacaggtcaaacttagaagataagtctttgaacttggaggcaatgtctttgatgttgtagtggagcttgtccaatgcattgctatctattgaaattgcagagacagccctagccgagtcacactgaaaaattatgttcttgtggccgagattaaaggcgttttcagctccccagcaaagagttgcgagttcccctgcttgaggctcgctatactgaattcgggttgtgtgtatgcttgtgatctcccccttatcatttctgaaaattgccgctccaactgattgggtttgaccgatcgctacatcggtgttgcatatgtaccatccctcaggaggaggcagccactgcctcatcggagctgagccactttgaagggtctgaaaagcctcctgaagccgattatcgatcagctgaaggattatcttcgtgggcgtgctttgacgatggtgaaccaccttgtttctttcgctccaaattttttcgaaaattattgcagccccctcaaggaatgcatgaaggctggtctcttttggtctgttatcggagattttgaaccaatttatccaatcctcccaattggagaagttgaatgaggaagtcctaatactccaacagcagccaaaccacaaggaacgagccaaatggcaattccaaaagatatgcaacgagtcttctattaccatagaacaaagaggacaattgggatcattaataccagcaaaaagttgaagtttacctcgggttaataggcaatttgagagtattctccaccaaagcattttcagtctcgggtgcatcttagccccccataaaattcgccatttttcattaccaatgattctttgatcaaggttttttatggttcggtaggctgagcggatagtgaatttgccattgctttcgggagtccacaaccaagagtcttccactgggtggtttggtaaggtgatattcaaaattcttctggcgtcttctagttggaaccattggtggacaaggtcctccctccaggtggagttatggatgaaattgcatactaaactgatgccctgagttgcttcaagcctcggttgaggttggagattgcctacgggaacccaagggtgaaaccaaatggatgttgattcaccgtttccaattttccggcatatacctttgtgaagttgattccgagctttgagtatagccttccaaagcacagagtcgaaagcttgagggtcaaggtcaaggaagttgtggttcttgagatatttagcatccatgacatgcttccaaaggctcgagtcatccgacaatactttccaagcccatttcatgagaaaagcttggttggttgcctccgtagttctaaatccaagacccccgtgggttttcggcttgcaaagggtctcccaagcaacacaatggaggactctattttcgtctgtatctccccaccagaagtctctaagggctttatcaattttgttggcagtggtggtgggaataacatctgaggaagcaacataatttgacagagctgagccgactgatttgataagacaatctcttcccgcgctagaaaggagtttggctttccaacccttgatacgcaataaaacccggtcgaccaagttgttgtagttactagttcttcttgaagtattgaatagaggcagccctaaataggtcgccttatcagtcatttgcttcattcccaagatttccttgattgattggatccgccctcgggacactccacaagagaagaagaccgaagatttatggaggttaattgactgtcatgaccactcgcagtaggtggccaagcattccttgaaggctttagcttccttcatagaggcttgcccaaagagcatgatgtcatctgcgaacataaggtgatggatggccgggccgtgtctacccatcttgatccctttaatcaagcctttttttccttatccataagaaggcgagaaagtgttttgaccgccaatataaacagagtcgggaagagcggatcgccttgccgaagacctcgctcaggcttgatcttacccgctgtggaaccatttagaatgagcttgatttcatgcacagaaatacaggcacggatccatcccaggaagggattagtaaaccccatattcgagagaattagcaaaatgaagtcccaatccattttgtcataggctttctctaagtcaagcttgatcatcataaagcctctcttacctttcctctttttcatagaatggactatctgtcttgcaatcatcgaattctcagcaatgcttctgcctctgacgaacgccgcttggttcggggaaataattctagggagtaccccacgtagtctcgaagcaatgattttggagatgattttgtaggagacattgcagagtgcaattggacggtagtctttagtggataaaggagcttcattctttgggattaagacaagggaggtatcgttgatgaatcttgacagttctgaatgagtgaaaaaatgggtaaccatttcaaacacatcctcacaaacggtattccaatgatgtgagtaaaagcttgcggggaatccatccggacccggtgccttatccttccccatttttgagattgtcgcggtgatttcttcgagattgggtatggcatgtaggagcaaattatccccatcggtcagatccttggaggggaagatttcaatcggactaggcatttggagcgagacttgctttgagaaaagatcattagagtatttgaggaagcattttgcaatttcggcttggtctctaatccactcaccatcgtccgggtttttaatgcattggatgtagtttctcctccttctcacaatggtagaag

SEQ ID NO: 48792 - DNA, 2694 bp, Cannabis sativa
  modified_base (117)..(123): a, c, t, g, unknown or other
ctgtaattaactgcctgattatgttattataaatagatgcagattagactgaaaagggggaagaaaaattcataagaaaaaagagccgaagaacagtatcagaaatctaataagatnnnnnnntggactatgcagaattttaaatgcaaaaccacgtaaaaaaaccttcgtgttcatcattttctttttatttctttactgtttttatttctctatgcaagtttatcactattcaggctcaaatttggttaacaaaaatctgcgttaacatatactgaatcagaaaaatggtaaaagatattgaaattttgaattctggcatagctgagctttcattaaacatataagtacatatatatgtgcatatatatatatggaaataaaattaagagacatcttaggatatttcaataatggttaactttagaataatatacaattctttccatattgaaaagaaatctatacattaattttctttttgattccttagtaatttaagcaaaagtaaaattgagcatataataatataacagaaagaagtagagatcgattcttataaattttttgttcatccaacctgacagaaagaattaagccctaaacattttgaatgagggcttcgctggagaagaccgcattctaggatgatatgaagcagcttcaggttccaagaccgcattttgttctctggttgaggtgatgatgtaccaccagttaacggaaccaggcttgcggcgattaggatccgattttcttgaggacgatgcttggatcaaagggagtcagaatgaggtgagagaacgaatgagctataatcctcaattaatcatataagaccatttgatcataaagtcttcaatcatataagactatctgatcttaatcatcaatcaatcgtaatagattcttaacattttttttcttaatatttatttatttttttaacgtttaacgttagtattctatctattttcttaaaaaaatcgttaaatcaacaaatatcattaaatagacattttttttatatataactagtttttaaacgtgcattgcacatacataatatatatagttgaagattgcatgtaatttcgtttgaaaaaaaaaaaagaaaaaagaaaaatcatatgttattattataaagataaattatttacaaaatatataaagatggtacatattaccataaagttagttgaaagtaaattatgaatataaataatttgtatgataaatatgtttgataataaaattcttaaatagttattacaatcattattgataatattttatgttatatatattgaacatataattttaaaacaatatgtattagaagacattgaaataaaagaagaaaaaaaatataattagacaatggcacaataataaagaattttaataaaataatacatttgatttgttcaaaaaattaaaagaataataacttttatactaaactttaaaatgaaattagaaattacacatacataaaaatttgatataataataaaaaagttctttaaatcaaattaaatatggtagaatacaaaatttttctaaataaaatatatagcacaaaagatttactaaatagcaactcaaaagggtaatgcttaccaacattagcatttttttaaaccatcattaccattataagtataattttattcgaattttttgttatatgttttaaaaaaagtttaaatcttaattaatttaaaatatattaatattattttaataaatattatattaaattcaaataagcatattaatacatagcaaagagatttgatataaaaaacataattaactaaaataaattaaaattacatattgagataacatatataattgtattagttatttcgaaatttattactataattaaaattattattaaattaaagacacatgaaatataaacaataaatagtatgatatattattggagaaagctataaatattaattaaaaatatgtatttttttcataataaaatatacagatttatgctaatatatattgtaattatttataatttaatttgttcttcgaagtaaaataatgttattaaaaaaatatacttatggtctttaattattaaattactttatacattttttctaaaaaaaagaactaatgtgctcatctttaacaatgtaaatttaaaatataaaggaaaagaaaaatgataaatatatgaaagagataagatgagggagggggtgaagtctaacagtaatttttttattgtaagctataaatattaattaaaaatatgtattttttgtcatggtaaaaaaatatgtgtatttaagttaatatacactaccaaaaaaaaacttttggtaacaattaaatttgtgattaaaattaaaaaaataattatgagtaaacataaatcataattcctacattaaagcaagtttaaagggagttgtatggggagttacttgttcgggtggaggtggaggagagaagcagagagatttgtaaagttaatgtaattgagtcgttgttgtatagttatggtgctctgcttttttcttttctttttataaaaggataaaaattcggataattgcataaggcaaaaatgtaaaaaaaaatacatttatatgcttaaatttttttatatatttttataatttttcatagtaacaacacgaaaacaacaagaaaatt

SEQ ID NO: 48793 - DNA, 3032 bp, Cannabis sativa
  modified_base (1248)..(1261): a, c, t, g, unknown or other
aaggagcggcggaagagagagaacatatgtgagaaaaatatatcagacctaaaataaaaccctaaatgggttaaaaagattagggaaactcttttatcgcagtttttagcaaaaatatggataaaagggtttctcctttaccccgtttggctctagaaaaataataaaaggtgaaattttgatttttttagtgaccagccaaacaaggcccttgctccaaagtgtgacaaaagacatatcaggggcgtgtttggctagtgaataaaaaatcaatcttaacctttttttagtgtaattttttctttaaaacatggcccttgtgccttatataaaagtggggtaaaaactatcaacatactttttatcccactttacttgaaaagataaaaagtgggataaaatatccattttctagtagtaacaaccttagcacacctcaatcatgtcggacctcaaccacaccttgtcggacctctaaaagcttgatttttctcaccaaaaccttcactttcctcactttaaaagcaatagtaatttttatacaaaatatagttggtttttattgtattgcatggatctacacattatttgttgtattatgttgtttttgtgacctgaaatgaaatcaaagtttgtacccgaacattgttttttttttttttttgagtttttcgaatttttacgatttgtacgttattgtgtgattttgtgtgcgatgccaacataaatcagaagttagggatgacttgcattatttttggcgacattagacggtgtcatggcaatgttgtgcgattttcatagttttgtaatttttatgcgatatgtttacatcattatgcgatattgtttattgttttttaaattttcttgttgtgtctttttgtgcgatataatgtaatattatttgttcttgagtgatgtttgtgccacatttatttacgatattatttctttattgtgcgatatatttagctaattttttattttatttttcgtatttgtttattgtttgttttggacagattcagctgtatttgtgcctgtactatatgatagagtttgggttgtagagaatttgaactgggtattcaattcgccaacaagtaagataataatgtttgacattgacactacattggaaaaggtgcgtgaagttctgtgtgaagagttggatgcggaccctttggtgtatgaactgaaattagaggtatgttacatgtacatgaaaggcaccaagtttccacnnnnnnnnnnnnnnaaagatagtcaactacgagtgttcttgagcatgatgtaaaaaataagtgtggacaacttgttgccactatttgtgactaaggtgaggaagaatgtaaatttggagcttactcccccaactgctgccccaactgtaacccctcgaagtgttgttatgaccttttcccataaactaatatgagggttgatttgaaaaagcaactccccactaatatagataatcacaaagctgatattgcatttgatcattcagatgagctcgatgctctatttcacaacaatgatcctatggtagatttgggtaggaatgatgatgtggctatagaggtacctcccctgtgaatggaactaattccaagcaagtagagcgacaaagaagaccccccccccatagtaagaatcaccaaacaccaagaaaaagtagcagtcggccaggtccttagtctcctacatctgaatttgatgtttctacgaaattcaaatctcttatgtggacaaggaaagacataaagaaaaataatgtgtatacaatatcccttagttgtaatatcctagaaacttaattatgaataattaggatttattatttattatagattaattaggtagtaatgtgatatacgggcctaccttattaggttatgcgatatacctggcggcgtaccttattaggtacatgcgaccagtgatatgagaatatcaggctatgtaataggttgaaactgtcgttgggttccttcctggcagcttaccttattaggtacgagcggcagtgacatgtgagcagcgatcataggtacaggctcgtttgattaggcgatgcaatatattggcgtcaggttatggcacgggttcaccttattaggtgatggaattatgtgatgtatgggtgccaagctttggcacgggctcacctaattatgtgatgcgattatgcgatatatgggtgtcaggctataggacgggcttgcctgattaggcaatgtaatataggattatcatattaaagcatcgacttgcttgattaggcaatgtgatgtaatgaagatggttactttatgaggtaatatataatttatattattaaatgaatatgatttctattattgatataatagttttgtattaccaaatatttgtatactgatgtttattcgtggcagatgccagtagtgatttagatttcatcttatgagtaatgtgtgatcatttgattcttattgtctgagtgtaaatgataatatttgaataataaattatatgattcttattattacttttcttggtgagtccttgtgactaacaggtgctatgtggtgcaggtaaaggtaaagaaaagctagatcaaccacatggtgacagtcttctccagcaatatacatattgactccactgacctgtgtgtcgagctgctaggaattattttggactggctgtatttgctgtgtattttgattctttgttttgaattattgtcgtatatgtcttttgtaaaccttttataatagggattctccgaacacgtttttaatgccgttaggatgcccgtttctagtgttttctttttgtcaagtttttaatatcatgactgtttttaataattaattaatctattagtattaaattagtttataaaattacacatgtggcgtccctatgggatagggcgttacattagtgcgtcttcaagggagatatatcttggcaagttgtacaaaaataaggaagaattgaagaatgtagtgggaaggtatgcactgaaaaataatttt

SEQ ID NO: 48794 - DNA, 1480 bp, Cannabis sativa
taacaggttagcgggtgcagcactagtagctcctgttgtaaacttctggtggactggtttccctgcaaatttatctaatgaagccttcaaccaacaactttggaatgaccggtgggcactaggcgttgcccaccgcaccccttggctgacatactggtggaatactcaaaaatggttccccggttcttctgttataaatggcatttctgtagttctttctccccaagacaaagaacttcagaactccccgaaaaagcaagaaaagaaaaaataccaggtacctgtatattttttttgttgatagcgtcaatcttttgaatagtctaagctgaggtatcttgctaagttttcaaccctgatggtttttcttttttcacttgtttaattactttgttgtgtaatttttaatactaggccgaggtacgacaacagggagaattggagtctctccaccgcgacatgaatgtgggattcgggaagtgggacttcagtccagtagaactggaaaatccatttccaaacaacgaaggttcggtgcacctatggcaaggagatgaagatatgcttgtgcccgtttcaatgcaacgctacattgttcagaaactaccatggattcactatcatgagttagccggtgctggccatttattcacagaagctgaagggatgtgtgacaaaatcattaaggaacttttggaaggaaagaagtgaacaacacttatatagcttctaagtttacatataatgttctaaaactattgcgaaacagaaaacaacttagcgaggcatgttcttctttcataatttgagttcttagggactaaagttgcattattttgtttatcagttttgtacagaaacttcacaaaagtcgcattcaaatatttataatgataataataataataacaataacaataagaagaagaagaagaaacaagtaccatctcctcccatcttgggaaaaagtatgcctgcctaagaaattaggctgaattggcttccaagagggtaggaaatggaacatatacatttgggccataacaagcatacaagacaacctatgagttaatgaattaataccatctacttaaaagagaagaatttttggattgtgccattcatgaatgatgatagctggtactttaagaaactcttgaagttgagagatactattgacgagagagcattgatgaatgcaagaaggactggaaaatttaaggttggatccttctatcttaacttgataactgttgataatgctgattatgcatccaatgtatggcataagttgaatattttcaaacataaattcatatattggcaagctgtcaataaccaactaatcacctgggatcatttgagcaaaataatgaccatacctacgattatttgtcctgtttgttaaactgaaaatgagactcttatccacttgtttctggagtgtccacttgtgtaaagtgtggttgttgaaatatgc

SEQ ID NO: 48795 - DNA, 1192 bp, Cannabis sativa
atgaatttggacattttctcctataaactcgctggtcgaacgctttctacgagatggctctttcgttgctcaaactactagttggtatactccatcaaggatatgcttgatgcttgacgaccccatctggtctacacaaccaaccaatgccttctggagagtctcttcaaagatccctcatctactcaacttcttccatgttcgccccgtataatatatgcttaagatttttaatgtcacctagtgtatttatttcatctttaatatatatttttatagtcagaaattattaatgcttggttctaaattttattaaaaataaaattatttgattttatgtatttacattaacttgtttcacatttaatgcttaaaagttataattttaaagcaaaaaaaatatattttttgttagaaaataattagtttgattactaatttaattatgagaattaatatataaaaatacacttaagtggattctgaaaccttaataattctccataaatatcattacaaatatttgttactgtcatttttaccgttaaacactttattttattttgttatcaaaaatctcatcatttcagaactaggttagagtttaaataattttgattaaataagcaatttcttcgatctcatgcaattcccatggatttgaccttgttcttcataatttctacactacaataaagatttgtgctcttgcgagttgataaatgcaaaacgtaccattttggtatcaacaccaagttacaaagttttgcatcttagtttttggggttctaatcataggcctcttcatgtccaatttacttctgatcttaacaattttatttctagaccaaggttgaaatctcgatttcactttgaacaagcttaggctgatgaagatgattttgggctattatttcttcttcttggaatgctccttcaggttctttttggtgagagtcctattaataaaattaagaatgtttatgttgtcgttggtgattggaattctaaagtttataggcataagaaaattttaaaaaaaaaattgcaaaatcttgatcctattgtttcttcttctaatttggagcgaatatgtttctcttgaaaaagatcttgatgctcttcattgtaaggagaaaaaatattgagcttctagatcaaagcaaaattggctcaagattggtgatcataa

SEQ ID NO: 48796 - DNA, 1458 bp, Cannabis sativa
acaatatgtaacagttttcaagtatatcagtatgtaatgttgaatcgaatataaatcaacaaaaacagaaaacttcaattaaagaaaaaggcaaaaacaccacttgacaattagaaaaatcaaataaagatgagtaggaagcacctgcaccaggacgtaatttcgagtgatgccaatccaatactgaattaattttagctctcctaaaaagatcagcaggatacctgaagtaatgaacatggaacttggaagcatcagaaatgggctgaatattataaacattaataggggaaaaaatgtcacttataaaattttagaaaagatatgtcattaagaatcagagatacagaacctaagaattcaacagtgaaataaaagcaaaacacagaactaaaattgttgtagtaaccatgtctctaatcagtcattatataaacttacttttttcttggaagtgctttattatttatactaaataccaaattcgtactaataagcttcttaccaattccaatttgtatcattatatatcagcttaaagaaaagatgttgtaaatgaacaatggtggctataatgttcattgagcttatatcaaaccagtcgtacctacattaacccatacagaaattgagtataataacccatatttcaaacacatgataaaatagattatccatttcttaatatttgtaaaacaagttgaactcttgaaaataatgccaccaattatcaccacgatctaactgaattccgtatatttcaaaagagaaaacagttaagaacatcaaaaaattaccaaaaaaaaaaaagaaaaactatataaaaagtatgaaatccatgaaaccatgattattctagtatataaaatcgggtcaccatttcaattgatttcgtataaatgaacaacgaagcagcccattatctacagaaaaccaagagaacctaaacctaaatgacagcaccggccttggaccccaaccccagctgtgactccagaccttcagaacacacacacacagagagagagagagagacctcttaagaaatgtagaggatgcctggtagagacctccgccgacgccgtgagtgagaacctaaatttttattgagttaaatttgttgttatgtttctagcaaagagaaaaaaagaaaaaaagagaaaaagaaatattgcaattctctttctatttaaaaaaaattattttgttttaaaaaaataaaagaaaaatattaagcatgttttattaattatatttgggataactgcggtaaaagtcctcaaaaacttagaattgatgcagattaatcaccaacctcaaaaattagtcgtaataatccctaagttcacattttttgtaagtcgtggtccctaacttaactgatccgttaaacacaaataaaatgccacgtgtcagtttttaattggtttaaataataatttaattaaaaaaatttaa

SEQ ID NO: 48797 - DNA, 3481 bp, Cannabis sativa
  modified_base (76)..(83): a, c, t, g, unknown or other
tgaattgttaatatacggttcaaaacgcaccgcaccgcacattataaaaatataaatttttatatttatttaggtnnnnnnnntgaatgttcaacttaaaatctactaattttgtcccatgatttttatacacataaaattacattagtgggtcccaattgaaataaacatgaattttcttaatttctctacatatatatttacataaaaaaaaaaaacacaatttgaagttggtggctatatatatttatagattaatgtattttttattttattttaatctaataaatataaattatggtgttataagtttataatttttatatttaatttcatatatatatataaaaaaaatcacataaaatttgattttaaaaaaaaaaaaattgacgtgttgaccaggtcaatccattgacctagccaacccggtcaaaccaaacccgcaaattcgtgagcccgaaactcgcgaacccgaaccatttcatgggttgagtccggctacaattttttgaacccgaaactagcaaaattatcaacctgatggctctctattcctaaatcatcttttttatccactccaaccatatctacaaccgagtcccctattgaaactgaggtctctttcacctgctttagctcaccagcaactttttcttccttcaattttttttaacccaagcttttggtccattcttcttgcactcatccatattatgaccatagcctttgcaattcttacacttaatggagccattcatatttgaaattgctcttaaatttttcctttctcattctcagagtagataatgaatggaggatcatcaattacctccatttttacaaggacttagcgaatctaataatttatcttttcagtgtaactttggccaccataattggttttcctatggtgctaaccaaagcactaaggcagttgtgaccataatattgaaggcatagattaggcaatctaatccataaaggcacaaaatgaactaaccttactatgtctaggtcttgtgtccaaggacacacaatcaccaatttcttgtcaaattgcacaacaccaaactccagcactaaattgggagtagcctcatcattgaatttcacaatagtgagtcccatattcatcctcaccatccgttcaatgccaaagtgtcaccaaatttgattaatgaatccttcaaaaactataaaagggggattgacacccatcaccatacaaataaccacagaactccatttctgagcttgctctgtcacctctaccaaatcaatttaagcaacacgcttacaaaattttatcattagttcctcatagcgaagctttgctgctgcactaattttttgaccttctttgagcttcgcccaatgtctttgtgccgaggtttggaaatcttccttctcaacttccttagccaagttagtgttcaaccagttcctcatcctcaatcatctgcgaacacaattgtatctctagtattgcaattccatctggttcatcaatggcacattcatcaacaatcttaaattcttggtttgaagggggatcttcaactttagatcgaattgtaggatttcgagtaactttcttcttcttcatcgagagagaagctagttcctatgcacgcctagggggctcctctcctttgtcatatctattaattcacgaaattatcaatactctgttgctaaaattgagactttattgtcgtctcaagaacatcaaatggagactcataataaagatttggactctattagtcttgctatctatcgtggtttcaggccaaaaccatctggcttttcttccttttctaacagtgtagatactagatctctcattgataatggttcaccaactaatttaggccgtggaacttggaatccatattttgtttcactaagatcaaacacatctagtcaaactccaaatcactacaatgttggttgtggctcatccacatcagctacttctattcctcattcttccatgatccctggatcgagattagtgtgccaattctgctctaaacctagtcacattacttcaagatgctatcaaaggttcaactttgatttccctggtgttggtgcaactaatgtcactaaacatacaactcaacttgctactacaaatagtgttgttgatgatgcttagtaccctaactcaggtgctaccactcattgcactacaagcaattcaaacttcactcacaaataaccttatgttggtttaggtgagatgcatatgggtgatggtgttggccttccaattcaaaaatggtaacattctctttcattcatatctctcctctaaaccacttgttttaaactgaatagtacatgttccaaatatcaccaaaaatttaatctttgtctttaaatttgcatcaaataataatgcggtctttgagttttatcctcattttgtaatgtgaaagactagaattcgaaggaaacactaatgataagacaaattaagctaggactttatgtcagagagccttcccaattacacatcaccaagtctgattagtccttcaatcccaatgtcgtatgtgttgttacttccccaactgtgaatgccacctctgtgttttcatgtaataatttttctttgtggcataagaaacttgcccatcctgctgctaaggctgtacaatctatcatgcaactttctactattcctaaaggaaataaaacagttattgattttcgtaatgcttgttgtaaaagaaaaattcataaatttccctttccttatttagatattgttttcactaaacctttgcaacttatccatactaacatttagggtccctttgtcatgatttcatcccaggctactaatattatattaattttatagatgcatattctaggtacacttagatttttcttttaaaaactaaatatgatgccttacaaacattcattaatttcagaacccaagttgaaaaaaaagctcaatcccccattatttctgtgcaatctgattggggggagagtaggaagtcttagaaccttatttgatgaagcatagtattaagcataagttgtcttgtcccaccactcaccagcaaaacggtgttgctgaaaaaaaatacagacatttcattgaaactgctcttacctttcttgctcaggcttccatgcccttatcttacttggatgaggctgttagaacatcctgctatgtaaaaaaaatagactccttacaccagttattcaaaatgacactcccttacacaatttttttctcaaatatcctcactatgctactttaaaagtctttggatgtgtctgttttcctaacatcagaccctataacaagcataaatttgagtttagatctaaaaagtgctctttcctaggctacagtttgaaatataagggttacaaattccttgcttcttctggtataatttacatgtcaagagatgttgtctttaatgaatttgattttccttttgca

SEQ ID NO: 48798 - DNA, 1528 bp, Cannabis sativa
ataattttaaaaaatatttttacttttctaattttaaaaataaaaaattaattaaaaaatattaccaaatggactcctaatttttatctttaattacaaattttacttcattcttgcgtttgccactatactttgtattgcaagagcacatttttttaagcaatacttttcttgagttatgcgaaaaatacaaaatcgagtttataagtataaggatatggttttgtctcgtgatgtacttttacagaatgtattccgtggtacattagatgagtaaatggtacattaaatgagtgtcagggtacatttctattttttaatactaattaccctagatcaatttcagccgtcagatcaaataactccctcatctgacggctgctgtacatcacggattataatccgtgaaaatacaataaatccgtgaaaatacaataacggaagtgaaaatacaataacggaacaaaaaatacaataacggaacaaaatcatatccctataaatatatacatatatttgaaccatagcctagtttatttttatatatattttcttttttctttatgcaatatataagttgaaattctttgtatatattaattttttcacctaatatttatatgcatataatttattattattcaaatgtgttgatgagatagtatccttaataataaatatatgagattttttttttttaggaaattgcattgtaggcaacctactcataataaaagtgtaataaaagtggtaagattttaataaaatataatatgaaagtatttttgattaatgaaaataaaaaagaggtattcctcaacctatccttttttttttaaactaattatatatggatggattgttttttttttttttttttcttttttgtattttgataggagtatgtcataattgttatttcttttgggaagaataacaatgttttttcgttataacaatatctgatcaattccacgcatatactgtaaatacatatgtatgtatgtaacggttgagtaaaatttgactatataatattaataataatccaacggtggtaaaagaaatatggcaaaaatctataatgttgtgaattatattaatggtatatataaaaggtaaatgccacagaagaaatttaatataaagaacatggattttgttggactcccagctggcatacagtgatattatagagttgtcatctgtatcttattaattttgtgaatcagaaaaacaatcacccataagtgaatttctaattttgagttgttacattatgtgattttttttgtttaattttttcttaattttgcatatacattacatatatggatgatcatgtattaatattttaaataaatttaaaatactatttccatcatctaattaatcatatgatttatataattttttttttgaaatttgcaaggtttctcccaaaataaaaaataataataataataaaaaaacatcaatcatgacatcatcagcagagattaattgggtttgtgttcaataatatata

SEQ ID NO: 48799 - DNA, 663 bp, Cannabis sativa
tgagtgtttagtgtgggacaatttgggacagtgtttgtacgttctgtagcagtggtggggagtgaattgggtgggaaagctgctggtatagacctgagttgggtaagaactggtggttcaggttgaatcacaggttgagagggaataacagcttgttggtcattaggtggtgttggttcagcctcagcagtcacaggtgcagtagcagtgggcaaagaattagaagcaatattaggaccagtagtatgaaaagttgcagatggaaattgtgaatttgtaacagaggcacatacctgatctgatctgttttgctgagatgaatgtggtccaggaaagcatgtctcattgaacacaacgtttctggctatatagattcgaccttgtctattttaacacaagtatcccttgtgataggaagaatagccaaggaagagacactattgtgatctcagatctgtcttgtgactgttgtaaggtcttaggtaagggaaacaagcacacccaaacgattttaagatgttgtaatcaggaaccgtgccaaacaaatactcatagggactgacattggacaaaacaggagtaggtaaacgatttatggtgaatgttgcacaagaaaaggcatgccaccaatagctaaggtcaagaccagcttgggctaacaag

SEQ ID NO: 48800 - DNA, 2581 bp, Cannabis sativa
  modified_base (622)..(624): a, c, t, g, unknown or other
gattcattattattttgatgtttggttaagattatgtaaaaataacatggaatggaaaggaaagaaagtggtctaatattctaaaattttggattttctcttgtgtatacagctaaatcaaaaatattagatttagggaatttgttttaaaaaaaatttaatcataaaaataaaactaaaatttttgaaaaataaaaatatattctataaccatttttattttcaattttaaatacagaatcgaaagtgttttctgtaaattttattttcatttttaatttttaattttatttaaagtcgggtctgaaatcgagtttggggtttgagcggggtctgcgagtgaaggtacaagttcaaatcagagtccaaatattaattaagaaaaaaaatatttttaaaaatattgaaagtaatttttttatgttttcaaaatttttaaaaatttaattctcaattaagaaattaaaaagtgaaaacagttttatagaataagtttttagaaaatatttagatttcaatttcataattttttctaactcatgtatatattttttttatttttttaagaaaatttcatttaattttttattttaattcttttgtcataatatttaaaatatannntaattttgtttgataggtatatttattaagaatatgaattagaagaaaaaagttaaaaaaaaaacgtagtacaattaaatatatcaattttatataaaataaaaattattaaaatagaggtgtctttaaaaaaatttggggtgtaaataaaatttctaaaaaaaacaaaaaaaaacaaaaaaaaagtactatattatacttgtatttgtggaatatgatacgaccaatcgtgcactattatccctgtctttctccattattcaagaaaaaaaaaccttcttcacacaaacataggaagtgtaaagtttagaaattttaattattcaccagaatcaggggcgtttatcaagaatagatctattgctcatattatcttaatctttcaagatttgattaagaattatggtaggaagattgtctctcctaggtgtgctttcaaaattgacttaagtaaagcctatgatactgtggattggagttttattgaggacttacttgtaggattaaactttccctccaagtttgttaagtggatcatgatgtgcttgaagggcacttcatatacgatcatgatgaatggaagacttcaaggtagcgtcaaggggaaaaaggggcttcggcaaggggatctgatgtcgcctctcttgtaccttgtgctcataatggaatatctcacaagaaggctaatattggagaccactaaaaaatctttaagatttcatcctatgtgcaagagtctcaagttggttagcctttattttgcggatgatttgatcctttttaacaaaggctctcctattgttgttcatcaccttaaagttgccttgcagagcttctcggaggttacagttttatttcctaacaagtctaagtcccagatttattttggaggtgtctcctctaatgataaagctgaaattttggacatgatgcaatttgttgaggggtctttccctcttagataccttggggtcccgttaaggccaaccaagtggagtcgagaagagtgtgatgctattcttaagaaaattaaaatgaggctggtttcttgggccactaggcatctctcttatgctagtcgaattcaactcatccactccgtgctctttgggttttcttccttagagtataatcaaggaagttgagtggctttgcaagggtttttttataggggattaagggagaaaaaagcaagattcatttggcttcatgggacaaggtgtgtctccctaaatcttatggaggacttgggttcaaaaggggtcctaataggaatagatttattcttggaaaaatttatttgggctatcatggaaaagcatgacattctttgggttaaatggataaataacatctatatgaagggagctgagttttgggagtatgagttgaagggggatgttagttggtattggaggaaaatttgccaactcaggaagaaattcaacaagtttaatttacttgctgctgttcgaagaggtaagtttctagcttctaggctctataatgggctaattccacatgatgcagacatgtattacaaagctgtttggtgtaatgtttctctgcccaagcatagatttattctttggcaggtggttcatggccatcgtcttacaagggatatgtttactagattccatatagagcttgatactactggctaccctatttgtagttaagaagaggagaatcatcatcatctcttcttcggctgtattgtttctaaggcagttgtgaaggaggtgtttgattgggtgggttgtcctgcttggccgatggagttcaacaactggttatgttggataacagggaagatttctggtgtgataactttgatcttggctgctactgtttatatgcttcggaaaaatagaaacaatagtgtgcataatagtagttgttttactatattaaaagttgtaaatgatataaaagatatagttaagcacatgtt

SEQ ID NO: 48801 - DNA, 889 bp, Cannabis sativa
caaaagaagaacatcccaaatacttcgaccagaaggaaaaaaatggatcaaaataaaaagaaatttgatttaatgacgaaacacctaagcaaatgctgattttagggttttcaaaacccagaagctcagaggagcaaaaacaaagaaaaagaggcaatttttctcacgaaaagtctcttgtcaaatattttcaagtcaaggggcacggttccagagtaacttttttcttttctcatcaaaaacaaattcaaagaaaatccagaatcaagcaaacaataacaaaatgcatatatattccaataatactaggcatgcaaaaatagggaaaagaaaatcaagaaaaagtacaacaggaaataacttactcactattgtgttgggagttgaatttcttttaggaaaatatttggacgaaaaatgaagcccacgcggcctgaaggacaatttctccttttctatgctttaaagattgaagaactggtgaaagttctaaatgaattaaaaagttcttcttatagacccactaaggggcagcctcagtatataattgaaatcgagttttcctcccaaaattgccaaaaagaacaatcattaaaggagtgggggtgtgcaaccgtcaaaatacatttccccatttctcgattttcaaataatcattaaatgatgatatttgaagagactaaagaagatacacacatgcctcaggcagggtaaatgtcacctctagtacgacatgtgaactttaacatgtgttacccatccaagcaatatgcagacctttgaagtccccatgcgaccaacagctctcacacggacttgggggacaaatgttaaacaagttttctcacaatgtgacatggcattgagcagtgtaacatgtgtcaagtat

SEQ ID NO: 48802 - DNA, 2387 bp, Cannabis sativa
  modified_base (1121)..(1121): a, c, t, g, unknown or other
gaataaaaaatattttgaatttttttcaatttggtggtgaacatctcactttaagagataataaaagatagctttcgagaagttacatcttttattggattataagagataatcatctcatattatgagataagaaaagtgaactatgagagttatacttataaaaattgtcttgtcatagcaagaacaaattgatgaaaattggatccaaacttgtgaaatgagtcataaatagaaaaagtaaatttagacaaaaataaagtaaattaacatagattggagaaattgtgaaaagctaacaaaatttgaaaagcaatttcagaatcttaagtaatcaaagtagtgaacaaaattgatgagaattttgttaaactttggtataattttgggctaatctcaatgaggagatagtcttaaaattatgggtgaaagtaatcacattattttgtaagtggtgatgtgagtttgatatttagttttgttgagaaaactaaaaatatcaaatggtattttcaaagtgactttaaagagtcaattcaagagaaatacacacaaaagtgatattttatatacactttatgctaaaaatgtaggggtgagccacaaatttaatcaaatgtgttgagacattattgattaatttatttgattttaaattcaaattctaaattaagtttggctatgtggatatgtgaaaattttgacatatttggtatcaaattttggtgaaaataatttcaagaagcaaattaagtttaagaaaaattatagagacaaaatagtctcctatattttaaatcaagatattatcttgataatgaaatgtgaaagtgtgagggtgatactccaatatgagaaagtttagacatacttggtgtctaaaattaaaatatgagaatttagacatatttggtgactaaattggtgtatttttcatatgcttggtatcaaaattattgagagtttgagttgtgtgaaaattaatcttttatgattgaattttcaaagtgttaacgaagatttcattaactaaattaaagtctattttgtgatggatttgcagagaaataatagtagtaaaaggaaaagaaataacacaaagcttttttacgtggttttgnagttaaaattctgcatagtccatgagtctatcttataagacttttctggtacaaaactaggtttctttctagaaggtttttccgtccatttttcagtgtatcctgcccctatatatagttacataggagggcagttaattacaatcagattgatttcccacaacaataatttcttgaaattgtgggatttcattacgtctcacgtaaattaaatgcggttattatctcaaaatcacacagtgctttattcacttttaccgggccaatgttgtcgtggactaagatatgctgcaaagtatatctcgctgggtcacttcgctaggttagcaacaataatcttgacagcaagttggaagtttttcccatgtctttctgaggtcaataatgtaaatatcatctaacaatcgcagttcttggtgacaaggtgaacttcaacagtcaacatcgtttgaatgtcagcttctatcttagagagctgactcgacggagtagtggatctcattgaaagatatctaaagcttattagtaaaggtaccatgagtgtgtgttcctatagggagatgggtgcctcgctattcgttgttcagattcatccaactattaggcttagtttgtataaggtatattatatgctaagtgttttaatagtcatcacgtctcatctatgtctcttcatacgtagcgagattgatgcctcgctttatgttattgatgtcgtccttatgatcgtgccttcatatacaaaatggtttctcatcaatatgtgaattagtagttcgtacatttgtgtctcgatcaagactttacagtcaacgagtgatagatatactctatcagctctgcatttaataagttattccattttgatattttctaatataattactgttatgtttgtttattcgtattctcccaagttgacacgtgtcctctgaagtgtcaggcgaactttgggtataataattattaccccttaaaaagttctttttaatgaaaagtgttttttaaatgattacagagggtattttttgtcataatcccttttcaaattatgcatgtctttgattttggcagttttatagtttcgaggtacatcagcatttaatgaccatcttttccacttctttttcaaattctacatgttggattaattgtctccctgatctaatggagattaactccagagtataaaaggaaggagagacacaccaccttcgcactacttttgccatttcagaaactctagaaatttttcaaacttttctg

SEQ ID NO: 48803 - DNA, 609 bp, Cannabis sativa
aacctactgagtccaaaattcaagagaaaccaagtttgaaacggctgatagtcaagaactttaatggggatgagtccatcatggtattcaatagtggatgttggtacaaaatttttataatagtttgtgttctacaattagaatcaatggtgcagttggtggcacatcatgaggaagagtagacatgaggcttatgaactattagaaaatatgactatgaattatcatcaaagagcatctgggaagaagaagacaactgatattcataaattagatacaaaaactagctactttgactgctcaagttgctacactaactaaacagttacaatagaatactgttactgccaacccatacttttgattaatgcacatcaactgataatattttaatgaatcctagttaagttcaagctattataattttcagaggtagttcaacaacccattctctaactcattcaatcttaggtggagaaatcatctaaatttcacttggagaaataatcaggggtagcaacctagtcaaaattaagtccaacaaaatatgtctcagcaatagcaagttaatccaccaacaaatcaagcttttgttggaatttattttac

SEQ ID NO: 48804 - DNA, 1192 bp, Cannabis sativa
tctatagaaaaaacccggcattccgtccggtcccggggccttcaaagggtgtagatccgccactgcattccaaatttcttcatcttgcgggatctttttcatcatagtgttttcctctctcgtgatcaccggctgcataagatcatggaaatagttatccatgttcgtgttgcttgtactgtatagctcctggaagaaaacattaaagacccccccaatctgcttctccgtggacacccatgcacccgatttgcttttgattgctttgatctcattccttcttcttcttattatcgtggaagcatggaaaaacttggtgtttctatctcctaattttaaccaaacttcccttgatttttgtctccacattccctccttccgtatccacaactccgttatccgatttaagagatccacttcttcacgctgcatagacatcgagaggggttgactttggatccatttcaaccggttctctgcatctttgatcagcttatcacaatctccaaatgactcttttttccatctttggagggctgtctttgtatcacttagcctcccacatatattgcctcctctctcatttctagtagcccaggccttcttaattgtcatctcgcaagagttctccctagcccaagcttcaaaaaatctgaagggcttaactcccattcgccttcttccattactatccagtagcataaaggcatgatcagacactgtgatgggggcgttgtagacatcagccgaagggaaggctgtgatccactcgctcgatactaccactctatccaatctctctctggttaaaccccccgcgaatctgttgttttgccaagtgaacttgcttcgcggtagcccaaatcaatccctcccgtattttgtatgaagtttgatagtatcttcgtatcccttgaagacactcttctacctccacatttttcccaacggcttgcaatcaaattaaggtccccaacaactaaccatggatgcacacagcttcttattctcacttccatcatatcccaaaactctttcttttcgttttcatacggtcttccatagactgcgaacaacctccactttaacaaagtaattggttccacaatctctacctcaaagaccccatcataagcattgataaccttcaaatcaattccatcattccaaagaaggcaaccccccccccccc

SEQ ID NO: 48805 - DNA, 1101 bp, Cannabis sativa
tcatactaatacccatctttatagtactcgtccttgatatattcatcatcatcctcctcctcatcttctgtgtcatgatcttcttctccttccttagacgatggtctaagttaccctctcagttgtctgcttctgacgtctcccctcctctcacattgctcgattgggcatgctttggaggtagaatgtttacatcttctaagacgacgttgaggctgccttgattatttttctttgagactatttttttgtgtttttagcaatactgtggcttaggtctttcctcagctctcaatgaaatcactaaaatgttttccaaaatttttaaaaaataatttaagaaatatataaaatagtacgtaattagacatataattacatgcatttaatatccatacacacaaacatatacatactttgtgcttatcataccatgtttccagattcaagcatgtcagtcgacctaaatggaaagttacgtgctgaacggagaccttatgtcacaatcataaaaactggtaaacaactttctaaaatctctatggggatctaaactcaaaactaaaagtacccctaacaataaaaagtataatggagctctaaccatcaagaaaactcaagaaaaccctaaaacagggaacctgtccaaaaagtagtaggccatttttttaaaaacgacctgccatttttcagagtgctccaccaaaaaaaatggcaggttgtttctgtagaaacataaaaggtccctatttcgacccaaaaccatcctaaactctaccaaatgctcaaacacctagaatcaacaataagaaccaattccaagcagtgaaattgaaaattacacaaaattgctcaaactaccattgttgagcaaagttgagttccaagaactccaactttctcaaacctaaaatcaaccctccataacagtccaaacaagcttaaaatatcaattatgacttaaagaaactaaccccaatcgaaatccatcaaaatagaaccatagtcaccaaaatcaaaccctaaacctaacaaaaccttagtaacaaataggatagggttccttagggcataacttggcgaacacttcaaaccctagct

SEQ ID NO: 48806 - DNA, 2021 bp, Cannabis sativa
catgtctgaaaccattcttggctctttggctcagtataacacctcattcacagcatggaaagctccggagcaacgcttcgcctctcaatctaaagcaagactgttgcagatcaaatcacaattgtccacaatttagaaaggtaacctatccatttgagattaatatgacaaggttaaggttcttgtagattctttatccattgctggacatcccatggatgaaagaaatttgatcatgaatcttctcaatgggttaggccctgaatatgacccagtggttgttcatgtcaccaacttggttgacaatctctcctttgagttgatccaatctcttctctttcctcatgaaagtcggcttgaacaacactatatagtccatgactcttcgcccaaaattatggccaatctcaccaccagttccccaagatttgcttctagtttgcccaactcaagatctactggagttaatagatgtggctatgggtataaccaatccagtcgccccttaggaaggtatcttggacgaggaatggctccctcacggcttctttgttaagtttgcttcaaaactaggcatacagctgctgtatgtcattacagatttgataaagccttcattcctcccaaatctggtgactcccatgcctatctcacagaaattgaggaagaagatctgtcttcctatagctttcccatcgttcaagactttgcccatgatccttagtggtattctgatacaggggctaacaaacatgtagccactggaatggaaaatctcgattatgaaattccctaccatggtcaggacactcttgctgttggtgatggcaagaaactccacatctctcacataggtaatcattctttaccctcttcttccactcctattcagttgcattccattcttaaagttcctcaaataactaaaaatcttgttagtgtgatctcaacttacaaaagataacaatgttttcctagaatttcactccacttgttgttttgttaaggacaagataacagggaaaatcttgctcaaaaggagggttaaaaatggcttataagtgctgatcaagtcctttggttcccctgctccagttcagatcgagtgtcaattagttactaaagcctctaatactactaataacactttctgtacaactacatgtaataatgagactatttctacagtttcctcctcttgtaacaattctgtcagcaataaagatttcgatatttcagcacctttgtctgaggcttttcatgttgattttcataaggatatcaatatttggcactctaagttaggacaccttgcctcaaaaactcttgccacaactttaaataaactgaacattcatagctcattgaaaaatcttaaattttgtgatgcatgtaaacttggtaataacacataaattaccccatcctttgtccaccacaagggcctttgtgcccttagagttggttcacacagatgtgtgggggctatctcatcaaccatccaaagaaggatttagatactatattcactttgtggatgacttcagtcttttcacttggatctttccaatgtcccttaagtcccaagcctcctctatatttctccaattcaaaaaattggttgaaaaacaatttaatttccccattaaaaaagttcaatcggattagagggtgagtatagaacctttgcatcattcttagctacaaatggcatacatattcaacattcgtgtcctcatgatcatgagcaaaatgggagagccgaacgcaaacatctacatatcaatgaaacaggcatgacactactagctcaatctggtttacacctatcctattggtggcatgcttttcagcatgctacatatgttataaacaggctcccatcaccaattattgctaatgatactccatacaagtgcctgtttcacaaagaacatgactatggttttctcaaaccatttgggtgtgcttgcttcccactactcaggccttatcagccccataaaatgtctataaagtct

SEQ ID NO: 48807 - DNA, 2492 bp, Cannabis sativa
ataaagaggacgagttaaatctgcgtgtgggggcagataacgtattggagcccatggaagaaatggaataaattcaaaattgtaatcaagatccaaccaaagccatctgcataggaagaaaccttgaccctacagtgaaggaggagaacgcaagcactctcagggaatctccaaacatcttttcctgatgtcataaggatatgatatgaattgacctaaatgaaaattttcatgtattgacgtgaatccagatatgcatgttgtgcaacagaaaagatgttttttagatcccgtgaaggcagaggctttgaagaaagaagtagaaaagatcgatgttagaattttttttatcttggatgtgtattacctgaagtggttggcaaacccaatccttgtcccaaaacccaatgggacctggcaaatttgcatagactttactgatttaaagtaagctttccccaaagactgatttcctttacaaaggattgaccaaatggttgatgcgacatccgaccacgagttgatgtctttcatggatgcctattcttggtacaaccagataaaagtgcatgtcgcaaactaagaatacacaagtttttgtaccgaaaagggggtatattgttatttggtcatgtcgttcagactaaagaacgtaggagaaacatactaacagttagtgaaccacatgttttgaaacttgttgggtcacaaaatggaagtctttgtagacgacatgttagtcaaatctaaaactgctaaggatcatgcaaatgacctcaaggagtgttttgcggtagtacagaagcactggatgaagcttaacacaaagaagtttacttttggggtaaaatctagaaagtttttgggattcattgtcagtcagtgaggtataaaggccaatcctaagaagataaaacctctgttgtacatgccttcccctaggaagcataaagatgtacaaagtgtaatcgggaaagtggcagccctgagtcgcttcatatctaggtcaactgacaagtgtgtcctgttcttcaaaactttgaatgaacggacgagtgcaaaattgcattccgaaacctgaaagagaatatgtccaaggctttaattttatataaacctgtggaagaagaagatctatatctatacatggtagtttcagaacatgctatcagtgcaaccttggtccgagaggaagacaaggtccagcaccccgtgtattacattagaaaaaggatggtgggggctgagattcgctgcccatagattaaaaatttggcctattgcatactcatctcctcccaaaagctacggccatacttccaaactcttgcaatcaaagtgtacaccaatcacccgctctagcaggtactttagaagcttgttacctctggttgtctcctcaaatggactatgaggttgagtcagtttaacattcattatgttcctcgcgtctcgatcaaagggcaagccttggcggactttattgtggaacgtaacgaggaaaacaaggattttgatgttggaaaagaaaccttgcctatttagaaagtgtatatggacggcgctgccaatgagaacagatcaggagtcagagttatactgatatccccagaaggcttaaggctttaaagtgcattacagttcaagttcaatgcgtgcaataatgaggcagaatatgaagccttgctagctgggttaagactttccaaggtggcggggaccacgcacattgaaatatgcagtgactcccaactgatagtcaatcaagtaaaaggagaatatcaagctcgcggagagcatatggcttcctatgtctcgaccgtttgggagctactccaagaattcaaggggtataaatatgaatattttaaatgagagaaaaacatgatcaaaatatgaatatggtggatttatcatggatttgaggggttttatgaaatattgaatgaaaaattcaagttttggatgctcaacacgctctgtttgtgtttgggaatgaaatatgaagcttcaagctaatttttgactaggatccattcacttccaggaaaaacactgtgaataaaggttctacatttctctttcaaatttttgaaacatcttgaatcatccaattatgagcaatatcgagagagttatggccaaagaactatcagtcattgcagtgggaaatttctaaaaaaaaaaagataaaaggcttgcaaaaaagaaaagccttttcaagtggagctgcggctaaacacgatttttattttttttttttttaatgtttaaatttaaatctttttagtatattttaggtagctttgttggcctatataaacacattattattattatttttagtacggtttcagagatcaaaaaaatcataaactcttaattagcaactattagtatttttcatcatcatcttcttcttctctttctttaattttatttatgttcttattttttattatgaatgcaatggtgatgaaaaatactaataa

SEQ ID NO: 48808 - DNA, 2110 bp, Cannabis sativa
  modified_base (31)..(62): a, c, t, g, unknown or other
attattttagatattcatatttaggatgttnnnnnnnnnnnnnnnnnnnnnnnnnnnnnnnnggtaaaacatattccaacactttgctcaaagtcttacggtgtttgcttcccctgaccattcatttcctattactgctgaacagttacactatatcctcttctgggttcaaatttatgggattccttttcgatgcaaatcctttaagcttgccaagcttattgctatgggtttgggggacttaatccaagtcgatgaggatacaattaaggaaggtactgggccttacctccgagggtgttttcttttggatgttaacaagcctcttagaagaggtattaacattcgattcttaaaaataggcagggagttcactaaatggcttgatttcaaatacaaaagacttcctgattttggtttttattgtggaaaattagatcatactcgtaaatactgtcaagcttacctccaaaagcgtgatgaaaaccttttctccccacctagtccatataacattctccttaggggaaaggagaaatctggagacaaacctggcctttttgactaccctcatccccctgctatctctgtttctgagatgcaccccccattgccccatcaaggaactatgaacccctttcttatgcagcccctcagtttcacagccctcctaaactccactatggggcaaggatcttatattgatgtctctccaaactcaaatgttatcatgatgcccactcttgtcaaccccaatttcactgaattggctccactccaaactgatgctagcaacaccaatctttatcttggtgtcacttcctctcctctggtctcaattcacactgattatgtggtgacttttgatactcctgggtttcaaaaccctgaactcatgatggttgcccgttcccttgttgatgccattgttgggacggtttccccccaacctgacccgttagtcaaaagaaagggtttagcttgtgcttcgggtgttaaacgaccaaccttttactctcaccaagctcatggtggaggctatctccggtcccagcttaaacgggctaggtcgggcgagagagattatgaatcttcatctgctactgctaatcttgaacaggcaggtgatgcagagcacacccgcccagaaaaatgaatctcttaagttggaatgctcgagggctggggaatcctcgagcattcaatcagctttcccttttggctcggaatcacaagcctgctgttctttttttgatggaaactaggctccaacctcaatctgttgattagttaagccttctcttgggtttgattttggcatagaagtccctatattacattttggtggtggtcttatgttgctttggaaggctaatattaatgtagatattattaattactccctcaatcatatagactgtaatctttgtgttaatagtaatgaattatggcactttacttgcttttatggttctcctgttcattccaacaaaagatttacgtggaaactttcgcataaacttttttataatgctcctaacctcccctgggctatcctgggcgatttcaatagttacctatatactagtgataaatcgggaggtagaaccccttcccactctgacacatcctcttttgtaaatttccttaataaatttgctctattcctctaccttttaatggtaataaattcacctggtcaaataataatattcatgaaagactagattgggctattgtttcgcataattggtgtgatttatatcctaataatactctccatcacttaggtttctatggttcggatcaccatgtcctcaaactgatccttgacaataattcctctaggccttttaactttgttaacagaaattttcgttttgagaacacctggcttgaagagcctgaattctataagatttttgataggccttggcacgatccaattcatgtcactcctaacaacaattttcagagttatctccaaaagcaacaacactgcattgatcatcttaagggttggggtagatctcacaaccatttcttcaaatttaggatttctcatcttaggactgagattgatgccattcagaaccaaatctcaattagt

SEQ ID NO: 48809 - DNA, 1138 bp, Cannabis sativa
tggtttgtctaatgagataatttcttgtttattatggattattgttatacttatgataatccgtatggattttattggtgctttaactttgattgattatctatttgatttatgttgttaattacttttcttgtagagtctcgcgactcacggatgctttgtggtgcaagtaaggacaagtgaaaattagaacaaccatgagacaatggtcttttctgacatatgtacatatcaacttatcttgtttgtacggttgagttgtttgtgaacatcaattcttctattgatattatagatatatataaaagataagctttaaaaaaacaaaaaaatcacagctacgacgatcacattttgggtagatgaagcgtctggtggttcgatgtatcggctctgaaaccaagttgaagctatgaaaacatttgaatttgcaaagaaaaacaaagaaaaagaaaacagagattgcaattgaaagtgtgaaaaattgctcaaactctcaaaatgagctaagactttcttttatatatgaaagaattcagctggcatacaatgaaaatagaataacagaattctgttatggattacgacaaatacaacatgttttaactaatccaaactaactgcattagtgtattactaacaaacaaactccaaaaaagtcaaagtcaagtttgcaatgatcaaatccactatattattgagtcaatcttgtggattattcttcacttgagtgtcagatatttatattaataagttaataagatacaaattatttcttgcggcgacgaacgatgaagatgacataaaatatagtaagatagaatgctgcgaaggcataattttcaggaacactgaaagacaaagcaccatttttagtctcaaaaagaagactactcagctcttttttctcgtgcaacaatgcctctgtacccgtggtaaaggcaaacacaaaataagaaatggaaatagagatgaatgatatggtgaccatagtagggtacctaaatgtcctttcataaatcatagagagcattgcaaacatgaagtggattaacaaagagcccgcggaaaacccgaaaaccaaagaatccactgccatgaaggctttgaaagcttcaaggccttttgtagttttgta

SEQ ID NO: 48810 - DNA, 1812 bp, Cannabis sativa
tttagttattattaaatatttatttaagtgtgccaataaaattgtgttatgtgtatactatgtttacgtgaataatactctgtgtacatatggacatgcccacatgatactgaacaacaaaaattagattgaaatgactaaatgttaacaaaatacgaatttttaagaattttgctactaattaatgagttttagaaattagttgcaactaaaataaaagttttgagattttatcgcaattcactattagtactattacactcaaattatttgttttaaaaaacaaaaaggaaaaaatatatatatatatattttttttttaaagggtctttatttaagtccaatataagtctctcataagttaaaatagggttaaaaacttaaaatgtagatagtgaaatattatttttaaaatatttacttttattttttatttattgaagaagtatgcaagttaatttcaaatcaataagtatataaatgcatttaatatatcctggtcttacaagaatcatagtaatataaaataaaatttaagtttaagtagagttataaaataatgttaaaaaaacatactatctaaaagactataacatttttttttaaataaaagagcagtaagataagtgtcacatttattttaaatgagatttaatttattaaatatatctgtcacttcacttcatttataatttgttttattattatattatgttgtgatgctcatttacgcgtataaaatattatttttaaatataataaatgggattagtctccaaattggacaacgtttgtcttccttgctcacttcatttcacattataataatcttaaaaaattgtaagtactatgaatgtgcactgaagagcagaaaattagtgaggagtgctcttcattcctatttccgttaaggattttaatctttatctctgcttattttttatcaaggataagacgaaaaatcccctaatagaaacggggacgggacgaaaaactctctaataaaaatttaaatatataaaaatattaaattacataaaaattaaaatataatacaataattattatttaataaactaattattaccaaaccacaacttcaaaagtcataaaaatatactaatatactataaaaatgaaacataaattagaaattataaaatattactagaaatataaaataaaatactaaacgggtccccgtcggagcgagaaatgtgatccctatccctgtcccgtttaacattcgatgataaaaaataatctccgttcccgccctgtttctcatttagacgggaaattgctgccccattaggagcagatccctactaggcccatcctatgagagaaatgtacatccctaataaatactatacttctcattatataatatttttatgtgattttttttttttgttaatttatctaaaaacaataattcataaatgtgtaagaaaggaaatttaggaataaaaggagttaatatgccaaataaatattagtataataatcaaatgtgaagttttatttttatttttttccttaaaataataatttatttaacatttgagctaatttgcaaaaatatcatattgttatttcattttcaacacattggcacgcgtttaagaccatgttgtgaaatcaatttcattgtaagaaaaataagtgctttgaattttaatgttaattattgaaatagttattattattttttatttggtgtcattttctatttcaagcacacgcttatgtttttgacactttcttcctcctttgaacactaaattacatttttgtccctttactttc

SEQ ID NO: 48811 - DNA, 1982 bp, Cannabis sativa
caataacttacatggatgtatatgaatctgatagcttcacggtaagtgttattatctctatactattctataattgaaatttttaaaatttttgatccaggtatggattcaacatagtaacgctcagatagaagcttttggttctagcatagagtttcttgcttcccaaaaaatgtagggtgagaacaagttttaaaaaataaaggcctctaagcccaattataattacatgatagctctcaagttttaaaaatctgctttgtgcctgtttggtcaccatttaaaattataatacataatactttggtaaaaaacaaggatgttatgtattatgttctcaagctttctatgtgccacattttcataagaagtttgagataaaattcagccaaaacagttttagttagttagccttgaaaaaggttgtgaaaaatttacttgaaaaatcaagtaattgattttcatgcagatgtgcatattctgtttccctacttcatcagtcataccactccatgaccatcctgggatgaatgtttttagcaaaattctatatggctctttgcatgtaaaagcttatgattgggttgagcctgccatcatcaaggaaagcaacggaccggtatactttccaggtctgctctaatagtttatggacattttactttcctggtctcttgaatacgtctttgatagattgcaccctttatgtttttgacttacatggataaagggaaggtctacaaaaacatgttggcaatccaattctgttgttattctcaaaggtgggaaaaataatttatttgagaaacaatggggtctcctagggctggcaatagtgtgttgcctttcaaatttccaaatgagcttcaagggtaaagttgtggcccatatctgaagcacttaattcaatgaaaagaggaagtttggcatttctaggtcattttagaaagtttgcggcgacttatgtctgcatacatttttattttcgtttatgcaattagaatattgaaacttaaatagagtggattttggttccctattagaacttgaatatcgtcacctgctttatatatctaatgaatatggttaggttaattgcactcaatagtgttttagacagttagtactaagagatgatatgctcacaacaactgtgcattacttttttcttttcgaacaatgaacatttcaatgaaaatagccaaagtacaatacatccaatagaaaggatggaaaattttccatccatacaaattcaccatccaccctgatagcatgaagagcgaatccattagcgactttattggccgaacatcaaacatgaattagagatattttaggaaaatttaataataaacttgcaatagcttctaacgaaaatcctaaggcatcagtacaatacaagaatctcttaaagaaagcacaaaatcaaaaccaaaatttttataatatgaagaggctgctcaagcaaaacagaccagtcctaagccgccaccatcaaagctatagcttctggtttaatgactatgaaaccccttacaaaaacattataggacatgatgagaataggcatagacctaacaactgtaacaaaaattgagttattaagaaaaatggagaaaattgaggtattaaatggacaaaatttagggtcctaaatggaagggataaacatcccttcagttgactaagaacatctgaaaggtaaaaacaaatagcagaaattagaaatagtcatataggaagcaaattggagatataaatactgtaatatattcattaaagcaattaaagttgactttatatataaaatttaagattaaagagattatcaaagaaacacaacataaaagtatatcttcaatatgtagtaatatattcaaataaagactaggtctaagcgatccacctacaccactcttgtgaagactttacttgatttataatcatattattaggacactttcaaggataaatggcta

SEQ ID NO: 48812 - DNA, 1777 bp, Cannabis sativa
gtttaacacgctgaaaactacgtccaggggaatttttaacgaccaaaaaaatttaggggcataatttagtacatgtcaaagttcgagggactaattaacctattttttaagatatacccacttttatagatgatgtcccatcatactccttaacttaatgtaaattatgtactacacttagacggaggtatattaatcaacccacccacaaaagtaggtaaattttaataaaatataatataataatatttttaattaattgataaaaaaagaggtattcctcaacttatcccctacacaaaaatcatttttacatagaattgagtcacgaaacttcacataatatttcacaatcactcaaatagaacattctttcaaactcaataactcaaattcaaccgttcaagaccaagttcttcaaaaatttgactaacaaaacttctgattacattaaaactaacttgataatagaattctaaacacatgtcactgctcaaataccttgagaaacttaatttaaagtcaaccaacaccaattttcaaataaatatcaagaaaatacaaattaaaaaaaaaagaagaagaagaagagggttcttcaaaatgtcatttaccccaattttaaatttgataaatttctatagcttcagtcaagattcaaagcacaacatcaacacaaaacatagttatagtttcaatcaaataatcacaaaactcataaacactttttgggttatcatccataaagttctcaacccttataaaaagtaaagtacagaaatttctcaactttttctctttacttaatcagttcttattgcttcaaattttatccttcccaacccaacaattagaaccgatatgtacatttattttttttcctgaggaagttctttttttaataaaacaatatccttttactaaaatatgggtggctttgtcaaaaaaaaaaaaaaaaaaagaatagtatgggtggcaccgcacagccacgcttaacatcctaagtttaaaagacatcgtatccctccaagtcaactaaatcaataatgttgggataatttaaggaatttatcataattatcgaaaaataccactaatattaatatagtcagttagtatttaattaatattcataaacacattttataaaaattaaactccaatcccaatctaagttataatactcaattgtgactatataatatattgtgctaacttgactgttatagtgcgaatttttcgcttagaaactcgagaccaagctcccataactcacatcttttgagaatcgttgagttgtcaacaatggactccttgagaataagcctcgcctgaatcaaacttgcgagatgatgtgaccgtgacagagtctagttgcattattacgcctcgcgtaatataaaataagcagcaggatcgagaaggaagtatacaagtcgcgcatataccgagatatatgagatgatcaagtagtcttctcctgcgacctagtaaagatcatttctttacttaacgagttggtccaagtgacccagcgtactcgatgacttgataaggacatgtatgtcctatgttatcaacactaggtgtcctcatacgcgactcgattaggacgcaaataccttagtacaaggtttgttagcctcctttagaatgataaaacgcaccctaagccgcgagcttgtgcgagaagatgaacatgcaactcgctctatggaagtcgcatacagtgttgttgttaattccatttttgacatatttaattgacaaaaatatt

SEQ ID NO: 48813 - DNA, 819 bp, Cannabis sativa
tttgaaccatatgtaatgctctataatatttcggttgaacagcgaccataaatatttttattaatcagatcaagttactgagtttacaaagaataattcttgtcaaaaacacaagttacaagggttgcttagatcacttgtgtgaactctctctatctatctactctctagtaacgtggagtagtattcatagccttgaaaatatcccaaggctctaaatatttttactgtcaccaaaccgagttaactccacttgtataaagttagtataccaactaactttaataattaacttcataaatggtaacttgtaaccatattttcacaaatctctaccttgctttaagttatcatgagccaaaaaaaaaaaacatagctacttttgctatccaatcaagccccagagggcttagctaatcccaacaccaattagttctaaaaaatactcgaattttttgcttggaactactttagttaacatgtgtggggggttatgttcaataccaactttagcaatgttgacaattccattctccacaatctctgtaatgaaatagagcttaatatcaatatgtttatgtttagtcttctcatggtgcagcttgtttttcctcaattgaatagcactatgattattacaaaatacaaggataaccttctattcaattcggagttcttcaatcaaactaaagagcttcttttatagcttttgttatagggtcctgttgtaatatcccgataagtcatctaaagagcttcttttatagcttctgttagtttgtttctttttaataaaatcaaggctaattagtaattttt

SEQ ID NO: 48814 - DNA, 3229 bp, Cannabis sativa
aagtttatattttttttaataatggggtgtacttatcattttgtggggtgtaaatagaacttcccgtctcttaattatgttgtaaacgtgtgcaccaagttgggctggccagactccggcaataactgactttacattaagtggcacttgccctgactcattttaaaattaaaaaagaaatgtatgaaaccactcgtgttgattacaaaatatcatgtatatagcaaggtctcatgtaaacagatcctcaaagatttatacaagtaattaatatataaataggaaatgagttggaaggacttgttagcagggaacattgcctaaacattgctcccatgatattaatttagatccaaatttccatgtgttattatgcattgatccatatttgaataagaagatgctttatgtctccttagcctaatgaatatataaatacatacatagttgatggcaaagtaatcaaaacaaactttgctaaacaatcaaaattcacataaaaaactctccatcttttgcttgagagagaaaaaaaaaacaatggctgcctcaaaatcaaactttcatgtgcgctcaaacagcttgccctccaaatctcaccctgttattcaagagtgcagtaaccatttgttgagattagggtcttcttatgcaacttcatcatcatcttccattgcccatcaacttaatggtcttgaggacttgcacctttgtgttgagaagttgcttcagcttccccttactcaacaagccttttcccaaggccgccaagagaaatgggttgatgaattagtggatggatctcttaggctcttggacttatgcagtgcagccaaagatgctgttttgcacacaaaggaatgcgcacgagatattcagtcaaccatgcgaagaaaagttagccttgagaatgagattagaaaatactctgcctcaaggaaagttgttaaaaaggcaatccaaaaggccttggggagtttgaaagggtttgaatcaaaaagctcagtcgctccttccaacattgatggtgaaatcacagctttggttagtgttatgagagaggtggaggctgtcactcttgcggcgtttgagtccttgttgtcctttatttctggaccaaagacacactctaagcttggtggttggtctttagtttccaagcttatgcaaagcaaaagagttggatgtgatgaagatgttgttaatgaatttgcaaaggtggatgctgcactacacaacctcatgagtaatgagacaaggaagactgaccaggctgtgatagagatgcaaagtctagaaatgtgcgttcaagattttgaagagagactagaatgcttgttcaggcgtttaatcaaaaccagagtttccattctcaacatcatcaacaattagatgaaaaaatacatctaaaattttgacagtgtacataaaaaaatgttcacaaatatatacttgtaaatgattacactctttagtaaatcatgaatacacttttttttttgctctattgcgaatcgttattccattattgaatatcttatattttcagagcttttattttgttctttcaattaggtcatgcatttacatgagtgaaaaataataatggggatcttgccataattgaaataatcaaggatgcaagttgttggtatcaacttgaaccaccctagcaatattattttggacttaattaggttgatgccacatggtgttaatcctaactaaatcttatttcaaatttgtgaagattcccatatcgatctcaagggagatacataaattataatacctgcaatgcaataattatcagacaatatattagacttgaattcccatatgatttatatagtgaaagctacctggctgccttactgcctgcaaaacaatgtagggtcataattttttctccttaacattttatttaattatacaaagagcttgttggtaagttatatgattagccttttttgtatatattattttgttaatataaatgaatcttatttgtatttattattttattggtaagttatatgattagccttttttgtatttattatattgataattaatgcgggaaacaatattattaataaataatctattgaatataatgaagaattaaatagaaataaatttttttacgtagttttatagttaaatctacatagtctacgactcaagttacttttatttctatgagtgttttgagtacaaattttgacaggggttttgcatgcagaatttggttgttcttttttcattatattcaccactatttataggaatatgatagaagttatttaatcttatggtgggttttcctatgttttacttgttttactaataatataataaccacttgctttttgaaagtataaatgaaccggtgcttaaacttagtcaaaaacatgttgtagtcgagcataacttttctattgtctttttctcaaaaaagcttatcgaaagaaccatagatcaagtcaagcttctttgaagcagacttgatgggcaaatcaatactaaccatctttttcaaaaaagtgtgaagaaacaaatgtggtattgaaatagaaaaaatattattttatggtaaaattaagaatgtattgttttgggctataaagtttctcacaaagacattgaggtgtgttaatacaaaaccaaattaggaattttattatgtatattctgtcactgttgcataacagaatttagtttagtttgttattttcctttccttggttttagtctttctgtaataatgagagtatttgtacctctataaatacctctgtaatgttctattaataataatgtgagctttattttttgcttctctcttcttctcaccctaaaattcatctatgaattctacatggtatcagattgccattgactctcgtcatcaatggagtctacctctaccgatcctacaaccagagctcctactggtctaactcagactaatgatccacctggaatcctttttttcactccctacagtcaaccttgactctgcaacaatatacagtactggtgctgaagggcatgttgtaggcaatggtaagaagttacaaatttgtaatataggttaaacatttctctccaccactaacttttatcccattaagttgaattcgatcttacatgtcccctctatacaaaagagttttatggagaacaacccttaacacactactatcctcacccatttttaacccac

SEQ ID NO: 48815 - DNA, 2989 bp, Cannabis sativa
  modified_base (101)..(101): a, c, t, g, unknown or other
  modified_base (2174)..(2194): a, c, t, g, unknown or other
  modified_base (2907)..(2928): a, c, t, g, unknown or other
attttcattccgtttatgattaaagtttaatctccgtgctaattttattagtaatcccgattaggggattagggtttcataagtatcttgggtagcgtgcntaattatttagggcgttacagtcgtacagcctcttcgagcttagtgaatccatctgctcgatccaaaaactcagccattgatcccacagtcaatctcttgatatatttcaataattctcccagaggctcaatgcccccagtatggctgctaatcttccctcctcagtcaggcctttaacatttatttcttcattcatgaacctactaatgtaggccgttataggttctccaagaatttgcttcacttctaccaggtcttctaagtgcaagggaagctgacgagaggaagaaaactgtgtgtgaaattctgaggagaaataagtccatgaattaaactttcttggaggcaatttgaaataccattgttggccggcctctgcgagtgtggccagaaaattctacactgtacattgccttttaccccctgtaggtccatctgtatttcaaagtacttcaaatgggataaaggatcttcttttcctgtatacattttccatactggcattttgaactttgggggtaggtcaagaccatcaatttcaggtgaaaagggtgatccacgtgcccggtcaagtttgagatttatgagttttgggctggtcaggccttataccatgttcttaagttaatctatttgtgcttgcacaagtggatgaacttggccagcctactcattgacctatgtcacgttgagatctctttaaattggatcttgggcttaattatttgggtggacgactggtggaatattttgcccgtccagtccccttctgcgatttaggtcatttttgagatcatgtacagtgcctaaccaatcgaacaccgaggcgtcaggcggtcttggtgtttgacctacttggccaagaggttagcgtgatacttctgtatgagtatagttgttggaatgagtacctcccaaggggtgctttggtaagatctggtcgtctaccgtttagcccacagtttggacttttggccttggattggacagctgacccttacaagtctgtgcagtatgatcagctacataccctcctaacccgctcagggggatagtaaattcagttgctagttgctaattggtaacttggtaggctcttttgattagcacaacagcttgcctagaaaggtcatcaatggctacttgctaagctctcataacttccatctcccgatccctccattctatgaattggcgtctttgctcgtcaaaggcaaggttaatagctgctcggaggtcttcctgatcatggtgcaagattttgttatggtcttgcataagactgagtgcattctgcagattttgaagttcagtgttgttgcctcagatttttccttaaatacgtggcagcgactgcgtgtgacacgtagatttcaagagcacctcactcacaaaaattggcttaagtcataaatggaaagagaagtgcacctcacggagtgagcctcccagagaggagcataaagcacgtctttactctctgggagctagaaatataacaatgcatctccgggaggagaagagctcgtttgagcagtcattttgcatttaatgcgacatgggggaaacgttttagaacctccataagaggattagacagatggcgtaagcctcttttacggtgattacacgataatcaacaagtctagtgacgactctattatgaagactcacatcaatcaaggaaggataaaagattattttcacctaatccctaagatacctatggcataggtcatgtatgtcatattttatatctactaggaatttgtatccctaaggggctgacacttaaagacaagtgatccttttctagtgattctcccaaaaaacactataaataccccaaaaatagaacgtaaaaggggtcgatcgattaattaaggaatcaaagggagtaaagaagagagagagagagattcaccaagaacattctctgtacaagaactctcataaataataaagactagtggactacggctcattaatgcccgaatcacgtaaaaattacctgcattaaagcttttatagctcttctcattctatcatttaattggttgccgaaaacctcnnnnnnnnnnnnnnnnnnnnnattgagagctgaaggaagcatcgttaaaaagacaaaagtcaaaaagttagagtaacaatggtggaaactcataacaatacacatcagccccgtcctccttaggatgctcaaaatctcgaaggcgaggaagtggcctcacgagtaaatgtgggctctaaggagcgagatgaggtgaacgatgagggatacgaagaaaactttgaagggtacgacacctacgatgaaggtagctatacggaactgctggtcttgaggcaaaaggcagctgatcatgaagccgaacttgctgctcaaaaagaatagaataaaaggatgcaagaggtaatggttgccatgcaaaaggccatggaaacatcagggatacatatacatcccaaggccatcccagcgggactcgaggaaacaccaaaagaatcctcagcaagtactcagaaacccatgatcagggaaccaagccctatacggtacccttttgaggaaaatcttgagaaaaatccaacttcgatcccagggagaaagaagaaggcataggatccgcaaaaagtccgctcagatttcacgaaagggaaaaggccgcagaggggctagctccctcgagtgagtcttggccctcaagatcgagaggacaaaaagagcgtattcgtgcaccaaaagcccggggagagagggaggaaaagccgaaggtaccctccatgtaacaccctaactagcannnnnnnnnnnnnnnnnnnnnnaacgtactgtgcagctcgttgctactcaacgaggtttatataaatcgtgattaattaaaat

SEQ ID NO: 48816 - DNA, 1010 bp, Cannabis sativa
  modified_base (438)..(455): a, c, t, g, unknown or other
  modified_base (948)..(958): a, c, t, g, unknown or other
ttttgataattttttttatattttcacatgtatattatattagatcaggtatttactcaaaaaattggcttggtgacacagattttgtttttgacacaaggaaataataatgggccccgcatcctaagataggatagtgttatttgcacactcagggcactcaagaaaacacctagattcaatgaatttgtttttgagttctattctttaacaaataggtcacaattaatgaccacaaaaacaatgaccatgaagctgaacatgtcacttggacaacccggggctcaagggccaagtacaagtactggacgcctaggttgacagcctgcgccctggcttgcatcagtttcagttcccaaataacttcctatatgcaatatgtgtaaagactcgatttttgaccgagtcaaagctatttatatataataataataatannnnnnnnnnnnnnnnnnataataataataatatatgtatatatataaaaaaaaaaaaagaagaaacaaaaacaatcagagatctcttttatatcgtgtccctctctctctccaaaacacaaaaagaaacccacaaaccaccatcaccaccactctccggcgacccacctctggccgtcgaccagccccacacgctggactattcgaacccgagtataaattaaaaaagtcactcgtgcaacaaactgtttgaattttatttctttaatctttttgaatttctcaaaattttacaaattatcttaaataactacaatatacgcgaccataagagaatcgaaccatttttttttaaaagtttcaacattaaagaaagtagttacattaaaaagaaatatttagcgaagaagcagttacatttaaaaagacaatactgagtatagagttttataatatatgaaatgaaaaattttgtagtgcaccctctaaaattagggctgttcatccgatnnnnnnnnnnnttttttggtcaaacaacatccaatacgcccgcacaatagctcaaatccaatc

SEQ ID NO: 48817 - DNA, 1210 bp, Cannabis sativa
atatatatatatatagtatagagaaatttatataaatataattgtcaaacataacttttaattctaagttcttgtaacgaaaaatttattttatctaattttactcaatattaagcatcccattatatataattaaaatggtgtaataatttttatttaatttagagaaaaaatagaagtatctatgaatagataaataaaaataaaaataaaaagaaaacaatagaccaaatcatttacaataaaaatataaaagaaaccattataagtttatattttgaatcacctttatcaaaaggaccaacaagagtctgttaattttgaaacataaataaagtgtgaagaatactaaatttataatctgaatactaaaataaaatgtacgttattttatagttttaattacttttatatttctttttcattacacataatcatattaaaaataagtataattattataatttaaatcttagtattattttaattaataaataaatatttatatgattattattattattaaattattaagttttttaatgtactatgttcataagttaatttatttgtgcttacatatttttagacttatcgtacttaaattcatatttttttatattgtgcataaacacatattttttatgtcagtcgtgcccccgaaaaagccctatccatatatttatttgacttcgatagcaaatcttataaaatgattttatatatattatgtgtattcaaaaattaaattcaaaaccaatcagtttgcaagttgcagacacaatttattattatttattaacgtttttacgtactcttttgttttgtttgtttccccttatgaaaacgttcaataatattatatatgtccttatcatttatagttttttcatacatatatagtactcctcaattaaaggtttctttgttttatttacttattattaatcttatgtaatttaggaagatatttaaagaagtatcttctaggtacatgcaaatatagaattaaattatacaaaattctatactagaaactctatttaagaatactctatttaaggagaatctctaatttgttagaatctctaatttgttataaaaaaatgaagtctcaatctgggccagttataaataataagaataacctctatattgtaattagttatatattttttaagtctcgtattaataaaatatacctctatat

SEQ ID NO: 48818 - DNA, 1482 bp, Cannabis sativa
atattataaatatatatataaaaaaaattttaaacgtaaaagtgtaaatatttaatcaaaaatagtaatttatgtaaattttctattttttttttcatgaaagtaaaaacacactttggcatgggttttaaaagttgtttttgggcttttaaagttccttgagaagttaaaaggcagaaaccgtcacacaaaacctcaaatgtgattacagtataaactcaaaaagaaaaaaagagagataaatgtatattataaactctttttaattttttataacttcacaaaaagtcatttaaaataaaattttacaataggaggattgttcaaattgttcaacaaaatataaaaaaatattattaagattattcaaaaaactcttacagtcatgaaccaacacactaaattctaaaagcatatgaaaattactcataatagtttggacacaaactaagtttcccattggtgtctatttctggtttaacgtagcccctcttgcccacggtaaaagtttcatggaattggctaccattatcacgcactaagaaacccttcacaaattattgattcaaataaagctccattaacatatactttgatttgagaaatatcaggtaaagttcaatgcacacgagcacttacaccagccgtaggtgaagacaaggaactataatgagtccttgattgtgcatataaaaatttatcaagtagagatctagcttaaagaacaataaaacatcttgttaataacttctgttgctaaatggcatcattccgttcacaccataatatttacactaccatcattacttgctctaaaactttattaccatgcctagtcgtgaactccataaaccatgtgccaaaattagtactgggctaattatggctatccatcacagaaaaatcgaagagagcatgaaaaagtttcatcatgtgtacaacaaatttgacaaaaggtattcacagtgacatgttcttggacaattgaaaacatgttggcaatacacttgaaactatatatactcgccgaaccagattactaactttgggaggaatttttaaattctacaattttctccaaaagtcagtagcattattttcagactactcacctctaatctctgctagataatgataagtattttttacagtatataaaccccatttatcaaacttccaagacaacctataattcaccaaagaagaactaaattgtattgacaaaataagctcctgatcatctcttgggatgagatttgaaacaatatccaagttccaatgacgtgtatctgttctcataaaattactaacagaggttcttatgatagcatgatgatcacaaataataaatgtatattatcttcacaaggcaaaatactaatattagaccctgttgagaatcatgaggttccatctcaaaaccaattggcaatgagtggagtagcccatgttcttatgtatggctcaattctctaccattta

SEQ ID NO: 48819 - DNA, 1102 bp, Cannabis sativa
tcccagccgttggcacgagaagtatagttatcctgggcaacagggcccttcataacttcctccagagtggccaaggtggccgcccccttcttagaagatttcgttccggaggtaggagaagacattttttctgaaaaaagtaagaactccaccagttaggcccaaacaaaacactaatgttaaaaaagggaatgggggtcccctaaccgctggaaagaggcctcctccggatgcttgccaaataaggaaactccgaaggacttcccttaacaagcatcgggtgaaaaaatcccaaaggcagcgacagtaaaaaaaaaagggaaaaagaagaggagaaaacgccaagggtagaaacaagaattgccctatgcgctaaaagcgttatttcgacgagagagacaactctaacagcaaaaaagcaataaaggaaaatagcaagggcacgaataagagagattctatgcattacacagcacatacagtcaagattattcccaagaaattcatcactcaacccagacattctaaccatgctatacaaacaaacagtagacaagtataaagtatcctgaaaacttacatgaagtttgagagcggggttggtgttgatcatcgatacaatgaggactggcgacggcgaaggaagagtagcaaataatttatggtgtatggaattttttctccctgtaaaggctctgagaaaaatttggctaactagcgaaagtaaccaaatgaaatgagaaggctggcttttataggccagaacgggtgtgaagcagctgtgatcaagcataatcgtacggtgagaatagtaatcgattcgcattctacagatctaacggttgggacaagcgttaatcaaggtggttggaaacgcttcagtacttgactgacacccattaaacgcgttggatcattaatggataggaaacgagtcgttgcctgcaaaaattaaaaactgcaatgatgatggtcataaatacaccccaccctcccaaagcacaagccacatagtcaataagacaactagaggcacctaaacaagcctcatttacttcccaccaaacaaggcttgggggtaaatgttgcccttaatttttcc

SEQ ID NO: 48820 - DNA, 1623 bp, Cannabis sativa
ggtaaaataatttctaacagatttaaatatacccatgtgactccttatgatgaaactactgatctagtggcacatttgaacagttttaacactataatgagagtaagaaatatagagaatatcttgcagtgtatattattcccgacctcctttacaggagcagcgagcagttagtttaataaatttaccaaatatttaataacctcatgggaacaactatcacaaaaaaacaattcttcgtggcaagacgtaggagaccccaatctttgccattaactaacataaagtagcaacctaacaagtcactgaaggattttttaagttgcttcaacatagcgacagaaaaagtcgggaatttggatgacaatatccaattaactgctttacaggctaggataattgtagagggagagttatgggatgtatactaggttgccccataagaacaataaacgagttcaattatagggcattaatatatgttcgaaaattaaagaagaggctcatttagagctcaaactactaaagggtggctcagaaaactaacccaggacgagtaacacaaaaactagcattgcaacaataaatgcaaattcgaacaaggggaatgagcccctacataaaaaggaaaaatccaaaaaatcagctaaagataaaaagaaacagaaaaagcatgaaaaatatgtaccgatatactctattaaatagagttgaatgaaactctagaaaatatatttctcgtgcatgaaaatagggtcgccttctgaaagctcgaacccatgaggaatgcgagtagtaaacatgatcaaaataaatattgtcggttccacaaagatattaggcatacaaccaaggaatttcatcaccttaaggacgagattgagagccttatttctcgtggttactttcagaattacgtgagaaatagggggaatgagaaaaattcaccagataactagaaccaaaatcaaaatatccaacaaccacctattgatggcggggatattctagtaatttttggggggtccatctcgtagggaccagtagtaatgcatagaaacgatgcataaaccaagtaagaaatcaaaactcaaaatttgcacctaaattacttaaaaggaacctcccattgttttcaccgaggaagacgcattacatgttcaatttctacatactgacccattgtgataatagtccagctcataaataaaaaatataaaacatgtcttggccgataataacaccttaatcaatatcatgtataaagagacattaagaaaaatgggatcaaactaaaactatgcatggtgaacttgtgtgaattcacagaggatagcgtcacaagcttaggaacaataaaacttctatttaggggtgagcataaaattcagaaaataataaaaaaaattgttcaaactgaccaaccaaacactgttggaatcgaaaccgatggaacccaaaattgaaaaaaccgctaacggttaaaaccgccattgaacgatcaatttttttggggtattaattgaaaaaatcaaattctatcgttatacacatatattaatttattaaattttttatttgctttatgtattgtagttactaataatatattattattttatt

SEQ ID NO: 48821 - DNA, 2155 bp, Cannabis sativa
  modified_base (34)..(36): a, c, t, g, unknown or other
ataattaatcataaacaactgctaatttccaaannnactaagcgggctttacagtaagtgctattgtcaggcgcaatctccatatgaagaagagagcagattcggtctttaactgcatcattagtgtttgcactaaagaagatagacgatttgccaaagttgacttgttgtcccgatgccgtctcaaagagctggagtaatctcataacattagctgcttctctttcattagctcgacaatagatgtagctatcatcagcgaacaacatgtgagatatggttggagccccgtttgccactttgcaacctttaataagaccgttagtctcaaaacgtttcagcagtgatgagaaaccttcggcgcagattaaaaatagatatgaagaaagcgggtcgccttggcgtatgccacagtttggacaaattgggccaagaagcctaccaccatgaaccacattatactccaccgtactgatagtttccaagattaaatcgacaaagtagctagcaaaccccaaacgaagcatcatagcacgaataaagccccactcaactcggtcataagctttacttagatcaagcttcaacgccataaagccctctttacctttacgtttgcgcttcaagtaatgcataacctcaaaggcgatcataatgttgtctgaaatgaggcgaccggggataaaggccgactgattctcagaaataatatgattaagtacaacctctagacgattagcaattactttagatatcactttataaaggacgttacagagtgagattggacgaagatcactcatggtacacggctgctttttctttggaatcaacactatgttcgtgtggttcaaaccagcagggagctcacaagttgcaaaaaaagtttggacttgattaactacatcttgaccgactatagaccagaatttttgataaaatcccggtgtcataccatccgggccaggtgacttgtcgggatgcatttgaaacaatgccttctttactttttcatcagtaatcgggctaagaagggcctcatttcagcaacagaaattgaaggttggatactcataaccacttcattataatcagaattagaagacatgaataaattctgaaaataattaacaataagtccatcaagacctgtatcccaatttaaccaagtacctgcatcattttgaaggctttggatggtgttgttctttttcctgaccgtagccttggcgtgaaagaatttactattttggtctccctctcggagccaaagttgtttggatctttgacgccaaaagacttcacgctggttcatagtctcactgagcaatttctgggcttccttaaacttttgcactgacacggaatcacggcttcttttccatcttttgatctcttttttgcagctagctattctttttttgaaatttccagtagattcttgaccccagacagcaagcttttctccacaaagtcgaattctttccactataccacagcttgagttaacctcccacacatctcgaacaacttgagaacataacggctctctaagccacgcattctcaaatctaaaatgcttgacagggacgaaaaattgttgggtcgtcggctggagtaaaagaggacagtgatctgaggcagttacttcaagattaagaagctgagctgaattgaataaatcattccaggtttgactgacaagcgcacgatcgagacgcacctcaatccagttgggggagcctcttccacgttcccatgtaaaagggtatccaacaagatcaagatcaatgagattacaatcagttagtaccttgttaaagccgttgattaagctctgagggtagtggttgccaccatttttatcagcttgactggtaacattattcaggtccccgatgatgcaccatggcagagtcgaagttcgcttcaagcttcgaataagattccaagtttggtgtcgatttcctctgttgggctcaccatacaacccagtaagacgccagggagaagaggacgggctaacaatctgaatatcaataaaattgaaagagtagtggagtaattgggcttcagcactattcctccaaagcattgcaattccaccactgtgacctcttgcatcaaccgaatgcattccttcaaagcccaactt

SEQ ID NO: 48822 - DNA, 859 bp, Cannabis sativa
  modified_base (821)..(828): a, c, t, g, unknown or other
tgatgagtagcctaatacatattacatacgtatagttaagaaaattcaataattatgtatttataatttacattgcaaaaaaaaaaaaaaatgctattcccatttatttaatttaattaaatttattacaatttttttaatataatgtcaaattgattatcataaataaatattaatacaaatgttgagtaataaatataaatttattacaatattacaaatatatttgattgaaaatatttcaaatttttttaataagaaagttaaagtggtagctcatttattaaataaatatattttttataactacggaactacctttaataatattgggtaacttggttttttgttcgactatttttatttttgagtatttttgtaattaaatattattatctaaagcttttgttctaaatattgtattcttaagaataagaagactattttttttaatgatttttgtttattttttttaaccatttttcctcaaattttagtcacatctattttccctcacaacaaagtagaagagaagagaacccacaacaactaattgacaagattgattgaccaatttctttaataaattttaattaaatagtatagtcttttataaaataataaaaagtaatttaaggtacaaatatttaaatgtaacggttataaataaatatgtaaatttaatttttagtggtaataataattaagttatattttataatttttttaggtatctaatttttaaatgtcaagttattatcatgtgttatttttttatgggtaaatagcggtataagtatccaaagttttaagtttgtaannnnnnnnaactcaatgtttatttttagtggtataagta

SEQ ID NO: 48823 - DNA, 885 bp, Cannabis sativa
  modified_base (491)..(499): a, c, t, g, unknown or other
gaaaatctcgataaataattttaaaggtattactccgagtaataatattttaatactttgggtatttttaccacaaaaaaaaaaaatatttaaacaatctttaaatattagatattttgctgcaattagccttaaatttgtatgctcaaagtggtataaaatagaccatgattaaaaaaattattttaaattattaaagtaatttgtttttgcttacataattttcaaaatttaaattcttatttcaaaaaataaaaaatataaaaagttttaagaaatatattttttttttgaaatatttacactattctaattttttttctttttaatactacttttctatcttactttctaaatactatgttgtattttatgatttttattaaagtgtttgatttattattttaattttggattatttacactatatactagaattttttaatttttttaattttttactgtggggcagaattttttttcaaaaatannnnnnnnnttttatactgtgtactgtgttatgtttttacagttgttctccagttgttttataaaaatacactattttttaaaaaatttccagtgtgacagtatttttgtcaaaattattttaaatttcaatatttgtataggtttccaattttgtgttgttttcaaataggttgtgttcaagataagattattattacttatgtcattctattttttttaatacccctttcacgctaaagataaagaaaaaaaaaattgaagagattttcagatgagtagtacaaatatataccagaacaccgctaaggtattaatgctgataggcaatatagttgagatcaataataagcaaacctttaagaaatgaactgcaattttcttaatgaatcttaa

SEQ ID NO: 48824 - DNA, 1033 bp, Cannabis sativa
atatgggggtaaaaccttttagatatgggaatcattggtcttcctacttggggtttgaggaaactgttatgggaagttggagaaagcctacggtttatgaggggctggcgggtttggtgcagaaagttctcagattgaagcatgacctgaaagttttttgcaaggaaaacattggggatgtggttatggaatacaaggctgctaaagaaaacttctgtctcaatcaagaggctgcagcaaccaacccctcggatgctcttcaacaggcagcagtcaccattgctcagcaaaagtttcttttagctaaagacaggtattcgaagtggctgaggcaacaaagtaagattcagtggattaaatttaatgatgaaaactctaattactttcatatggccatgaggaaaagaagaatggagaatagaatcaccacctttgtcaaagatgataaaattgtggacagctttgaggatgttgttaaacactttgtgaagcactttgagaccttcatgggcagcaagagcaatgctacgttgaagatagatcttgaaagtatcaaccatggaaagtgccttaacttagagcaacaagtccatatgattagaccttttaacaagggtgatgtcaaaaaagccttgttcagtattcatccttctaaaagcccggggcttgatgggtttgggtctggattttacagggatatgtggagaaagattggggacgatgtggctaatgcagtgttggggttcttcgcaaatgggaggctcccaaaacacttcaatgaaacggtcatctctcttatcccgaaagtagctaacccggaatcagctaaggactacagacctatagcttgttgtaacacaatctacaagtgtatttccaaaatgatttgcacaaggctttctgaagttcttcctatcattgttcagaataatcgaggagcgtttatcaaaaacagattacttgctcataacatcatgatttttcaagatctccttaaaggctacacaaggaaaaatatttcagctagatgtat

SEQ ID NO: 48825 - DNA, 1209 bp, Cannabis sativa
ccgcagggttctttctgttgtgggcctacgcagcccacgacagttccacgccaggcacctcatgatggcggtgggggcatggatactcccacctccttgccattttgaaaattttgattgtattccactctaacctcaatacagtttgcaagtatctcgtcgagatttccagttcctgtcgatgaatcattgacattagcatcacctttcttcttacgacttctagttttgactccaaaagaacgtttgatcgaatctctcttgttccttctcttcgatagcttattgctaccccttctactcgactcatcattcttttttcagcaccaataaccaacttgtaaacatcagaggaagcttcacttgttgaaccaatctcagtaaccacatcagcattagaagtgaagttttggctaggtgaattgggattataaggttggaacgaagtgtgggattttctttttctattattaccaaagatcatctcagaaagattttgagggttagataataaagattgttgggccttgtatatgttcaaatattctggaccgtaaagcttaagaaaggtttgttgggctacagggtcatgattgggccagccaataggagtgggctcaggaaataagtgaggcttttgagatagaaaaacccaattatttggtatttctaagctttgggcaatcaaaggaccaatatctgggattaactcattgttgacatcaaatccagcaaagtcagggcgcggcaaatcctgaacttcaggccccatagagaaattaggtactgtattatccatattgatcacgttttcatttaccacctcattctctacactgtcaatgtttccaatattctgattcttttcaaaattacgactgcttcacgtaccaattgtaccgtgattgtcagtcgagtacatcttagtggccgttgcaacaagcatcttttttgccacgtcactatttggcttccccggagcagccgtctgccctgcctgaagaagcttttcttttccttttccagtagtgcattccgagttcatcactgctggttttctcttccataggcctttttgaacttttctgttgatttcccacttcggtatccccttattatcatttatgagcttcgtgcttccttttccagcatgattaaaacagttgctccaaccaatctcacttttaatccatatcccatacattggga

SEQ ID NO: 48826 - DNA, 825 bp, Cannabis sativa
atcttgggcttttttgttcttttcggggaacgatataggaattctcttagggtttccttcagaagcttggctatctattcttaggattttaggtacttggtgagaactcttcctgtgttttttctggtctcggctgcacgaccttggaatgcacgtggattccaactgtttccatatatagccttttgcatggcgaccattatttcttgcatcctcctattttgttccttttgtgcggctagttcgacctcatgatcagccgctttttgccttagggtcagtaactcagtatagctgccatcgttgtaagcatcatacccttcttggttttcttcgtactcctcgtcgtttgtttcgtcgggttcctcagagtccatgtttactcgtgaagctgcttctttgtcccttgggttctgaggatcttaggggggacgagggtaacgggtatggtttcgagtctccaccattgaggtctagatcttctgttgtcatcctctagacaatgcttcccatagctctcaattaaagtaccaaaatattgactgaggttttcagcaatcaaatatctaacgtaataacgtggccttagggataattaatgcaggtaatttttacgtggctcgggcattaataagtcgtggaagagtgtaagctaagaaacatgtgtgttaattgtacctaacagagtaatattgatatctctgtatagtatagcactacatagctaaactaaaatatcttatacttgtaaaccaataacgtgctcaaatttaatatatatatatatgggtattacccatgtatgggtattttattcttgaccat

SEQ ID NO: 48827 - DNA, 1155 bp, Cannabis sativa
ttttttttttatttgggtccctaataagagtgggctctaatcacaggtctagcccgccttagcctaggaccggcccttgtcctgatttgggctggtgtcgaaaccaaagttgaatttagtacaattttatttaacctatcaatataaatcaatatcaaacataatattatattaaataatactatacaatactatataatacaagagaaacatgagatggtgttgcagccaaagttgcaaaggttaaaccattagcataagcaaagaggatgctgaaattaattttgctatattgatcatatcattgctgataaaattggaaggtagcctcattcaacactagtgaaacattgtaatcttggccattggcatcgaacacgggatgagaaaatgggaaaactcttagcctggtaagatttagtctagtatgcaataaggattaatatgtagataattgtacagaaatcagccaagtatttcaaacggtggtacccaaaaaaaagtgtcgaagtggttctactatcaattacaatcaatcaaaaatatttgtttcaaaaaaaatatgtcggtgtcaagttttgacatcaattcaagtatagggatacataaaagaaaaatattaaaagcactagtagtacttagcacatttaagatgtcatctcactattattgtaattatgtattaatttcctcacaatttagtttaataattattataaaatatggttaattatttgtaagcatcacttcaagatagtgctaacattacttgtgcctaataataatattgtagatttaagattactttttttctcattcctatcttatctccttggacccattcatgacaaccatctcatgtagcatttggtgatgttttagtaaatattactgatgacaaaatccaggagctgcgaaggaagatcctaggaagccagccactcttgagcaatattactgtgcacgaaggccaaaaccaatctctgttgggctgtgactaatgcatgtcggccagaggttggggcagtcgtgatttaggctttaggctccacaattttaaaggcccttaaaaattaaaatttatatatattactaggtgaatgtacgtgccgagccacgtagtgctagttttatttaagattttggtatttttaa

SEQ ID NO: 48828 - DNA, 1803 bp, Cannabis sativa
aattttttgtagtggcaaaagaaaaaatatcataaaacagcaaggactggtcatccttaaaaaagaacagtttacataataatattacattaaactacatggggttgataaacaaccatgcataaagaaaaagaataaattaattattagaaagataaaaaacttcctgctcataaaattatgtaataaattgtccataaaaagagccatattgatgagagtgtttaaagagctcggccttttacgatgtcaagacttatctcactaggatcggttgcttgcaattcaacttgaatgccatccaattccctcttgaatctatctttagaacttgcatacaccatcttactcctcacccttgatgtgtcaggtgaccttattcaattccaaacaaatacaaaatacaaattgttataacattattgatctaataatttaatatcaaatcttacatattttaatgtaataaataatataaaacatcgttaacttgtatagagtttaccaagcgacgaagaaaatcttgcttttctggcagttttcgtcggtggtgaaatcaaaatcatagacagcatagcggcattcgttggcagggagagaatccgtgaaggcatcataggagtcacctgggcttcctagtttctctaccacaacttcttgattctcgatcttgaacacaatgaatcggtagttcctctttgttttcagctccaagaacttgagtttacactcatcgcttaccgccattccagatgctgcgttcgcctgattgaaatatagtttgttacaccaaaataaaagacataacagaaatattattcaaatcacattgatgcaatgatcaacaggactagatattttattgctttgaaattgaatgagggcaaatcccttaacgtacacatcttactcttattagacatcaatagaaaatgacagaatgatgaaatattacagagaaagaggacataccatgttttgatttttcctcaaatgaaagagacggaaacagatgctttggtttttttttttttcttgaaaaattatgaggaagaaagagaagaaagaaagtgggaaatgaatgagtatagcagatgacagatccttaacttttgggaagcattagaggtgagagaattgcggtggtgaagagaattttgaggaagaaaacaaaggttgagaatttctcaaaatctcctactctatcatgtccacaactaacacattcttaatattgacattaattaattaaaattatacagattatgcatgccactactgccaattttatttgctccaccacacactttattttaattaatgattaaaatcatcctatattgaaatttcgttagttccggaaataaacaatgtatccttttttttttctgatttattgcagaaaaaatgtgttatatgtatgctaacacattgccatccagtgttccttattccattctcatttattttactgccaaacactcatttggtaacgcctattctcgataatgattaaattattaggtgtaaaataatttttatattattcatgagaatatacctattttgcatcctgatttaacaagggcattctgtctgtgatagtatcagtataaaaactatatagtgtatatttatgaaaaatttaacatataaaacaaaattttgattcggagagtttaaattataatgatagtgtccactaattctaaagtaggacaatgacaaacaaaaatcaagtcaaaaatgttacatgaatttactctcaagacaaccatcggctgtaacaatatttggttatcc

SEQ ID NO: 48829 - DNA, 781 bp, Cannabis sativa
ccaattttaatgaaatttctaaaataagtttacacataaaacatattacatgcaaaactattaccacacagaaattacaaaattgaaaacatacatattcatatatcaacgtgtaaataatgagtatgtaaaaatacaagagaattatagtagttcagtcatagcataatcttcttagtccactttggaagataatttgtgattcgtcttattcgtatttaaacactcttctatatagaaaacaagtaatcattcaatttcataaccgatcagataagacagttacaacattaattacatttaattgaaatgaaaacattgtaaaataaatgaaataacagtttcgactgttcttgttcaatatttgatcgggtgcgactgccttgattgctcatcgaccgtttgtattcttggtatcatgtgaactcacgagttcactcgagttaccgcctatattgggtctttggaccatctgtgtgaacgcataaacctcttgggattatatagatgagtgaacctaccaaggttccatattatagaatgcctacgagtttgtatatcgaacatttttgtattgacaacgtagtactcgtgggtcaatcatgagttgtcgcgtacaatagtcatttggactaatcgttgtagacacattctttacataaagtgcaaggagaatattgggtcatcacatataattgatatatgtcgtgatcgtattaacttaattttatgtctcgtttttattctctttactatgcgacatatagtgtgcgactagact

SEQ ID NO: 48830 - DNA, 1043 bp, Cannabis sativa
ccgaaggccaacttagggattttgtatatatttccttttctgtcctttgtatctggtctgaatatcagtttaagtggaggattattttttaacaaaattgctgacttagatgattatgattctgacttagtaaaattataagggaaattagaaatctcactgttgacattcctagagcttggtattcctctctgaaaatttcacttgcatatgcctgctcattagaaaatgaaaccaaaacaccaagttaaggagaagtgttttatttttctttctttttttttttggttataatcaaacattatcataccttcattggtccaagtacaccatttaaacttccaagaagaaacctagtagctatggccatccaataatttacactgaggccaaaaacggtgttgcatataatcctaagtcaacatcattcataccccccaaaagaaaaggttttaagtcagatctgtttgttaaattaattatctagactagtataaaatatatggttaaatttcacttcaaaaggggaaattaatcactgacaatgcaattgtcccaaatattataactggttttcgaccatatcgatcagctattactccccaaaatacagatgtcaaagctcttccaagcatgtatgcagaaccttaaaacaattataaagttggttaacacagccactttaaataagtaacaaaagggatatatttagtcacaataagataaaaacgagtaaataaattgttagaaaaataaaaataaatatgtagcttgattttatgaagaataaataatttaagagaaatgggttattggaaattaagtgaaattttgatgaagtttgactagttaaaaggggatagttttctcttttcttcttatagtaattaaatagcaaagtgaacatatatatactgacctacataaccagcatagtaggcaatgtcttcttctctattagcaatttttaaatctctaacctgtgaacatttattaccaaaggattgtattattatatgctacagagaataattgttttacta

SEQ ID NO: 48831 - DNA, 1195 bp, Cannabis sativa
tataaatagggttgaaaaaactgcctctaaaggctaatattgtagtagtgcacaatcgtaaatagtaattttcaaacgtacaaagacacacacacatgcatgtaattattattacactattacataattataaacttataataattaatgtttcttggaattcaaacgagtacaaactcttgcttccttaaacaatttcccaggcctgcagaggtagcttttggtaggagcacaatgagcatcctcactacacctacacaacccttccaaagcacaaccctccttcactatactcaacccacccttaactcccaaaacttggtcactccactcacttgagaacaaccccaaaggatcataaatctttttaacattcaaaaacttctcaccatttttcttatactttttcaaagctccttcaaaagctacattcctattcttcccccaatggggcaaggctccgtacttgatcacagcaatttgttcaatctcttcaagtatgtcttcgtaaagtctaggagccaacggatctttgcttcgataataagtgatatcaaagtctactgcctcctcttgtttacccaaataagcagttgaggaggtgacatagcgcatgagaatcccattgtagagttctacaccacacaaggcctttggttccaacttgactagtgcttgaatatcttgaatgaaggccttgactgaggacaaggctacactgaatgtggtttggtgaaagaattcgcccttaattctgtgatcccatgcgcatgctgtgatttttgcgtcgttgttactgtctaaacatgttccagatgcttgaagacggtgatgatatccaatcactgggtaccctttaaaaataacacctgtatgtatatatatttttaaaaaccacaaataaaaatattataatattatgttgtaagttaattttactgctacctctcacaactcctatctaatttttctatacaataattcatcattatatttacaccccaaacacttatatatgtaagcactctaatattaattttaattttatgttaaataaataatttgtttttatattgttatttgcatatatttttatataatttctattctaataaaattatatatattacaatttaaatttagaaaatattactctatatactattttttaaccttttttttttttaaatttacg

SEQ ID NO: 48832 - DNA, 1354 bp, Cannabis sativa
catgttttcctacgggtttcacccataaaaggtgtgaagcactttggaaagaaaggcaagttaagtcgttggtttacaggaccgtttgagatactagaaagggttatccaagtagcatatatcgattagctctacatctagcattgttcgaagttcataatgtatttcatgtatcaatgctgaggaagtgcgtattaaacccagcctatgtcttgagttaagaggcctaatcatctcttcattaggcctctctgtgagacattcatgaacagttttgagtagtgttattattcaattcactcaggtgtcaagctacttgatcaaggtggatttttcgatgatttatcaagttacttggataagaagacagttaatatagttatcctagttgtaattctctcctactttcagtctatataaatgcctatataaagtcttgtaaaatcaattttaaaggttaatcccattgttagagaaaagagagtttgtgaggtgtcaagtgtctttgagctccaaggactaagtgctttgattgtaaagttcttggacaaaaccttgtattgatttgatagagattgaataaagattattaaagcttgtgtggctttgaaagttattcctataatggactaaatcggggctgaaaagccttcggtggaacaacttaaaatcctcggtgttattatatttttattttagttttaatctctagtttttttgttcttgttctgattgtttatggtgattgagttttcttattgtctcccttttgtacattaagtagtgtattaaatattcaaacaaatattgtttcatttaaaggtcgaccttacatatattgcattcattaacttacattgtaaagttatagaatattccttccataaatgttatatggcataattgggatatatataaatctccatgaacatgcataacaatgaaagaaagaaattaaaataaaatcatgatcacttttaattttatacatagttacgcctttttcttttttcccacagtgatactataattttttcttaaaaaaatgattttacgttgtcaaattagatttaaaatatacgttttactcatgttacattatcatgattacctatcgaatcaataagataaaatacagcgttctatgatgttggatataagatgaagttatgggtctatggtcttctacaaactaatttcttctcaaaggattctcattcaattgattagtgtgaagcaaatgctgaaaagaatctgagtatgaagctcgagaaacctttcatttgcatgaagaatgctcttttatcaaatcagtgctcctcactatatataagatctcagaatatgagatcca

SEQ ID NO: 48833 - DNA, 906 bp, Cannabis sativa
aaaaaaaaacttctaaaaatatatatcaatatatggtttacttctggaactctctagggggatacatcttgttcctttcttctggtacctttcctgtttgtgttcatcctagtggtgtttgttgatcttttggcgttttgatttcttttctctctttgcatttattgcatttcttgtttctgagaagtgcttttagtctcttctttcttttgactctcatttattattcttttacctcgtatcttctcctttattactccttaattctctaatcctttaaatttattcagttttcacttggctagtattcctttttcttacctgacatccatttaccattaatggttgctaccattttggcctgatatgattatacctatactctacgggatttgcataggatctttgaaggggcagatgaggacttctactataggcttctccaacaagctcttcatatccaagtacatttctcattttttatatttaaggatctggattttgtggagatgtctattgtctcatcttttcaaattcctttgtgcctttagaactttgtttaaacccttgtgtttcctgatttgggcaatggatgcattagctcaaaacatgtctgaaaccctaaaccttattgagaaagaagctattgttcatgaactcatcgatgatgttggggggataattaacctagcaaagccttttttcttctccttcgtgtcattaccccaagaaattttaagctggaatggtttaaggatgctataaggaattcatggattattggtgcacctattaccttttctaagtatgggtttggtatgctcatggttgaatttatttgtgaggaggatatgagaagggtcatagaaggtcaaccttggaactttgatcactgtttggtcacta

SEQ ID NO: 48834 - DNA, 1187 bp, Cannabis sativa
  modified_base (1123)..(1129): a, c, t, g, unknown or other
gttagtatcacagtatggagatgtggatgacgtgattaacgccgttacaggtgaaactgtgaaacaatacttgagaagctatcttggttacaaacatgatttcattggagttgttgccgttgtcaatgtcttattcgctcttctttttggatccatctttgccttctctgttaagatcttaaattttcagaatagataatatacttcattaattataattttaattactaaataaaatctctccccaaaactatttatatgtagggaattttttgaaagacattatatattttttgtcttttctaatttttttttgaacgaaattataatctaattatttttatatgatatgttaacatcttttaggatatatattttaattaatttataatgttgaaaatattactcaaaataattaattgcacgtatataaataataaaaacaaataaacttgtgtgtaatttattcaatcgattttaattgtgaatcagagcactattatatatatgtaaattgtatatattgctggaaaaaattatataaaatgtaacatatggcgaaaatattatgagaaaaaataaattgcaattaaaaataataaaagaaaagattatgatgaaatataagcgagaaaaatggtgagattataaaaagatacccttttaatatatgtgggcaccattatcattttttttgtttttccattgctaaaatttaattagtgaaaaagtagaattattattaataatggatttttttcgtttctggaaaggaccatcctgataattttgcaagaaaatgggatatggtatatatatttggtcaatgtaagaaagttttgaaaaactaattttgaactatcattttctttcaattaaaactataataattccggattggttggctaatcttccgctgatttttcgcatgtattatatgatttcaatttcctagtgttcaaggaagcttcttttcttttggaaaaacaaacttaatttttttgatttatttaaaaacaaaaaaactatactaaattattattattattattattattggctatgatttcttttctatgaaaatgttttccacattctctaaggtgtgtttggaagtaactgnnnnnnnactaggtagggtaattactagggtgataattacacagtttagtaattacactatattt

SEQ ID NO: 48835 - DNA, 793 bp, Cannabis sativa
agaaaaactttcaaatgatgtaaaacaatcagaaaatattttttccaatctcgaatatctataaagtggcttgaattctattctaaaataaaaataaataaataaagctaccagaaaaaggaaaaatatttttctccctagttttcttccatctctaccatgatgatagagctcaatacacgagaggataaagaagcctctcatctgtttccgacaggattttgaatgatttaaagaaaacaacaaagttgttaattaaattcattttccacaataatattaagaaggagaccaaaatacatacctgaaccactatagctgtagcaaagaagaagaattgcaccctgaagtttccagtaaaagaacaaattaattacattcactagacagaaacaagtcactgagaatccgtttgttcaaatttatattcattaagaacttgtgggaagaacaatttaaagtcacgcaatagatctttgcataaaatgacaggatatgatgagaaacaagaaaaaagaagtaattggagctagtgagtagtgatatataacagaaaggaaaagtaccaagactacgaggccaatagatagtaatggtgatgagcgtgttttagattggacagcacccacaaatggaatgcttcctccatcaccaatgcgcctagcaggatttactggcctccttgacatgattatatatagttgtaatttgcctgaaaaaaaaaagcacaaaaataggcttagacaacaaccctttcagatcttaaggtattagctcatgaaaaactttcaag

SEQ ID NO: 48836 - DNA, 776 bp, Cannabis sativa
tggaaccctaatataccattagtacctgatacaaaagatatttaacaaaagtacaacactaatcaacacgcaagcctataatcaactacaactaagcagcacacattacacaggcctataatcaactaaaattgagtaacacacattcaaagatatcaaacattcagtaatatactcaaagaatcctataatcaactaaaattcagtaacacacaaagaaggaaacaaacagttaaaagcaataatcgagtatcaactaaaattcagttcattaaaacaaacacacgcacacaaagaaccttataatccactaaatttcagtaacagtgtaacacacacaataaatgaatcctataatccactacaaagtacaaaattagaaataacaattccaagataaatttataacaaacatgcaaagtgaaatgttcaaatgtatccaattgatccaacctgtgcaaaataatagtttgtaattgtatgtatatactatgcatatttcaatatatgaaatcaaattcataagaaattaaaaacagtaaggaaatcaaattctgtagaaaacaaatctataagaaatctaattacataaactagagattatatatagtatatgcatttgctatttatttagaataaattatatgagaaaatacaaaactgagaataaaaatggaacataaagattcttagtttaagaacagatcaatgcgattccattacgaaaaaaaaaaatgagaaacctaacctagaaattagtttagagcagatgaata

SEQ ID NO: 48837 - DNA, 1911 bp, Cannabis sativa
catgaattggcaaactttgttgactgagaaagctaactcaagtcgtgtgatggttgcatactgtagtgctcctataatagatcagtagagggtgacatcttccataggttcactgccgtaattagacaattttagaccactgttcatcagggtgttttgagtgttaacattttgcatctcggtcttggagaggagatcttgtagaaattttatttaagtgagaagcaacccttgatcagttttagtgacttggattcctaaaaaatagttgaggagacccaagtctttgagtgcaaagctggtgctcaaaccagtaataactctgttgatagcatcatcattattgcccattattaggatatcatctacataaattaagatgtagatgtaggtggtgttattggcttgaatgaataaagagttgtcagcttgagatgaatgaaaacccatggaaatgagagtagtagataatttctcaaaccaagctcgaggagcttgtttgagtccataaattgctttgttaagtttgcatacatagtcaggatgctcttggctcacaaacccaggtggttgttgcatgtaaatctcttcttgaagatctccattcaagaatgcattgtttacatcaagttgtctaatggaccaaccctttataatatcaattgtaagaacaactcttatgttaattggcttgacaacagggctgaatgtttcctcaaaatcaaagccagcttcttgatggaacccttttgccactaatcttgctttaaatttgtcaagagaaccatcggcattgtgatttattctcagaatccacttgcatccaattggctttctgttgggaggcaaccttacaaggatccatgtgttgtttcggatgagggctttaaactcatgtgtcatggcaccattccattgtggcatttatagagcagctttaattgttcttcattcacagtgggctaaaaaagccttgggtttttgaatacctgccttaagtcttgtgaccataggatgagtagaggcagcagtagctggttctatgttatgagtagtacctgcagcaacaacattagtaggaacaggtgcaacagtgacagtaacattggtagtagaatctaatgggggtaagtttgttgtggaaaggatggggacatcaacaagatgtccaggatggatattgggagcagcaaatctactgacagagatagcagcagggtgagttgagtggggagaaggagaggatgactctctagtgtttgatgagtgaggaatgggaggagtagattgatggaaagatgataggggtggtaagccattgattgggacaaagacatttggtgctttagattgattttgagattaagtatatggaaaacaaaattacaaataacatctctagagatgtaaactcttttatccattgacacgcacttgtagcctttgtgagacatcctataacctagaaacacacaaggtgtggatcggtaattgagtttatttttgttgtatggtctaaggttgggatagcataagcacccaaagactttgaggatagtgtagtcaagtggtgatgtaaagagtttttccaaaggagattcattttttaaagttgcagtgggcattctattaaaattaaaaaattggttgttctaaaggcttaatcccaaaaggatagaggtagagatgcttgagctaataaagttaagaaggtttccacaacatgcctatgttttctttccacaacctcattttgttcataagtatgtggacaagcaagcctatgaataaccccacattgttctaataaattggtgaaggccctaaattcacccaccccaatcagattgaagtgtttttattttgtggccaagttggagttcaatttgagttttgaacttggtgaatgtg

SEQ ID NO: 48838 - DNA, 670 bp, Cannabis sativa
  modified_base (593)..(594): a, c, t, g, unknown or other
aaaagttaaaaaaaaaaaaaaaccctatttaaaattacaaaagtacaaatttaactttaaactcagtaactcaaccgtataatatcaaaataatacaatataaaatcacaccaaacctagcttttatgtaattacactctattatagtatataaggagaaattttaatagatacaatttcatcctcaatcagaaaataataatattattattattattcatggccttttaatgtatttattgtatatttatatagtatctaattttttcgaaatgtttttacaatttataaccttaaaaagtcaattttgttggatttatgttatttgttagtaggggtgggcatccgatctaatccaacttttttttcctcatccgattcaatccaattagtaattggatttggaaaattatcatccgatccaatccaattagacctcaatccaatccaattactaattggattggatcaattttttaattgaatatccaattacacacctaaattttaatattagcttaaaaatataaagaaaattacgtaaaaactaagtataactttttggggacgtttggtatgaggtgttcaaaatnntttgattatagggaatattatgaaggagaatatgattatagggaaatgtgtaaaactgtgtttggctgtgtagggt

SEQ ID NO: 48839 - DNA, 912 bp, Cannabis sativa
cgcctgaaagtatttttgtaaaaaaatagcaaaaattagtatactatgtaactctacattttgaatcaggttgtagtggcaataattttttcttataaaaacataaggacagtatataattaaccataggataatgttagaaacacactttaatcgcaaacactaattatatataatgatgtgtatttaaaaatataaatgactaatatttaatacgcattatcgttatgtcgggatccaaaacaaattacattcgatggagtaatttcttaaacttattgtcgcattcccaaactctttacaaattttaaattatttcttctttatatgaggaaaaaaagacaacaaattttagaatttctcaaaaatttgtaattgacatgctctctaaatacaatgaacaccaaaaatattttaagtggactatatcctcataggagtattttttttcttaaaaaaagttcattaatattataagacacgtaaagaaaaccattcaaacaaaagacacacattacattaaataactaagttaattctgcagtgaataaacattagcattattagtctacttacaatgagataatataataaataaaaaaatctcacacacaaaaaatatcataaaatacaataccaaactcaaaaaaaacttattttttagggattttttttatatatatacgaataaaatgaaagttttacaattataccttataatatttaaatggctatttatgacgttacacgtcagccaaataatgccggatgaggaaattatacacccaattcaattaatacatagcatcagacgtcactatccccaaaatgaaaaggcaaacatttagttgcttacaatatttgaaagaaaaaaacttagaaattgtttagagacataaaaataaaatatac

SEQ ID NO: 48840 - DNA, 2353 bp, Cannabis sativa
tgtcagaacacacctgaaaagacaacacagacatactaaataataatatagttctattaagcacgtagttaaattaatttcatcaatttaccattctcgggccataaatactaaaatgcccctggctcaccaacggggtcttaccatataatttatcaaataaattctcatatattgaactgtataataatataattcctcaattattcttaattatctaattagggttttgctaatccatttcttaattctagggtattacatatggacttgtatctgtatccttcatcctcaagtgcacctagggaaataaggttttgtctaagctctaggatgtgccttacgtttttcagcaccttaattccactatcataatagttgatggtaaccttcccggttccaatgaccttgcatgaatgatcattacccattagaaatttacctccatcaactaacttgtaattaagaaagactcttgatttggacacatgtaataagtgcatcctaaattgagaatccactccctattcattgaagactctgagatagagaacaactctccgttcgtgaagcagtcatcattatctttgcgattgtagcagagtctttcccatgatgatggtgccagaagttctttctatctctatggtgagatttgttaaagctttgttgcaccttgtacttcttgcaaaatctttacaagtgttcgaactttccatagaagtaacactttcttgtatccttctttcaactggacttagatcttgattgagagtgatggtgtttactttttgaactcactttcttgggtgatcttcctctttccaaatacatttattctttcttggattccttctccaactgtaatttgaaatctttcgacttaagtgcggcaagaacatcttttaaagcaataacatctctgccatacttgatggttgccttgacttcttgatatgcgattggaagtgatctcaacagaatgatggcctagcttttttcattaaacttgtgatttatatttgccaaaataataatctcattaaatctatcaatattttcatctaaagaaaggaaagaaatcattctaaaatcgtacaacctttctagcaaattaatattgctagcaattgatgattttaagtataattcttgcaatttattccaaacccctttagcagtcttctctgcgatgagtttcctttgaacactgtttgataaatacatgatgattgtgtagtacgccatctcctccatttctgcttttttctctggtttttttttctgccaataacttctcgtctccaagaactttagaaactttttggtgcactaggattcttttagactttctctccatagcgcaaagtccccagtttcgtcaaatttctccaattcgaatctcaccattgatgacattcaagtttcttcaagaattacagcggaaagaatcttgattttgcgttcttgatcgattaccaagctctaatttgtgggaatattatgaccaatagtacagcatcaaaatatcaaaactttaaacaatcaaacgattagcaatgacaagattatcaaattaaaaacaacaattggatgaaaatagggcaaatatagtaatgaaaaccataaattaataaatgcagaaattaaataattaacaccaagatatatattggttcaagtcctatagatcgatgtgatctatggctctactccaattctagaacaccaccgaaattcttctttattgattgagcaagaataggtacaatacagtcgagacgagattctctgttgagttctcacaaagtgtttcaactctcacacttacacccaagaatcttcttcatctatagaagattcttcttacaaaacacaaacccaatctctctcttttctttacacctctctctctacctttcaatcttttctctccaattctcaatctcatctgaactgagttctcaattttgtgtcttttaaaataatttttcgaggtggtatttatagccttaggattaagattctaaagttggtggctgcaagaagcgaggttgttaagttagttagaaataactaacttaaccaactcctcataaagcgaagcctccacgtcagcttaagtatcagagcctctagatcatatatgagcttttggacttacggaccaaggacacttgctgatgatgcttccagataggattgggtctgctggagttgactatccggatctaccattctaggagggacaactagccaaccggagcttctttccaaagggaggctagctatcctgaagactgaacccagagtggacatgataattgtaacgtcaccgcttcaagcctccatt

SEQ ID NO: 48841 - DNA, 1586 bp, Cannabis sativa
  modified_base (1541)..(1550): a, c, t, g, unknown or other
attaaaattatcacacaaacaccacacttttataatagtaagatatatatacttattgtcaggttgtaattaaatatatttgaccataagatcctaattaggagtgacaaacgggtgttaacatggtacataaacacgaacacgacacgaattttacaggttagggtcaagaaaattagacgtggatcgaaaacaaattaacacgacttggcaggaaataaaagcgggtcaaacacaacgacacgacatgcttaacacaaattttacacgtttgatacggtttttttaaataaattaaaataaaaaaaaatattaataattatataattatataaaaaatatatatttagtgattcaatgttaagttaaagcattttaaatttaattttttttacatgaaattgaaaatattttaaaaaatttatttttattattatatataataaattatatttaaataaatgtatataagttttctaattgaatttaaatctataatttttctctataactctagtttcaataatggtaaaatgggtcacagtgggccgacacaaacacgacacaattttttacgggtcgggttagaattgaaaaaattagacgcgagtcaaaaaaacgaatcgacacatctgacacgaaatatagaagtgagtcacataaaatatgacacgaacacgatacaatgacatgttttgctacctctaatcctaattatacttcagaataaattacttaaaaatgtaaaatataattggtaacttatctaaacatgatataaatcctataactaaataaatatttctttttcttgatggaattactcaaataagtaatgccttaaagtttttttttttttttttgataaaataagaacttcattaaatttagtattcaaaatatatgatatccagcataattgctggagcgttggacacacaaatgctacattcagataaagaccgagacatcctagcaacaacatgtgctagtcggtttgctgaacgttttacaaaatgaattttaagaaaaggaataaatgataaaagagattggcaatcatggataagaaccccaaaaaccgaactgagaggaatcttgcttcgaatggcttggacagagactagactatcgaactctaacttgacagtgttccagttatgactttttatccaacttaatgcttctttaataccaacaattttcgcaacttcaggtgtaaaagtgccgagactacaaccagctttggcgtcaataagaatgcttgagttgttttttgcgaccatgtcgtaaccatatttgttttcactagcaaacgtagtagcatcaatattaatcttgattgtgtttgtatccggtttagttcatattttctttttgatagcatcacataaaaaaagaaaaatcaaatcaaatcacatcacatcactcgcaacatcacattcaaacatagcattgttattaagtatcagtagtgcctaacaccttatagacatgtcgcgttgcgattgtctagcaatactccttaaaaattattatannnnnnnnnntgagactcgatacttaattagaccaataacaatatt

SEQ ID NO: 48842 - DNA, 946 bp, Cannabis sativa
tcatatttaggatgttaaaaatatactagttagtaaatctatatcctggtaaaatatattccaacaaatatagccaaccctttacttgacaagggacttctgggcagaagtatacctaacaaatcttatatgagactgatatctatgagctacaaattgccttccaagaactatctggctgggccgtcaacatgctagccagagaaggggaaattgactcaccttgcaggaattttttacaagaaatcccacaaggaagataagtctcaaaaagggcttggccgggtagtcaatatgccgactaggagaaacgacaccaggaatgttgagaaaggctacacgagccttgatttcttcttcaataacatccacaaaggggagtaggtcactacctataactaacgggaccaaacatctataattttgtgtgttatttctatttatttattatccttaactccttattggtgattaatcaacatttattaaactccgagtcagttgataattttcccagtcaacaataactatttgttaatgttatgattctttttatgaataaactagggaactaagccgcgcttcgcgcggtattacccaatttttgtaatctttatatattttaattttttaagtattaattaaacgatataatataaaatataatattttaatatatgtattataaatgaaataacatttttgaaattataaacaaaatttattatttgtcaaaatatgtggaaagattgtaattttatgataaatattaaaaatgatagaattaacagagaaatgatatgtttttataataaaataaataaaaggtaataatttttaagtttaataaactctcttgtgactgatgatgcataaaactatttagacttttttttccttcaacaacaacaaatgatattgaaactatctaagtatcttttattat

SEQ ID NO: 48843 - DNA, 1278 bp, Cannabis sativa
tagtactctcctcctcgttggtattatttgtgtaattaaataacttttatagtttatcgctaattaattataaggttccacctataaaaggtattgtcactaccactgacagacgcaaaataatttttactttgtgagaatttatttatcattaaaaaaaatatttatacctacattataattatttttactaaattttatttttgttagtatgagacagcccccacatgaatacaagtaggtttgtccttggtcactactagtgtccaataacaatgctcttattctttagtttaaaactaagtttttaattgagagtttataactaaatagagttacactaaaaaataattcaaaataccaaaaaatataatgtaataacaacaataaacaatctttaatactatattataaaataattatttttgaataaatataatatttatatatgtattacaatttagaataaaattattaattttatataaataaatttataaaatatatgtatacattttattaagatgtgattattcttttatatagagatacactttgttaatacgagacttaaaaatgtataattaattattcttatttataattaagtcaaattaagacttaatttttttataataaattaaaaattattttcgaatagattattcttaaatagaaatttttttagtacaatgtttgttgagttgccccttaaaaaaaactagtactgcatgttctacttttaggctatgtttggtggaaggaatggaaaggaggagggatggattaattaggaaagatgaatggaagagtgagaatcctttatgttgtttggtaagttaggaaggagagattcattcttttgtttggtattgaaaggataataggaggaatggagatgtttttaatcataaaattactaaagtaccaattgttagattttttttattatattattatacaaatagtattttttaaaatctttattaaattgtaaaatgtttaaagttaaaaaaactattttttatgtatttaaaagattaaattaatctaattttaaaatttatattgtacttaaataatttctatttaatttttttaaaaaaatattattttgattattaaaaaatataggggaaatatccataaactttttttttacttttttttttttcgaaattacggtttggattcttaaagtggttgcagcgctaattgttatattattttataatataataagtgtagattaaaatgtagtaatatatattattatgt

SEQ ID NO: 48844 - DNA, 930 bp, Cannabis sativa
gtttttacgtcatgcaaaaaacgatgcatattgacagcaagtccaaaaatcatggtggaacctttcttgaaagattatttgggtgtagatttagttattggcacggaaataacttccatcaaaggtttcgccacgggcttcgttcgaagcccgggggtaatagttggggaaaacaaggcctatgcccttaggcgcgagtttcctgacctaaaaacttcgactccaaacataggtttgggtgacaaggaaagtgattacccatttatgaagctttgtaaagaaagctacagagttgatccgaagatcaaagttaaaccactcagtcgccaaaagctgcctaaagctgtgattttccacgacggtaggcttgttcaaaaaccgacgcctttgatggctttacttatcattctttggacaccaattgggatactcctttcatgtttgcgaatcacaattctttcattaactcctttgtcaaatcaacacaatatgcttcgtgttacgggggttcaaatcaaagtaaaaggaaacccacctcctaagggtaacactggtcgatctgggcttctcttcgtttgctctcatcgaacagtcctcgatgcagttttcgttgcaggggctctccaacgacagatgacaactgtctcttattccattgcgcgattatcggagatcatatcaccaataaagaccacaccactaagcagagaccgaatcaaagatgctgctctaataaagaaggttctagaggaaagtgacttggtcatctgccctgaaggtacaacttgtcgtgagccttttttgcttagattttcagctttgtttgcggagttgtgtgatgagttggttcccgtggccatatctgttaaaatgggcatgttttatggtaccactgcgagaggttcaaaatggatggacccattttacttc

SEQ ID NO: 48845 - DNA, 963 bp, Cannabis sativa
taatagccactagacaaacgatctccagctgaacatctacctcctttcgtttgatccaacttaaaacctctttgatactgaaaatctcagccaacgcatagcaaaataagcctccaaaaaacaccttgaacaatctggagccaccccatcagccccataccaaccttttgaatcaaagattgatccatcaacttttccttaatgtttttcaacatcggtttatgtattactctagtctatcactcattccataagaataaacaaggacccatttttctttaattaagcagcttaccattgattaatgaccactctagctgatagaatcactctcactgtagaatcacaatcgcagcttcttctctcacaccaaaagaatactactgcaaaatctgaccaaaccaaccatgaaaatcacctcccaccacacttcctacaatgacactagactgaggcttttacaaatgtacaactgaccaaatgatgaaaaattgacgactcctgatattggacacaataaatcaactagaataagatactattagtaggcattattgttgatttcttttaacaattccttttcagttatcctgatacctatacttgttacttgcccttagtgggatgggaatttcctgcctaaatagagagcgaaagaaagatagtgataattattcattcttgaatgttaaacgtgttagggatggagacgatactccccacctctataaggcccgatttaatttttatttattttgtgatagtatgtttagttgtcatgcatgaatttttatgaaattttataatatattagtaacttgatctgaacatttttatttggacaattttccttactttaatatattattaacttgattattattttatcgctatgaagatattataattttataatatcttcatatttctcgcaccgtttagtcctatattttttgaaaaaaa

SEQ ID NO: 48846 - DNA, 1252 bp, Cannabis sativa
aaagattgagtcttgaagatgtgttaattgttgttggtcatgaaattgttatgcctaaagagatatttcaagtgattatggaatcaggaggaggaatggaacgtgctaatttgcatcatcgtaattttgtggttgctttgagagaccaaaacattcagaatttggtaatagaggcaactttgggtttgagtgatgatggaatggaagttttgattgcatataatcattggttggagtttgtgtttcgtcgtaggcttaacgttggagatgttgttgttttctgtttcgatctttcccgacgaactatcatcacatcggcctttcgttaccatcatgaacttggtgtttgcattccaattaatcacatgtaattgttaaatcaatcttggaatcttgctttttttttttttttgttacttgttgatgatgttagtaagtactagtcataaagaaattgtcaattagtactacgtagttagtattcattctcaattagaattagaaagaaaatggtattttcgttgccaacccaacaaaatctcttattaagttatatgttgatgatgttttgtagcatagtttgctttgcatgagaaaggaacacttggatgtttcattagatataatattggattttagtattgaaattttttcccgttgaactttgacatataccaaatcatcaatcatgttctctgaattttttaggtcgttaaaaattctcatcgaactattgagactgttagatttaaagacttttgtccaattatgctaaacaaagtctgaggtggatgaaaattttagaagcgcaatttggtacatgttaaaattcaagagacataatttagtagatatcaaagtttaggggcacaatttagttaatggacgctcgctacattaataaaattaaatgaaattagacaaaaattcttaaattcaacaatttcaatagttcaaggagaatttttaacgacctaaaaagttcaagtgacataatttagtacatgtatagttcagggtgtaataattctaataagcctataattaattgtgcttcaagtttggccatacaatggtagttcaattcctccaacaccaaccaaccccaaacctattgtttaagctcatctcatgatagaatattctatcaattattttacaaaataaattcaaaatttctcaactgatctttattcttaaaaagaacagtgatgtgttaatatcgagttttcgagaggctcatctgttaatt

SEQ ID NO: 48847 - DNA, 1398 bp, Cannabis sativa
atggtcggtcggttttcggattagaaccataaaaaccgaaaactgaattttggattttttttgtgtaaaaaaccgaccaaaccgaccgttgttcacccctaatgacaagagtgtggtggccgagtttactggatgttctttgataattagtgttgaaatccccttatgttttaattttatacgcttaactcctgatcttttttggtagaaaaatcctcttaacttcactttttttttttttgcaaatttgagtcgccagtgaaatctcaccgttaaatatcaactagattgccactgtgaacacatgtgtatatgtgacatatttttattgacttcaaagttttactatcacgtgtatacaggtgtacaatctcagttaacatttgacagtaaaatttaaccggcatcttaaatttgcaaataaaaagaagttaagggagttaagtgtataaaaaatattaaaatataaaagtaatttatttattaaatataatataaaaattattattctaaataattattgcaaaattaataattaaaaataaaaaaatcaaataatctatcaacttaaattaatttatataaataaatttaatttaagagtaattattacaaaaattactactaaataactaatgaaaaattaaattcttaaaataacttttcaaatttatacatataatatataaataaaattagagactaatgtttgaaaaaaaaaatataaacttaatttgtatactacattaagcattataaaataaattttaaacaatgtagaacttttgtttaccattacatgtgaagaaaattataagtgatatccataatatatattttttataaaaaatgaagctctctcaaaattaaaaaaataaattaggaaaattatagaattccttatcatcactctaacatttagcttagatatatagataagtaatatgaatagatagatatatgtatataaatatagatagatttgtaatggtattaatatttttaagtttctcttttgtaatcatacgtcgaactctttagctaacaatctttctaaacttgtcttgtctttggatattgcaagagtgtggtgccgggtttaccgggtgttctttgataattggtggtgaaacccctttatattttaattttataggcttagccccttaattttttttttttagtagaaaaacccccttaattccatttttttttttacaaatttgagtcgccagtaaaatctctttataaataccaactggattgtcactgtgtatacgtgatatttattggtttcaaaattttactgttacgtatacacgagtgtacaatcccaattaccctttgacagtaaaatttaactgacatcttaaatttgtaaataaaagtgaagttaag

SEQ ID NO: 48848 - DNA, 806 bp, Cannabis sativa
gggagagacaagcttcctagagaaaaaaggttttgaacttttatcgtgcttactaaaaaaaattgtgaagcaattaaaatatttattagttacaatacacttttaatacactttttacacgcttattgatatacaaaagaaaaatagacaattaattgaatacatgattaaaataataaggtgacacttgtaaaaaaaaaaaaaaaactatttgtatgtgtgtagacatttattgtgattgaagataagcaattttctttattttattatagagtaaaataaaataaatatggtatttattttgttacttgaatatttaacaaaaccttttctttaaattgtcatatttactaaacactctttatatttttttttttaagttgcaccactttaaaatttatatttaccaaatactatatcaattttcttcttctagagtttttgttttccctatagtacaattatagcaaattcctcttaaatttaaattaaatcgttagattataagcgtgtgtacaaatcgatctaatccaattacaactaacgaccaaatattagatattcaattataattgtatctgatgccatttttcaaatacatttaatatctaatcgaactaattagtatattatttaatttgaaaaaataattgaactttatgttgttatgtttaaaaaatatatttgtatatatgaaattagaattaaaattttatattttttattggagggatcaaattcaataaactaagtttaaaatattacatggaaatctaatttgatttactaaatataggtctaaaata

SEQ ID NO: 48849 - DNA, 1838 bp, Cannabis sativa
aaaaaaaaaaaaaaaaacggattatacaatgcaaagggtcccgacccgacccgagtttcaaagaagaaaaagaaagtaggaaggtacaaaaacgtacccgccatgacctgaccgacccatcttccaaaccaatctcaatccatcttccccacaaaccctaaaattaatttctgttctatttctcaatcccctattcccatggaagaagaagactccttcaaactcagagtcaacaaaatattcggctctctcaacacctcctcctcctcttcttcctccaccgcctttgcagctacgacgccttcgtcgactctcaactcgctatggtgtttaactgatgaagaaatagtcagaagggaatggaatcgcgataaggacactcccgagcatcctgaacctgtatccaactccatacccaaccatgatcacacaaccgaactggagaatgacctcgaagacctcgacgacgaagaagaagaagttgaagacaaatcgttgagtattattaactcaacgaagccggacgattacaacgacgaggaatgggaggttaaatctggtatcggtttggattgtactctcgattacgaggtagtaaaaattattcatctttattttttattgttattgttgttgtttctgaaattgaaatttttgttaatgattatgatgatgaaggaggaagaagacgagtatgataaagtggcggtcggtggtgatgaaaagccagaagatatcgatgattacgggattgacatagattccggcaatgtgcttccgacttcgattaaacaagtaccgaaagatcctcgggcgaatcacttggcagctaagttaaggatcaaggaagatgctgaagcagccaagaacatcaaccaagtggacactgaatctaatgtttcaaaccctaaatcgattctgaagaggaaagataaccaagtggattccaagtcacataagcgtgtaaggtttgatcctgaatgtaaagacaatggtaatggtaatggtggtgatactgacactgttcaaggtgaagattttggttttggtgttcctgattttctgaggaatccttctaaatacacgcattatacatttgacgattcttcgagcaatttgaatgatgaggaatctaacaagcaagcttatatggatttttttaatctgatgaagaagaaatcgagtagtggtagcgatgatcttgacgagaaagcagctttcgaaagctttggatctgttactttcataccaagaaagaaaagtggggacactaatgcaatggtagatagctgtacagagttagtgcaacaagttgggattggtaaggatgtttcttcactggccgctgttcggccaattgcagctgtagaattcgaagaaagtgaagtttgtgctatggaagaagatgaacctgatgaatccatggaagataggaagaagagcaacaattctccaaaacccgggcgccagtatcggatgaaggcgaggtcagattcggatgattgatttgataggttcggttcagttcagcatttgtagttttacctttgatgttagaaaaactgactaataacttatcaccaacaccaccctttcttgtgctgcaaagaaagattggattggagtttgtattgaatgaaagatttgatgtttattttaacaaatttaactagatgatgaaactgctttgggaaatatatcataggaccctaagatacattatgtgtatattaagattgttattttataatctactcaatttcttaaggttcgactgtatcaattgttgtcaaatgcataaaaaatccaagtgaaccaaattcttgaaaatataattt

SEQ ID NO: 48850 - DNA, 1229 bp, Cannabis sativa
ccccccaacccccaacgacgacccgagcccacccaaccaacccccgatgacgaactgccggtcattctcccatcgtgagacgaaccaagcgacccattcgaaccccaacagccccaaagaaacgatttgatccccgatagccaaacgaaccattagaacccaaccattccaacctcgataaaggtgcattttttgtgtgtgtgtgtgtttttttaatttttttagttaaataagcaattatattaagttatttttttttaatcactgaaatttgtatttaatgtttagatttggaattgtttgtgtggtggaattttttctaggtttgggacgaaataattttgggttatgagttgaattagcaatatttaagcgatgtttctgtaattttctctgatatggtgggatttcttaatttttgctgaatggtactgggttttgagtgaatttcgcaattttatgtgatattatgctattatgtgaagtagaaaacataactgtagtaaacgtcagtcattgtgcgacattgtgcgatattgatcaatattatgctatttatagtaaaataaacttggctgaatgtgtgaaatgaatgttaagcgattttatgcaatttatagtaaaacaaacttggttaaatgtgtgaaatgaatattaagcgatgattgtgcaatttagaattgtttttatgcgagttcttgcgatttattttgcgacattgtgctatttataatcatctttgtttgtaaatgcaaatggctccagaactcattcttccattgcctgagcatttttcggggtgtatcacctacagagggaacatgtattttattttaataaaggctaagttcgaagcctttaagttgactgacaaggtcaagaaaactcttgaatgctagtgatttgaaattctccagggtgattgtacatcaactattattgaggaaaaagaaattcagtgaggtaaataatgatgaagactagttttacgtgggtaaacccgaagccatatttggcgatctgagttcggtttgatcgcaggcctaaagatgagcggtgacccctcgatagaagaattgaatacacaatgtgattctgatcagatactgcgagactattttaacaatataaaaaaggtgacctttaaaactaatagcttttgaggcatgtgacattgcatacaatgtgtacaagcttgggttatgtgcatttattgaaggctttttgtt

SEQ ID NO: 48851 - DNA, 810 bp, Cannabis sativa
tatatgtatgtatttatataatataatgttccagccaatcaaggttgtcattttaatcattttgcacgaaggatatgtggtttgtacatagatttgtttaagagaaaaaaaaaacattacactactcaacttgagagttttgtcatattatgaattctaaataattatctagatgattatatcataagaaagttagggttaaataacaacttttccctttaaaataatagtgaataatttgtccaatttcaacaatttaatattagtttgctttctttatcgttttcagcttatagatggatttgcattatataatgcatgcactctgatacaactgttctaaaagttgtcttttaattttaattgaataaaaaacttcattaaccgtaccctttgatcttgttctacaatatttgaccacgtagtaattaaatgtgactgaaaattctgcatgtcatgattgaaatatattttgattttttaacattggaattttgtttgtgaatagagaaaaaaaaattacagaataaattggacaatttagtgcatattcattatccgaaaaattcgttcaaacactatacccacatatcatgtgacgcatgtcataaaaaaatagatttatacaatcgcaataaaaaaaattataggtgacaagccaacatgcggccaagaaggatttcctacaccacggtatattacaaaaatatatgatgttatagaaattaagttaaaataaaaaaaaatactaacaatcttattatgcattttacagtgctataacatatgttgaacttgatgacaatacaa

SEQ ID NO: 48852 - DNA, 1007 bp, Cannabis sativa
tatggacgtgatcctccacccttgatccgttactcagatgggtctactgctgtgttagctgtggagcagtatttggaagaaagggatgggtttctggatgatttcaagatgcatctgttgcgtgctcaacacaaaatgaaggccgcggctgattcgtcgcgtcggcacgtggaatttgccgttggcgaccatgtcttccttaaactctacccttatcgacaaaaatctcttgccatccgcaaaaacgagaagctggctgctcgtttctacggtccttttacgattctgcagcgagtgggaccagtggcgtatcgtttggaccttcccgtgtcatctgctgtgcatccggtgttccatgtctctcaacttcgtgcggcagttggcacagcacactcttcaccaactattccacctactttgactgctgatttggagttggtggtggaaccagctgagttgttgaatgtgcgtcagcggccatcatcccaaggggcccccattgaagtgttgattcgctggaaggacttgcctttgtttgaagcgacatgggaagattttgacaccatccaagctcagttccctgctttcaaccttgaggacaaggttagagatttaggggggggtaatgatggacacccgaagcctaaggtgagatttacctatgtgagaaggggtaaacgcaattaagttagtgggctgagggcttttcagtaattttgtatcaagtgagctgccttttagtgtttgggtgtggctgagagttagttatgcaatttgagagtaaaatcttgcatcagtagagggctcttgctctctaccattgtaagagtgaacacttataatttcctttctgttgtaagagatataatctctatttccatttgatcaataacagctcactacttctctatccatctgttgcattttaattgttcttcttaattgttgttgctgtgatattgttactgtgggagaagctatctacagcaggtagcaggtacttatca

SEQ ID NO: 48853 - DNA, 2838 bp, Cannabis sativa
  modified_base (2306)..(2309): a, c, t, g, unknown or other
  modified_base (2806)..(2812): a, c, t, g, unknown or other
ttatatatatttatttataaatataaagtcaatgttttttgaaaaaaaaaacaaaaaacaaaatataaagccgtgaggcataagaaaagtagctgtttagtttaggcagccaacttattataactttgaagataaatattcaagtgtacaaaaatattacacaaacaaagccttgctattattatagctaacatttattccaattaattaatataatactattataaatattttatatatatattttccttgaattagcaaagtagtccttcaattttattaattagcaattaaccccaattttataacaatatttagcaaattaatataacattttaattaagagaatatctatactaattgatggtcaagttcagcactcaaattgttaagaataaatttttttgttgcaaaaattctccctaaactataaaaatagttgcgaaaattcccttatagttgcattatgctcaattctttaaaatttaaataatttatgaatatagcactactgtaacattaatctagcaaagttcaagagtctagacaaaaaaataaatatataaataacagtctaataatgaattatatgagaagtgaatttatatactttcttaattaaaacaattactatgtagttagtgttagaatactataatctcaaatttagtcctaattaatttatgatgagaaaatttaacaataaaattaaaagaataacagaagcataccaaaatttataaaatcgtcttaaaatggtatgattttccaatttagatcaaaaatttctctggaacctttattttcctagatggggattcaagaatatgaaatagtacaataccatgcaaaatggggatcaatacttatttattaatgattgtaaaaataataattaatcatttatttattatttctaatttgaccctttatcaaattagaaattgtctcaatagtttccacataataaaattataacaactattctcttaagttataaattttatttcaaaatatactatataaatttaacttatttatataataacctaacacatatttttatatatacaattatgaccacaaataaataaatttctaattgctacaatagctataaactgaagggcctaattgctaatactaatagttcaaggactattttgctaatattgataactcttaaggataccaatgcaaaaaaaccctaaaaaaattatagaaaaagatggaagtgaccgcactcaatgcctttatatattagtgacctcatctgacaacacactacaaataaaaaaaaaaataaaaaataataatgaaaagtgtactaactacgatttagattctctctataaatacttataatttcttctttacctttctattggtcacttctttctctctatataataaatctcaaactctactactgttctattcatctatatatattcttctaaattttatgtctaatattaattttaactttaacattacaatgggtgaagaatttgaagaatccgaggttattttctatgaagaagatcatcatcatcatcatcaagaaatgtttagtattaataataataatattaatactaatcatttaatgatgatgagaagcaagaacaagagcaagaacaagaaaggtaataaaattagggcaaattcgatgcctatgaatattccaagggaagaggcgaatttgtttcgaaatattaatgatcatttaaatcacgaaatttggaataatttcgatgatgataattatgattatgattatgattatgatgaaaatgaagaactggtaccgcctcatgtcatcgtcaggaggcggttaaccggtggaaagatggctttttcggtttgttcgggcaatggaagaactcttaagggaagagatttgagtcatgttaggaattctattcttagaatgactggtttcttggaagcataattaaaagtttttattttttattttttattattagaatgagaaaatttaaaattaaaaacaaattgaaactttgggatttatcaataagaaaatgttacatccctgtaattataaattttaattcatgtttttttttttttcaatatatagatttttaagcattttgagctgataatgatttattgataatattatctcaatattttgtaaagctaataattaattgtttaatttggtcatgaataataataataatattattttaattgtatttgagttattactaataatttcttggctattggaagttttgttcataatattattcatgtatatatataaatatatnnnnatatatatatatatatacaggttgtgattttctggatttgtcgaagaaaaaaaaaggttgtttcagagtttcattcatggagttttttgtcttggtcttattagaccccaacatgaacagcctgggtcataccatataataaatatatatatttatttattatattatatatttatataaataatatattttatatatataaataataaatgtttagatctctcttttttcttattattatacggacacacattgaaatagaagttaggcaggacagtcgaaaaaaaatattttaattaattatgatatatatttataataaaaaaataatatttataaatataaaaataatttttgtatgatagttaagctagataagttatgaattcaaatttcaataaaaaaaaattacataatcttactttaaattttggatcactgtatatattaaagttatgttttaaaaaaatatcatgaatatatctttatatattaannnnnnntatctaacggcatttcttggtttaac

SEQ ID NO: 48854 - DNA, 1477 bp, Cannabis sativa
ttgcctgttgctgatgttccagttgcaaataacacagctgttgctgcaacaatcttgcctcttgctaatgacagtccttctcactctgtctcatttgttgccaatgcagctgctattgctgcttcatgtcctcagccttctgcaccagtttcaactgatactgttgctgcatcagattctccaaatactgctggtactcttcctcgaactcactctatgatcactcgatcaatgagaggcatttacaagccaaaagcttatcttgcaaccaagcataggctgccagaatacttactgcctcgagagcccaaatctctaaaatctgcccttcgagatcctgtttggaatggttctatgtcaactgaaatcaaagctctcaaagctcaaggtacttggactcttgtgccctatgaatctcatatgattttaattgataacaaatgggtgtatcgagtgaaattaaatgcagatgggaccttagacaaatgtaaatctaggcttgttgctcgtggctatttacaacaaccaggcattgactttgctgacacgtttagcccagtagtaaaaccggttactgttagattaattcttactcaagcagtaacatataaatgggaagtaaggcaacttgatgtctcaaatgctttcctttatggggacctgagtgagacagtttatatgacccaacctaaaggttttgaggaccctctttatcctaatcatgtgtgtaagttgaataaggcaatatatggcttaaagcaggccccgagggcatggaatgacaaactcaaaaacaccttatttacttggggatttaaggcttcaaaggctgacacttcattgtttatacatggctcgggttcaactcaagggtcaacttacaaatttgcagaaaggtaatatgtccatttcagattatgttgataagatcaaatctatatgcgattctttggccattgctggtcaccctgttaatgactttgatcttatcttacatcttcttaatggcctcggtcccgagttcgactctgttgtttcaagcattacttctcgaagtgatactctttctcttgaagaagtccaagccctcttgatgtctcatgagtctcgattggaaaaacactcgtctgtgatggatctttctgcaaaaatggcagccaatttaacagtgggtttaagaactggtcagtatagatcttttaatggtgctgcaaagggacagggccctgataacaactcaagattctttaatcggcaaaatggatccagaccaatcaataataatagacctttatgccaggtctgtatgaagtttgggcacacggctgtgacctgtcactatcgctttgatcgaaattgggttacaccaaaagcttctactgctcagcctcaggttaatctcactgaacaaactcttgagtatgaccctcaggcatttattgctcaatctgtacctgactttggggatgatgttgga

SEQ ID NO: 48855 - DNA, 1388 bp, Cannabis sativa
ctcttaaaaatatttctcatgatcgagattgatcaagcatacgtgtttaagatatagtaataaaacatagccactaatcaattaatatatattaattatgaaacgtaattaatggaaagaataatatagtttaggggttataacgctacactaattaattaataaaacttgattaatcaagaaagaataagttctcttttttttgtgatatattctgacctaggaaccaaaaaagcaattgaggccactataaaataattataataatttatttgatacataaatagaaatacatgtataaagtttgtggtgttaaaatcatttagaaaaggaatattaatttggctcatatttatgtgtatagactactagctaggagtactaattaaagatatatttatacataattaagagcttaattggaatttgatgatgatgaaaaagtgtctaaagacccaattaattagttgatcaagtagtattcataatgggggttttgtgttctataaatatatatatatatataactcttatttaattaataaaattattaatgaaaatcttgaaaagtacttggccatcttaataattaaatcttgtgatatagctaggggacagcctattttagcaactatatatagcatagaaattatttggagcaatatataacacattaattatgtatgtaatttatttgtatttatttttatttttacaaaaaaaatattactgcattataaaaaacaaatcaaatattctcatcaatataaagtaataagatatacattgttcaattacgaaaaaactctttataaggtaggctaagatttgagaaaaatagtttcgattaaaataagaatcaatatcacgaattcatgatccagttatttgtctttttgtttgatttgctgatttaatttaaaagtgcgcaaagaattcattaactctttcactttttttttttattaagatttttaacttcttccataactaagagtttagtgtcaaatcagaaacaataacaatttttaacaagaacatatttatcaagattttcaccaaaagtaaaaaattcattagctatatatctagggtcggccctaggcataggtgggctaggctcacgcctagggcccactcattttaagagcccaaataaaaaaaaaactttttaaaaaaggataaatggcgaaaaaaaacccccaacagtttcattttacttgcaattaatccccaaaacccaaatttgggtggtaaaacccccaaaattacgatattattagcactttacaattttcatccaaatttgactgttaactgccatggtggattgtacacatggacatagtgtacacgtgacacaattttattggttcatataaataatt

SEQ ID NO: 48856 - DNA, 1031 bp, Cannabis sativa
taaatgggaagtatatcaaaagtgagaacttcatggagctggaagcaaaatccacagactcggctctttggaaagcaatcctaaaaacaagacctcttctttggaaggggatgtgtcgaaaaattggagatgggaactctacctctatctggtttgacccttgggttcccggtgaagtcactcaaccaacccccactcgaaatgccacagatggcattagcctcgttagcaatttcatcagaaataaccaatggaatagagccttaatcagaagctggttctgcaatgaagatgcaaaaagaatattgaacatatcccttcctattactccaaaggaagatggatggttatggatacctgaaccaaatggcatgttttctgtcaaatcagcctaccgaatagttaagaacgtgcaagagaggacagacgcggatgagaagtggcgaatagtttggggagccaagatccataaccgtcaaaaattgctctggtggaaaattttgtctcacagccttctcacaaaggaaaaacttgctcagatattcccgagtatcgacattatgtgccctctgtgctctgcagcaccggaagactctttacacctattctgggactgtgactttgccagaggcatctggtttggatgtaattggcaaatgagaacatctacagtcatgatccggtcgtgggatgagtggctaaaatggttctcgataacccatcataggcatggctcacaacaattagactccttcctaggtggggcagccatcatatttgaaagcatatggagagtgaggaacaaactctgccatgaagggaacccaactccaatttgcttggtgatacaggggattaaccaaagactcaaggaaattgaattgcaaaattccaacttatctgcaacctttcacgactcacaagggtttgctcctcccccaggttggctaatttgtaattctgacatctcaattggaaaatctcaatctgcaggagcatctatattctttgatgaagacaataggattgta

SEQ ID NO: 48857 - DNA, 2357 bp, Cannabis sativa
  modified_base (1711)..(1728): a, c, t, g, unknown or other
aaatttttgtgaccccgctcaaaatgtttagagaaccgttctcagcttgtcatctcgccattttcaaattctcaacccacaaaacaactctaattccggtatatttttaataaaagtaatatatcaccaaataaatatctctttcttcatcttttttttctttcttaattatcttatctaaaaatctcaatgactcctccaatgtcttctttaatattaatccctgatacattttgaatcaaatccttttctctttgtcaagctctcttgatcagttgtttggtgatttctttccatctttcacgttcttgggtgtcttgccaggattcataattattccatcatccttttggaggaattgaaggtatcaatttctgtattcatgctctttgttgtgtactataagtttacgatttcataatttcatttgttaattgaaaatttgagatttttggtattatcatgacctagattacattttagattttgtgatttggacctcagattcggccaactggctgcagagtcgtatttatgactaatatcatcacatgtacacaatgaaaacaagtaagtaaaaggaacacaatatttttatagaggttcggcccccttagttagcgggtaatgacctagtcctattttagttgtattgatgttacatttaacaccactaacaagatcaaaatgctccaaactagtgatggaaatatgctttacactgatgttgaatttgctacagaagcctcaagattcttttcccaacttttcactacttcagggattgacaatgaagctcttaatgtcactttttctaccatcaactcgtccattacagcagacatgaatgtgagtctaatgtaggatttcactttagccgaagttgaggatgctctccattctatggctttagataaatccccagtattgacggcatgtcaagcatttttttccagcatcattgggatgtagttgggccccttgtttctgaatgtgtgcttcaaatcttaaatgatggagctaatatctcagctatcaactcaacaattatcactttaatccccaaggtggataatcccaaacagttgggtgaatatagacctattagttgttatcccaatttcggcactctgacgtggcatcacatactggtgacacgtggaatcgacttcacatatctgctcgaaagagatatgctgaatagaacgccgcacatatcaacacgggaaaagccttcccggccgggcagtggacagtccgaacaacatgccaacacttagcaacttcaacacttgcatcgtgaatcacagaagtaatccttataactttgggatcatatcacagagatatggcaagctgtccaaatcccttaatcagtgtactttgtatttaatgtgtaatcttaccaattacaaacattgtaaacagaaaggaaactttccctcaagcttatagccctataaatagtgacctattctcactgagcaaggggtcgaaaaacttatctaagagtatatactcagggatatcattgtaagaactctaagagaagaatcattgcattctttattcttaagtcaatacaaatcaaggggagtaggctattactgaactgcttagggccgaacctctttaaattttctatgtcctgcatttattttactatattatatcatttgtcgcttacaattaagactcattgtcgttggcnnnnnnnnnnnnnnnnnntttggtgctttcattgagagcgtaaaatcacaaactcgctttttactttaaatttaatcataaacacgatggtggtacagactcgtagaggcatggtcgatccagcgaatccaccggcagtgaatcccacactacagaatccaagaaatgcaggggtaccaccagccacaaatcctgaacaatcaccaactgtaggtcagggtgtgacgaatcctttgagtggaatcgcgcctggtgtccaagagactggaaatacaagttcaatagccaatcagggtattcccaatacttgagttccaccagcaacaaatgttcgaacaaccgttggagatgacaacgagattaagaacctccgtgctactcttggactcatgcaaggtcatacttataccttgcatcatgaccaggaggagctccgtgctttggtgaaccttgcatttgaagagcaaaggcctctattcgtttaatggagagataaagaggtggaaactttgaaggctcagcaagcggccattgaccatcgaataaggcaggtcaccgtgctgatacgaagagcctaccaggctattaatcaacaacctgcaaccatcatcccactgggcgagtcagacgaagatccagccgtgaac

SEQ ID NO: 48858 - DNA, 1286 bp, Cannabis sativa
  modified_base (1235)..(1237): a, c, t, g, unknown or other
gattctccctatcaagacacagaccaatcgaacccagtgatttggtctgcattaagcaacaagacaaacctctaaaggattacctacaacaattcttagaggacaccatgctgatgaagatactcagtaaagatggcacgatcatggcaatgatagctggactaacagtaatgagtccattctagaaagacttgaaactcaaatcagcatacaccattcaagagtttctagatagagctaacaattttagcaagctcgaagaagtcgtcaagaaggtcagaggagttgcttaaccaaatgcaactgattacactgcttatctataatccacaatcagtaaacgagacaaatgccacacacagatgacaagcagtaaacgagattgcaaaactataatccacaatccccttgagggtactagaacacagggccagcctaaaggagtcctcaacataaggagaactaacaaaagtagagtctcactctaacagtttcagaatggaagaaaaatgatattttagagttttttccaaccatttaatggtgaaattccacataagctctttcatcaagatgaataataattttgtttgtactatgttgtggttgtgcctctaaaggcttgtgttgtgccgaaaagtttttatcacattttatgattctatttgatttaatttttatatttttcttttcaaaaaataatatcaaatttgtagaagtgtttagataaaaaaataaaagtcattctattaattcaaagatcttttttttgggggggaaatttggaaaaaaaaaaaaaaaagaaaagaaaaacaatggactattagaataaattatataattttcaatttattcatatatatttttatttttaataatagtaaatataatttgaaagaactttccattaattttatttttaagtagttttgcaaacaacaaaaataaatcaattttttttaagcattaacacacactataataaattttgtttatcttaatatagagcgcttcacaacaatttttctaaaatagagaaatttttaaaaaattaaaaaatcgtactaaaaacatgctacaacagatgatttaaactttttcttcattttaaagttttttttttttttttaaatttaatatttatgctctataaatatatagatcgaatactattcattgctttaaatatctattctatatataatgtgggtatataacagaatttttggtttatnnnaaattattgggtgactttttttttcaataaaaaaaataacaaattatta

SEQ ID NO: 48859 - DNA, 1151 bp, Cannabis sativa
tattatttatactaaatatgaattctaaaatttttatgatttttgcttggcgatgatggaaaatacgatggatggctgttagagtcatatgggtaagtttagaacctaattattagcgggaaaaacatttgagatatttagaataccaggtttaggcagggccatggttttgaaccattttgcccctaagcctataggttactgaaaatgtaagtaagggcattttaggtattttaccttgaatgtggtgtttggtttttacattgacagatggccacaaattaactcagttttgacttattgatttttaaagttaattaattaagaaaaaaatcaaaaatcaagaaacaattggaacctccctttctctctctctttcttgctcggctcccacacaaaccagagaaaaccccaactccaaacctccatttttctagaaattgagcaaggaattaagtgtttccaattgaaggtaaaccctagcactttaatcttttagttatttaagctttaagtttagttctagcatgcaatcttgggagtttgtggctgttagggttaaaaatgattgtggttcagtttttgagttcattttaagttaaaactgatttcttgtagttggctttaatgatttttgtggagattgagcaagtttgagtttgaaaactcaaacttgagtcattaatggcacttttggattctgagtatttttcttgttgttattgcttgaaaaatgttgtttgaggttggtacgggtgatctcaaagttttggtgaggtttgggtacgaattgaggttgttgtggcatttttgggggtttctggtgcaaaccagttaaccggttctataggacttgtagaaccggttaaccggatcaatggtaggatttctaaaaaatctattttgtcgattcgtgttatttttagagccttagtttgttgtttcctcgatcattaagatattatcatgttaattatcgatagcaatacttgtagttgtgagtttagattctcagattaggttttgacgtgttatttactcatgtacgtaaatgtgacatagggcatccatccagcacgcgattttctattcaggtcggccagcacacttgaattcaaaaatgaggtaagatgtaatgccctaatctatag

SEQ ID NO: 48860 - DNA, 3388 bp, Cannabis sativa
aaatatatactacctagttcaaaaaaagttctaagtagtagtctataactaaaggtatatacttcttacaaaaataaaataaaataagctcaacgtacatcattaataatttagtacgatattttttagctcaatatatatcaaacaaaatatgttgtacgtatataattaaatataatttttgtcacactgctaaaattcttactttttttgtcacaattaaattagtgattaaaaataaaaaaattgtgactaattataaatcattattcttatattgtgacgttataagatccgtaattaaaggcattagtcacaaaaattataatttatcgtgactaaatgttttagtcacaatatttgaactaaaactaaattatgacaatgtatatctaaatactatgttttagtcacaaatgtaagtttttgctgtgactaaaagtcacatttaattaccaaaaaaactattatgactaaaatgttatcactaaaaataacagtcttttagagtgtcacaatataatacgataaatttagcaaaaaaaaaaagaggtttaatttcatatattaattgtatgatataattttttttaaaaagaaaaaaagtattactatgagacacttatgatgcctagtaccacgataaagtatcgtcttataattagataataattttttataatacttatagggccgaccctaggacataaataaaaaaaaatacctttcaaaaaatatacataattttttaaataatctttaaaaatattatttatcataataaatgcctaattttttttttcctatgaactatttcaacttagagtcggcggccctgaatacttattaaagtaaaataagtaaggcttaatattaaattatactaataataataataatagtaccatacttcagaaaaatactatgcaccatgatttgtcctttactcctttagcatttctaaaaagaaaattgtatgatataatttatattgattggtggagacaagctggcgcagtcggtcatgggaactgtataataagagttaaaaacactaaacgccaatgtgatgcatttcaacaaaagaaaaatcatttaaaaaaataaaataaaatgatggtgatgtattcgaattaagaaggcacatttttttttttttatggaaatgagtctatggagacttgctcctaatagtgtaggaattctctgtctaaatagacaatgtgagggaaacaagtgattactcttcttgctttgataaagacccctttaatatattaattatatatttttttaatattttatattttataatacatatttttttttagtatattagtattatttttataatttttaagtataataattattatattgaataataaatggtgtgtaatattttagtttactattttttatacatttaaaattttaaaataaattttgtttttatattaggaaattcacagatctttaacgagaacaaagacaagaaagcactcctcgcgtaattctccacccgtgtacatccctaattccaattaatattttgaactaaataattaaaatatgttcccatgaactaattaatacctttgtaaaagttttgtactttattattacaaaaatgtctctaaattataaaaattattataaatatttttcttatattttgattacatttatatttaatattatactagattaatattctatatttatatatcaatcacaagaaaaataggggtatgggttttcgtagtttaggaactttaatcttggataaacaaggttggcaattggtggttcatactagctaattctcttgttagtcaaattttcaaagaatgttaacgtgtgtagtgttttgtttcatttggattagaaccttaattaataataatatttatcatcgtaactaagtgcatgttatggattaatccatatataggacactaacaaaatgttgggaaaggacctagggttttggagccaatatatggaaccaaacataagaagacataagtcaaattgttacaaatcgttatatatataaaaatttaagtaaattataatttctcaaaatatttaaattataagtactaatattgacaaaagttatatatattatacataattattctttaataaaattattaaaataaataagattttttttttcattcgaactatatactatgactttcataaagttgtttgtatttgttaattttattgaagaattatcacatatagtatttttttttttttttaattttacatggtttggattgcttggtggttgttatgtagatttgagattatgatttagattactttgtggatttctatgttaacttatttcgtaaaaatgtaaaaaaaaaaattgctctaaaatataaaaataaaaaattcttattttttttttaaaaagttctccatgaattataaaatggttgcaaaatattaatttgtttattaacattaattagcatgcaaatattaactctaaactatgagcaatttaaaataggactctttttattaatatactataaaatgtaaatgatacaataataataataatactacaaatttatattacaaaaccatactttattttgaaaataattgatcattgagacaaattaaatattatttattatttttacgctaatacatatacataataaaactttttattttattttataataattcatttttttttttgtaattttctaattaataatgtagaaagatgaaagatatttttatatctaaatattaattatttataatactttttaaaaataattttataataatataattttttcatgacattttatccaattttattgtaaaatgagtaaagtactactagtaattgataattgagacaaattaaatattattcactatttttatgctaatacatatataataaaagactttttattttatattatataataattcatttttttttgtaattttctaattaataatgtaagaagatgaaagatatttaatttatatctaaatatcaactattatcaactatagagctatcctactattttttttttaatgaaattaaataaaatataatagaagaattaataatagtgtaaaatatttagagtaaaaaaaatactatttattaaaaatgaaagaaaattttataaaaaatattgtattttgatcaaatatttataattaaaacatcaatatgtgaaataatcgtgaaaacttaatacagtacattataatttttttttaaaaaaaattcggccctaaaataaaaaaaaaataaaaaaataaaaaaattttaatacgtggtgtaaaatctctaaataataaaactattgaagtaagaata

SEQ ID NO: 48861 - DNA, 1595 bp, Cannabis sativa
ttgcaaatgatgagaacaataaaatgaacatatattttatttatataaatgatatataatttcaactttgctatatggttatatatattttatgtataaggtgaatattaaacatatttaattggtagaccttaattctataggtgagtatatatgtatattattattactagacatatatatagttcatttttcttgtgtgatcattattagctctaagtggttggacctcaaaaaccacaaacaagtgatcatgtaagaaaaacaaatggaattaattgcataaatatatattgctataatggtatcattaattgttgaaaccatcatcaattcttatcaaagtttttgggtttttgtcatcattattattagtacttattgggattatatataattaatgatatgaaatcatggcaacatatatatagtgcttggcagctatatatatagatataattaacttatagatatcttctcatcaagtactacctttactattgtattttattatagtctttggggaagcatttgcctcaatctccctcccaagcatttttcccttcgaaataatttttgatatattgtattattattattatataggatttcctccttagtatctacactacataataattataatataagtgtactatatatatagtactgattacaatttaaatttattatgatatttcagaacatttataagtactacatagtatagagtgataaggttttggagagtgtggtaacatgcatgtactcacaaccaagcttaaattgcacgtaaatgtttataataataataaaaaaaaaaaaattggtttaacgtgggcccttttatgatttcttagttatatagtcatgtggaagtggaagctattttcgaagaattcttaatgtcatgtgtgaagcatgtggagggccatatatatttatataaatatattttttatatatatttatggtaataatggtttggatccactacttttgataatatatatccattgatacaatgatatattaaaagaaaatccgtgttccttacttcattaatggatatacattatttggattcaatatttggaatattattgccccatttaaaagggtaattataacttatgacaagaatatatatttatataaatatgtgtgttgtatgtatgtatgatctttaattaacttgtgttacaatttaatgtgtagtcattattaattgcaactatgaacttggcttatgtaacaattttgtgagagtgatataaatatgagcattgttattaggcactagtagtgtttaacatcttcttgacatgttgtgttgtgattggctaccgatacttctataaagctattatattaaattatgtaggacccgatacttagttaaactaatagcaatattaacacataaaagaatgctagacactattgatgtcctttagcatttctctatataaatatatacaatcttatttattaggagcataattttctgtgagagggattactagtgcactacaacactttaatctataactctataaaagagagaatgtgttttgggcttttcaaagtaaatt

SEQ ID NO: 48862 - DNA, 2442 bp, Cannabis sativa
  modified_base (2358)..(2380): a, c, t, g, unknown or other
tgtcaaatctggctaccacttagctgaaagtttgaaatctatgaatgaacattcttcatcatcttccaactgtcaatggtggaataggctttggtctctgaagctgcctaagaaatgtaaaatctttgcttggtgcttcataaatgacgctcttcctaccactgtaaatcttgctcactaaaagatctcctcttctattgcttgtgcactttataagtgtgcatgggaatcagttggacacacaatttttcggtatgaacgtgctaaagctgtgtggagaaaatttaatttctaggtttcaataccaaatattggcaacattaaaggttatgatatcttctctcatactggtgctcctcacaatgatgttgaattagagaagatcatatgtctaatgttgtgtatttggtcaaaaagaaacaaagaaattcatggtacgaagcccaactccgcatatattatttgatttttctcggcttcttatttggattaataccacaaagccacaactcagaaactagcagtaaccggttctggttgtcacaatgctcaagcacctctgttcatggctgcaagatctcctcctagatggcagccaccagctggtggttttttcaaacttaatatagatgcagcaagggatcaagcagggactatcacgggaattagagctctaatccgggactacaatggcaatgtcattgctggtttttcaaaggctattcgtggctgctttctccccaaggagatggaggttgttgccatgttccatagtgtgaaatgggcaattaagaaccagctgcaaataaactctattgagatcgattgccttttagttgctaatgttgttaatcatatgtcttctactagatttaaaacacattttcacgatttagtagatgatattgtttatcttttatcctcttctcctggaggaaaagtatctcacgttaaaagggatgccaataaagcggctcacgttttagctaaatttgcttttcgattggatgaagatatcacttggttgggggaaataccttccccaatctactctgtggttattgatgactctcattattaataatagcagttttttcttttttttaaaaagataaaataaaacattttaatggaaacccactagtttcttgggctatgccacaaaatgaagcaccactagtttcttgggcttaaccacaaatgaaatacaatagcccaaaatgtagcatgatcagtcactacactcgtgaatcgtaaactctagcgaagagttcgaagggtaatttcgtcatttggataagtaactgcctaatgcaacttccaaatccaacgccgattaccgttagccttcgaaccgccaaaatcttgcaacccaattaggcctaaacacgtgtccatttcccactggtcagccagctgaaaatgcagcctatataaggacacatttcgtctccaccaaacttcacattcccataatctgaaagaaaagaaaagctcttttactgtaagcaagaagaatagaagattgagagaacaatcagagatcggaaaaacgttcgaagcttgagaaagatactgtgttgattaatggagaagacgagtaaagtggctgagattgtagcagcagaggaaagggagtcgtcgaccatgggacctatactgagcaagtataacaaagcggaagaggcggtggaggaggtgcttggtggtaatggcaccgacggtgaggtcgtgattcagatgagtaagactgatactagtgagtacgaagactgcgactctactaagaacaagattcggattcaagtctccaaaaccaagaagcctctcttcttctaccttaatcttgctaaggtatatacataatatatatgagtacgtatatataaatgtgtgtgtgtacgtctctgtttgattttgattttcttttttggtgtaatattcatgcctgattctggctctggtcatattcaaatggcattagtagctagagtgatctttttctctgttttgctacgatttcttgaaatttgcatgatatacataggattaattttcagtccattcaagcgcgatcgttttttgtataagtaatctttaaagtcatgcacattaatcgttttgagatcattgttcttgaaaattttcagtctctacacttgtgatatgatcgctcttgaattttgcaagacatgcatatataaatatttctatatctgaaaattttctgttttagtaatttgattgatgctaaaggtgtactctttctttgttgcagaagtacatcaaacagtgttatgatgttgagctctctgctcttggcaccggtacatgttcttgactctctctctctctctnnnnnnnnnnnnnnnnnnnnnnntatatatatatatatatcttatctattttaagtagtgtatatataataagctgttgattgtt

SEQ ID NO: 48863 - DNA, 1422 bp, Cannabis sativa
tacctctgattgtacttgtaatatcgatcattcttgtactgaacaatgtgtttttactcacaattcttgtaataactagtcaatcaataaaagttcagtttcttccccttatgagcattctgtctgtcatgtttctaaaccttctgatgtcaatctttggcattgtaaattaggacatcctgctatgtctacattacaaaaactattaccatcaattccacacagtgggacattgaaacaattacatttttgtaatgcctgtcaacaaggcaagagtcataggttacccttttcattatcacccacccgtgcttccaaaccattacaactcattcacaccgatcttaggggtccttcccatgaaccatctaaagatggttttcggtattacattcatttcctagatgattttagtagattcacgtggatttatccacttaccatgaaatctcaagcttttgagaaatttattcagtttaaaatcatggttgagttgcaattcgggttgcctatcaaaagtgttcatgctgatggtggtggtgagtacaaaccatttgcacgattcatagctgatcaagggattttattctttcatccatgccctcacactcaccaacaaaatggtagagctgaaaggaagcatcgccacataactgagacagggcttactatgcttgcacaagctaagttggatcttaggtactggtggcatgcttttcaatgtgccacctataccatcaatcgattgccaagtcctgttattggcaatatcagtccatacgagtgcttgttctctgctaaacctgattacacaattttaaaaccatttgggtgtgcctgctggcctcacttgaggccttatcactcgcataaacttgattacaggtctgagcaatgtctatttctggggtattctcctgttcacaaaggctatttgtgtgagaactcagctggtcgaatgtttattgcccgcaatgtaatcttcaatgaagatctgtatcctggcattccttccagcaatactacgaatcaggtaacccctacagatccaattttgtctcttcctactgctacctttgtcacttcaccatgcactaattcatcttttactaattttgtctcttcctactgctacatcagttcagcccttacatcctataccagaaacacaacatacatttccatcacagcctgctgctgctgctcttaataccagtaatttacccaacaatgatcaatccaacaccaccatatcttccgatcacctatctgatactggtgtctctccccacacacaaacttctcacccaaatagatcccatcctatgataacaagatccagaaatggaataacaaaaccaaaagcctatctagctactaaacaccctttgcccgaatcccttctaccatctgaacccagga

SEQ ID NO: 48864 - DNA, 1131 bp, Cannabis sativa
cccacacctaactaaggtctagacccaagaccctggactttgaccttggacatggacccagaccttagacccagacacgacccgatctcggacttgaactctggccctggccttaacttgagccttggatcctgcccctacctcgaaactcttacctggactcagccttggccccagacccagtcctgaccccgaccctagggctagggcttatgatgattaaaaaagttatgtgagagaaaatgtaagaaaacaatgttcgagaaaaaaaaattgtttataaaatagaaaacaacctttttaatatttttaactcagcttttaaaaaatatggctaaacaccttcaattgttttcacaaaatatattggagaagaaaaaaaatgtatattaatatttgaaaatgtcaatttttcaccattaattttttctaaaataaaaagtcatgaaaaaattctaaattaaataaaaaatactaattaaaccggccaagtacatattagaaaataaaacaattaataattactataaatattaaaagagaccatgaactgaagacatgaaatgtctgtttttagtgtttggcttgatagttttttttttttttaaaaaaaaaaaaaagaaaaagaaaaaaaactatattttagggcctgtattttatttgtatagaaatttattaagcacagctgtaaagtgatattaatataaatatattttaaggatatacatatctataaatttcattaaaagttacactcattcaattaaggcactaacatgataagagtatttctttcttttttgacccatagttatagttttatagaatatctaatttttagaaatatatttttgagtgcttctttaatgtacctccgtaaaaaaattatattaatacattttttatatatcagcattcatgataatttttttaatttagtttaatttttttaatcgtagacgttataattatttaaagtattttaaaattttaaaaattttaaaataattacaatataaaaaatagtgtttaaataatatattttacacgcgtttaaaataaaaaaaatcgtacaacagattatttaatcctattttctgcgtattgaaatttttcaaaattttcaaaatt

SEQ ID NO: 48865 - DNA, 823 bp, Cannabis sativa
ttatgtggtttaagtgaacaagttgcctaaactgaaactacaaattttccatgtatgttgaactatatattggcagctttttcctttctttttcttttttgcaaaacatacaaacacaaagaaaaaaggagactttacttggcaaggtgtgttagacatgtgtccaagtctcgttctcagttggtcatcactaaggtccgaactgaacatgtcatcatctcccatgtatgagcacagggagtgatacctgcaaggacattagttctttaggaaggagaaagttgcattagaaaaatgaactctggcatgtgaatttgaaaattttctagcttccaatatatcatgagtgagataaagtaaaaatacatcatatttatactgaaaaaccttccaaataagcaaaagtagaaagaactacaaagcaattgaaatcctacaaagtaaatacatggtgtgggtggaaagaaaaaaagaggatactaacctaatggcagttattggggcagttggatctgcttccctaggcattagttctgaaccacggccttccctaatcatggacgaagccaagtcaatcataccagctgtttctgggagagttgctctgtattctcgatcacttactggggcctgaccatttcattccaggaaagtattttgacaaagctatttgtaagtgaaaacaataggcaaccaacatgacgagaaaggattttatatatacaataagaacctttccggaaagattttagacaaagctatttgtaagtgaaaacaataggcaacaaacaagacaaggaaaggatgttgtactatcaataag

SEQ ID NO: 48866 - DNA, 931 bp, Cannabis sativa
ctctctctctctctctgtttctcgtgggcgacccaaacccagtcgaaactgttgccgccaccaccaccaaaccagttaaaccgccacgggccaccaccaaacccagtccgaaccctttccccactactagaaacctaatcgtcgacgtcaccacctgtgagaaccaagcccaaaaggtacaatttttcttataaaaggttagatttgaaaaagtatttgattgtcaatattttgattgctattgatttggatgtggatttgtcattgttctaatgagagaagtcaattttttgtggattttgtggcttgatattgttgtgttgttatttttacattgtgatcgataaaatatcgattatgtttcaattggaatgataacactactacaaattgccctatttgcgtcagtcaatgcgtctcactaaaatagttgaccgaggtaaaaaataggcaaagattctatgctttagagtataactgaagctaaaaaaataccaattagcgtcagctcattccccgacgctaaaagaagaaccgaggaaaaaagtaaaaaattttaaaaattatctattacattttgtttcggtggaaaagtgaagctagttatttttgcttccgtttaaaaatgaggttaatacatttgccacgattatccaccaaagcaaaagggtttaagttttataaaacccaattttcacaaaataagatttcatttcacgtacgcatctcattcccctgaccatttctaaaccctagtagagccccccattccaaaacctagcagagccacactagccccctcgaaacccagcagacagccacaccagcaccctcaaaacccagcagacagccgcgccagaagctctcctcttcttcttcgttttgaaagatcacgtaccgaccaccattcaccgcccttctctttctctat

SEQ ID NO: 48867 - DNA, 2397 bp, Cannabis sativa
tgagtgagggcttgaataaatattaagtcaaaactaataaaagtaactcataaatgtatgtttcaaattttcatctttaacaaaataaaataaaatattgtcaatagtattattttatttttttaataaagtattattttttttattatttgtattggactacttttaaaatgggcttgattagaataagagtaggctcatgaatcatgattaagatattgagtgagggcttttgtgaattgggccttaataaattgagtgaaatgaattaatatatacatatatatgtctacatataaaaaattttatgtatatatttgagtgagggctttagcctatatattggctaaagtccctccgtccctgtatagcaacccatataataactactggagcagttaccgagcaacccatataacaattatcggagtaactaccagagcaactcaaactgtgaaaataataaaaaaaaataatttatggaatgattcacaatgaatatatctacagtgtcgtattgttataaataagttttattagctcctaaaaatttggcagcaaataagattttttctggtagcaaattatttttgccaacaaatttggtaacaagtgttttttttttttttatttgaccaacaaatgttataaatttatgcccactaacttttttattgctaccataatccgtagaaatatgtttattttattgtaatattttggtagaaattaaatattaaagttattgggtatagttaagaaaaataggctacactaacaaaagtgatcaaaaaattaattaatattttgtgtacacaaactttttatatccattggaaatagaatctaagattggcttgattattgaaaaattatatgtatctaagaattattaattatccattcaaaatttgaaaaattaacagtaaaataatgcaatatcaaattagttaaaagatcaaaaagattaggttatataaaaagataattaacacaatatgaaagagtaaaaaaaattgactttttgattgaatattgaatataaattgtcaagagaagtgtgttgaccataagtgacgagaagggtacgactgtcttttccatcttgagtcgaataactatccagggttacggtttttttaggtttttcaaatcttcttcttgctacagtcgcacctcttttctacgattacagttctaatgggtttttaacttcttcttttcttctttttcagatcacaggtagggttaggttctaatgcattcaagcttttaatctttctacttctcttcatatcacggttgggattagagatattagattctagttttaaaaattcagtcataaaatctgaacctttcttccctaactaaaaaactcaccacaagtgattaaatgacctaaggtataaattgtaagtcatggcgtcttgccttttgacatgcaacgttcgtattagttttgagtgctctgtttttttcttcttttggttctttggcagtggtaccatggcaccagacatggctgaagctttagccattaaagaggcgttaagttggatcaaggatcatgaatggcataatgtagaactcgagtccgattgtctttcaattgtctaagatattcaaatggtttcacctcttaggggagtggtgatggactgtggaaaacttctatctattttaaataatgtttctttgttttctattaaacaatctgctaatatgactgcgcacaactttgctagagcctcatattcttttccagatcgagtttccagtgggagggatgttcctactcaattacgctcttgtcttttggttgaattagcaaattaataaaattccaatttgcattaaaaaaaaatattgaatatgagtggcccttttttattgcagtaaaaatttaggtaatacctatatatatatgtgtgtttgtgtttggttaattaatctttttattttgtaggattaattaactacctatataaaaataaattaataaaaaatccaaagctacattagtatttttagatttaattaagttagttttagataaaaacaaccctacaaaatctattatatacgtatttatgttatcaaaattttcacatatagagtaagtttctgcaataaataaaatgagagtagttgctagtgctacttaatttttttagttaacagcaataattaaaaatacaaacactacaaaatttcactttaaacccaataaaatttgtgattaaaagtaaaaattataaattataatattttaatattttaaaatgcaactatgtatagatagaaacataatgaaaattaattcatttgaattcgatttcattatcccaacggaacgtgcactcttccatctgtactaacctcttaataattatt

SEQ ID NO: 48868 - DNA, 1808 bp, Cannabis sativa
cgcacataaaatcgatctaaaatatatgctaaaaatagcctaacaaatagtatctatattaaatttggactattttatctttattatttaattttatgataaataatttattttgtctttattattataatttttatcttatctcactattgtaaaaatcttttaataggagtgatgtttgtaaagatataattttatcttactattacaaaaatcttttaatgggatgatgtttgtaaaaataaatatagcttttaatttaatattgtgttatttttaaagacaaatatatctctatttacacctatacttttaccactatctcttatgtcatcaattatttatttaaaaagtcaacatattaaaactttgtagataattttacaattatcttatagtattaatatttatagataattacattcttacataataattcacactcttattatttatttatatttatatctttgtttacaattcttatattttttttctttctttcttttggactacttagcccttttcatttattcgatttttttaaaatttttatccacattgtttatctcaatcatataatacattaaagagaaatgagtggtgtatcttatttattacgtgttaatatcttataataaaatattatgtttcatataatttattataatatttttttaaaaatattactaatttattgtaaagtaagacgtttaaaaagtgatagatactactagtgacaaataacaatgttctacattaaagaatggtagtgcctaacagtttttagaggttgcaaccaacgattcgctagcgatattccctaaaaactattatattaaattatataagactcttaattacaccaatagcaatatgatatctaagagggtactaagcaccaataatattttttagcatttctctaaaaaaatgtgatgccgtcatcatcatcttttgctcatgtgacattttatgtgcgtaattaattaaatacttttaaatgagttaattaaataattaacccatttttaaataaataaataaatttataaatagagttgacaccagccaccacatgttgacatagcacttccatcaatttttctattttattgtttaaaatacatcactaaaattttactttctttattttacatcacacttttacattacaccatatatcaccttttttaatttttctttacaagatttaaatattatatcttattaatatattttatttattttatataaaaaaaatataataatacaacacacatatgtaaaaaaaattaaataacaataataaaatatttttagcttaataaatagtaatctctatatttagccaagcattattcatcgagctaaaaatatgcataatagctagctcacttgatgaaagttcaaaattatagctttttctttataatttgaagattgagctactttagctcatctactagagcagctccaaggagactacatatatgctatatgtcgtgtatatgtcttccaaggacgttgcatttcttgcagtattttgtggtctatgccgtgcactattgtcacgacatagttttttttatatatataatttagttaatatttatatatatatttatattattgtatttgtaaaatcatgaattattttttagaaaattttacaatgcacattttcaaaagtgatgtacgaatctactcttatttattttggcacccgacatgcatttttagtctattttttatatagtagggtatattataattatttaatacatcttgtaaaattttgaaaaatt

SEQ ID NO: 48869 - DNA, 1215 bp, Cannabis sativa
aataataataatatatcataatttgatatatctaattaatttcatgatttattgaatgatgaatttatgacgaaaggctttgtaggctactattaaaaatatgaaaagaactcttcctgttgtgaatcgttttaaataattactttttaaacttaataaattatattgtttacattaatgtgaatagccttgtacattccatacaaatccatattattaattgtcttagttttgtctttttatatagatctctccaccaatatttaaatcagtttatacgcattaaatattaaaattacagcattttattaagatacatatttacgtggtaaaatcactttaaccgattattttgatttaaaataagtttcacttattaaaatatcaaaagtgacttgtatgtcttgttcaaaaaaaaaagtgacttgtatgtctgtgtgaattgtatttacacaatattgtttgttttattatatcgttgtttattttatacatattctgtaattatgttaagatcgatacacaaacatattagtacgtagatgaattttatgtactattataactatatgcatagcatgacacgttgcatatatatttatatacgtccttttaaaacaccattatagtatttgttcaaaaaaaaaaataataaataaataaataaaacaccattataggacaattctaagcgtgccaataacaattcttatgttcacactgcacctaccaacaaaatagccaataacctatcttctttatttttttaaaaaaaactaaaaactctaaatatgtcgaagcatagaacatcctagattgaaaaacaaaaaaacactcttaaaaagtcactttaattgtgaaccaaaatccaaatatactctcacaaagttttcatagttaatctattaaaactcactctataatcaatcaccaccgttagggcaataaagggaaccaaaatcattacacctttgaataaacaatatcatcacaaacaccttatattccttccacgtatatttccacaaccaccccactacttcaaaaattccctaccttcttcaacatttcaagtacttataattctacctctatatataaatagagatcccaattcatctaaatgtactactactacaactaatagtgttaatacatagacaaacacaccaaaaaatactactttacaaactatatacctaccaacatattatg

SEQ ID NO: 48870 - DNA, 992 bp, Cannabis sativa
actacctgtactggcgttcccaagttgttcccgccgttcgtgtgcacgacctatacgggtttctatttggcaccagaccacgtccccctcaattcattgatgctccagacgaaccaaatctcaatataccgagacaggtaaaccctcaatacactatttggattcgcactgaccaagccatcctaagttggctacttaactctatatctgaagcaatgttaggccatgtactccgctgtcaattttctcatgaactttggtccctccttgaaaccctctttgccactcaatctagagcttgcatactccagctttgattccaaactcagcctaaatgacagcaaaccttttgatcaaccaaccttcttccacagcatcatgggagggctacaatacctcaccttaagctgtcccgacatagcttttgcggtcaataaactgagccaatttatgcacaacccaacgcaacaccactggaatatctgcaagagattgctacgctacctaaaaggaaccataggatagggcattctgttcaaaccgactaaacaaaggaatattgaatgcttcagtgacgccgactaggccggatcaattgatgatagaaaatcaacgacgggctactatgtgtatcttggaggaaacaaaaagctgtcgccaagtcctcgactgacaccgaatatagagcactatcgcagaatgctactgaagtcgcatggttattctccctgtttaaagaactcggccttaaacatcagaccccagctgttctttggtgtgacaatgctggtgaaaaataattgtccaccaatcctgtgttccacagccgcaccaaatacattgaggtggatgtacactacataagagatctcatttaacaaggaaagattgaagtcagacacattcccactcttgaacagacagccgacatattcactaaggctgtctccattgtaatgaccgctctaataatttggattagtaaaggcaat

SEQ ID NO: 48871 - DNA, 1340 bp, Cannabis sativa
aagctattatttagttattgctattaatagaattgcatgattaaaaaagaagaatggatttagaacttttctaaataaaaattaatgatataaaaattctaataacaaattatctaaataattaaagttagtgtgcttggtcttgatcctttttggaattagaatttcgaaccactttcaaatttagttagcttaatgcaacggcatatacaaaagttaatttaaacacattaaattactattatttctctatctaccccaacattaaattcattttatataattatataataagtaatagaaataataataggaatatatagttagttgtgacacatttactttattttattaattaatttatttttttattataataactaattttattactaagaggatcaaataatacattgattattaaataaatttaatatttgaatggtgatcttaatttgttagttattactaatatttgtggtgatgttttcaaagaatgcccttttaagtgtagatttacaaataatagagttgcacattttgaaaactaagaatgttttgcttgacaaaaagtgtagtctttaaaatggagatgtttctcaacaatagttatatattttgctctagttaacttaattaattaatgtgtttaataaaataagaaagcatatcattagcttgaacattttgtacaattattaagttgggtaaagttttaatttagctttcaaagttatgaaaccaagtaattaataaaaatctcccatatggcaatcaatatgcaaaacatcattgtctcttgttatataattgttgtagggaagaattaagatttataaatgtcaactacattatattatatatagacacgtcacacgtatacatatatatatatacacatatatattctcacctgatttttgggtgtgtaataatgatatgatgttgtgtgagtcaaatatattgtatgtataggtagggagatcatatcagtaacaaatataaatgtgttatatatatcactatattatgattcaaaattagccaactcatcacattatacttataaagcattgcaacgtgtacttattttgcatcatcaaactatattttctctctcctgacttttattcattcatttaaatttatatatatataaatgtgtaaggtagctacattaagttatgccagttgtatgtacaagtcttcttcatatatatatatgactttaattatatatatgtagctaagtattaatgttcaaaattgacaattaatgagttgtactaataataagctcatcaagtttatatatatatatatatgatgatcatggcgat

SEQ ID NO: 48872 - DNA, 1153 bp, Cannabis sativa
  modified_base (547)..(550): a, c, t, g, unknown or other
tatatatatatatattgtttttcacattcattattatttatttaattcaatagtaaaattggacaaataatttttttttcatgaacaaccaatataatttgacaaataaaaaagaggtgagaataatttttactagaattccagagttatttaattgtttttaatcatttatttactaataaaagagataattctctttaaaatagtaaataattaatgacaaattgaaaatattgtgtaacaataaaataagttacccttactcctctatttttttaataattaagtaatagtaattaaagattaaatcactcttattaagaggtttttcaatattttacgtaaaattgattttatttacaaaagtatctttcaaaattttttttgcacaaatatcattgtgccacgtcagcatgcatgccgaaatttaaaataattatcgaaaatagaaaaaattggaaaaatctcattttccgaatttttttattttttgggagttttaaaaaagcaaccatttagttgcttttgatgtgagtaagatatcaannnnttacttttccattaaaaaatttattttagaattatacacatatataaataataaaataatgattttaatgtgtgagaaacttctaattttctgtctcaaaaaaaagacgactaatattaatttttttatatatttaattataagatatattatattattttattatttaagatactttgaggttacatttttttaatgtaacttatatgatgattcagatactattcaatatatttataaattattttataaacctattaaaatagttttataaaaataagtttatttttatttaatcttataatgtgtaacagtgaaaacaaaaaaaaaaagaatttagtaacttattaaattatttgaaataaaatatttatttttatatattttaagaaactatgtgatttcttataaaatttttcagaaacttatcaaattatattctacaaaataagctaatgtataatctaatttagttacttttaaatattaagaaaaaatggaggaagctattctaaaaaaatataaaaagaaaaaaaagatagagagaaagctcactattaaacaaatgtaataaaaaacaacactcaaaaaaaaaaaaaaaaa

SEQ ID NO: 48873 - DNA, 885 bp, Cannabis sativa
atactgcatcacacatattttagtctaataattataataaaaatcgttttaattattcaaaaaatatcatcttattttagaattaagtaatattggtgaaaaaaaaaaaagtttgtgcacttttaactagtttttaacaaaggttaaatcccaatttcttataaaaagtagaaagtataaatatattgaatgagcaaccttgtcttttgttgtaaatgttgtcgtgttcctttaactattgctgctttgtaaattttgtcgttttataaaaaattttatccatttttaaaaatgactgtcgtttctttaaattattatcatttcataaatcgccgatttcatgagtttcgtttcatttaattgttgccattatttctaatcattgtcgtttttacaactgttgtcgttttttacgattattgtcgtttttaaaattgttgtcgttttttacgattattgtcgttttttctgaaggttgtcgtttttcacgtttattgtcgttttatgattgttgtcgttttacgattattgtcgtttttacaactgttgtcgttttttacgattattgttgttttactattgtcgtttttacgattattgtcgttttactattattgtcgttttttatgattattgtcgttttttactattattgtggtttttacgattattgtcgttttttactattattgtcgtttttttacaattgttgttgtttcttatgattattgtcgtttttaagattgctgtcgttttttactattattgtcgtttttacgattgttgtcgttttttactagtattgtcgttttttacgattattgtcgtttttacaattgttgtcgtttttactgttattgtcgtttttacgattgctgtcgtttt

SEQ ID NO: 48874 - DNA, 3389 bp, Cannabis sativa
ataaaacaactcggcacacaggccgatgggatcaatatgtacattgctggagaagattatcaccacatagttgatctagcttttccttgccttttacctacaccacatagcatccatgagtcacaaggactcaacaagaaaagtaataataataatcatatagtttatttttcgaatattatcatttatactcagacaatcagaatcaaacgatcacacattactcataagataaaattcaaatcactattggtaatcatcacgaataaatatcagtataaagatatttgataataaaaaactattataccaataataaaaatcatattcatttaataatataaattatataaatgttacctcataaagtaaccatatctattacgtcacattgcctaatcaggcaagtcatgctttaatatgataatcctatattgcattgcctaaccaggcaagcccgtgctatagcctaacacccatataccgcataatcgcatcacctaataagacgagctcgtaccatagcctggtaccacatatcattgtggctcatacctaataaggtatgctgccaggtatatcgcatcacctattaaggtgagcccgtgctaaaacttggcaccaatatatcacattgcctaataagacgagcccgtaccatagcctggtaccacatatcactgttgtccgtacctaataaggcacactgccaggtatatcgcatcacctaataaggtgagcccaaatatcacattcatgtatcatcacattgtcattgtttaatcaggtaatattttcattacataacaataataaccatattttaatctcaatatcaattaattctcaacaatattaattgtattgcaatataacatgctatgcagtacaataacttttcttacctttaatccagattcatgaacgtcagccaacctaaatggagaaacctcccccgatgaactcagccctatgtcacaacaacagtaaactaataagtatttatcccaaaacactgcttattattcacataagataatctagggttttttaccaaaccctacggtataaatacactaaaataaaatttatattttggctctgaaatatactcaattttgtagagcatgttgcaagcttcaaaacggtatataaaaaaacgtccaaaacggatacccgagtgaaaagttatgacaaaaatacaatttttgatctcctaagaatttctaaaaacggtgaaacacgaaaaattccaaattttgcactcaccaaaacttatttaaattattccaaacttcacaggacacatatataccataaatacaacaatccttacacaacagaaattaaattcaagcccttaaatggaaaatatcattaacgtcggactaagctttaaaaagtttcaaacttgatatctaactcaaaataacctaaaatttaacaagtaaatatcgaaactagttccacaactgccaaagaacaattctacgaagtctgaatctctataattactctaaatcacaaagtcactatataaaagcaatcgttttaacttaaaataaaaccaatccttaccttaagctctccctcttcaatgatgtactatcctgttactattggcgcttaaattactaggtttcgggttaaaattcgaagaaaattaaatagtggaggtgagagttttgttgcaccgatagagggtttcattcgttcgttcttctgttatgtttttaaaatatataagatatatacatactaggtgagtttacatgtgcaattgcacatgtgtaactcttagtttgattttttatttttatttttattttattaaataattgtgataaaataaaaaatatgaaattgagatttaatatttttaaatgaagttaaaattgtaaaatatatattatattatacaataataattacaaactaaactgagcattttaactatatacataaggtgtcctatataagatgctcattatttaaatatattttacatactatttatattatttgtacataatttatatattggtttatattattttgtagatgcttcaagcatcattgacagtatttgaggtgcttgactcagcatcactttcaagtagtgagataacactgtgtttagttcgacttccgctactatattcatccgctcttgcttttaagtaaatgaaaaatttactcgtagtaaaaagtcttgcaatcgataatatgttttgatcctattattataaacatcattgagaaagatagtaatattaatatatgctaatgaagtgaatgagtttaaatagtagaatttacatttggaatatgaataagctcttctgcggtacaatttaaaaacttttctgcatttttaccgaaaattgttgctattaatgagcctgtgtggtctgttagttgagcttgaaagtggcatctaaaaaagtatattcaaataaaaattaattaattaaagtaacaaattatgataataaaatttctactaaattgaattaatataaactttagaattgtctcaacatgtgatttgctgcattcgtagcatttaaaatgtgatgtttcattgtcaatatatactttttgacggtattttgtgcaagccatgtaccagaagggttgtcttaaatttttaatggagattgatgcattgatccaaaagtattttgctaatgaagcatgacatggttattgacattaagtatataatattatgtgaaataaaaattaattataaatactaagaaaagaaactaatcaattaattaaaagtaaaataaacatattttacatatgtaaggccctaatacttaggcgctctacaatgattttcaaattaatgtgtcacctctgctaatctaagggtttttcttgaaaatcgtgctaaattaaaacttttgatttagttgtaaaactttataatctaatatgtatatatatatatatttacatagtcgagattccgagtaaaacttttacaaatgttaacaaaatacattttaaaacctggtcgcacaatgactacaaaatataatcatagatgtcccgagaccgaacactccaggtcgcgtcgccttgacatatacaatcaccatccaagcccaaagctcactcctgttcagccatcgcatttccgttacctacacatgaaagtagcatctgtgagtcaacagactcagtaaaaaaagtatacaacaaatcatatattctcgacttgtgtctaggcgcccatacacctatctacaaggcttatgagatgacttgacaacattcttaacagttattactactggccatgatatcactgttgggttttatgccctagataaaactcatttcaatataatcagatttacaaattaataaaagat

SEQ ID NO: 48875 - DNA, 2809 bp, Cannabis sativa
ggaacttgagtgttacttcctcttccacctggtagagctgcaacagggtgcaagtgggtgtacagaataaaagaatatgcagatggatccatttttaggtacaaagccaagttagtagcaaaaggttaccaccaacaacttggttttgatttcaatgagacctttagtccagtggtaaaacctgtcacaatcaaaggggttctcagcattgccattacaaaagggtggaaaataagacaactagatgtggacaatgcattcttaaatggtgatcttgatgaaaagatctatatgactcaacctccaggttatgtagatcctcaaaatcctactgttgtgtgtaaacttaacaaagccttgtatggcttaaggcaggcccccaaggcctgctttgacaaattatctgctgctctcattggccttggattcatctttgccaaaacagatcattctttgtttgttcaagccacatccaatagttgcacttatatactagtctatgtagatgacattcttgtcattagaagcaatgatttggttgtttcagacttaattaataagctatatcaaacatttgctctcaaagatcttggcactgttgactacttcttgggcattcaggtcattcacattaatgatggtctattcttatctcagcaaaaataccttcaagatttactctgcaaaggttgtctaactttggaagtgatcctgttgaggatccaactctgcataggtccattgtgagagctctccagtatgctgttatcacaaggccagatactgcctttagtgtccacaaggtctgccaatttatgcacaatcctcttcagtctcactgggttgttgttaagaggattctaaggtatctggcaaggactcttgactatggtttgcagctacacaaatcatctcatttcaaaggggccttggatccagataattgaagatccaccactggatattgcatattctttggggataaccttgtccatggtagtccaaaaagaatctccaggtcttcaacagaggcataattttgaagcttggctgttgttgtcacaaaaatctcctggattcaatctttactacaggaacttcatttcaactccactctagttccttccatatggtgtgacaaccttagcacagtgatgttagctgctcatccagttttgcatgctcgaacaaggcatattgagattgacctttattttgcatgagacaaggtcatcaataaacagattcaagtccaacatgttcctgctactgcacaactggctgattgcctaaccaaacctatatccagctcccgttttccttttttaagggaaaaactaagagttctttccaaccacacttagtttgagggggctgttacagtaagttggttagagttagttgtccccttggttcttgttctctgttattttctgttaaactttagctagctagttgctaattgtaattagctagcctaagctacactgtatataatcacaacttgtactctctgttttcaattaatgagaattacttctttctttcacaaattctcaaactcaacaattaccaaaacccaatcatttcttgcttacttgtttttatgcttctgttatgttggatgggtttgtatgtgaaatgtttctataagtgcaacttggccatgacccttgatcttgattcctgatatttgcacttaaagtctatgcttgtggttatgagtcaacagaattgtcaatcttgaatgctttgatcaaggatggagaagtagcgaactgaactttctttcattgtcgtacagcataaaataattgaaacgttttattggaaactctgaatcttaatattctatgtattctgtcctttggtagttgacactaattgatgttgtttgaattcatttgttaaggttgttgctggtgcggttttgggcttcgtagtagcatatctgatgaaagagtcctagtaaaaatctggtagccgagactgatactgattttttgagctgttgagctcaactgcaacacaggcaaggggtctaggagctgttgtgaaagaagttcattgtccagctagcccaatgttggaagtagattctgccatgaatttaatcattgttatatatattatatatcataaattcaattttccaaataaaggattctccctttgtgcaatttatgattcatttcaatatatacaaaattcattctttccatatcatatgactttttgagcctgctaatttgcattgacctgtgttatgtgttagtaatccgtctatgacacttgctggggatgtagaagaaacgaagtttagcttagttttaatctttaaagtgcgatgaaatttgaagaaatattatattttcttataaataatattggaatatccacatttgatctattgcattttaaaatatatttatatgaaatgtatattttattatattttttacattaaaatattagttagtgcatttttttaaaatatatataaatttgtgtagattgaattaaatcgtttactatttgtaaactgcatggtttgctttttgttgtttttgttttttttagcgatctatcgtgatgtaatggattagtggctaatttgtcttttaatgaaaattcttatttctctcaaatcaacatttaatctgcacaagtatagattttaaagggaattttgattttatatacttaaaaaattaaaaaaatttattattataccaaaaacttaaaccataaaaaaactatattttttttttcaaaaccccaaaaataccccccttacaattctctctct

SEQ ID NO: 48876 - DNA, 1186 bp, Cannabis sativa
atgtcatgacattaaagaaaagggaatatacgattttaaaccctgtgccttgcaaaagttactaattggatcatctattttgttaaataaaaaaattagaccatatatttgtcaaaatggtaccaaatagtaatatgggttaatcttctattaaaagaaaatttaataataattcgatttagaagtgttataaaaacaatgattacattttctgcgattgttggttatgttgaattcagggtactattttgtattatttttgaaaaaatattgtttaatttatcatttaacaaaacagacggtttaatctgtaacttttgcaaaacgctagatccgaaacgaataaaaagaaaaataagaaattatgcttactgtaatgacaacaccaccaccttgtttttgacccaaagtgaggcctaaaggcttgtcaacttcaacctcaatggacttagcagcaccagctgttcttgctgtgacattaagacctcttcttgagccaacaacattactcttgttgttattgttatcatttttaatgaagaaattagcaacaccccttttggcttctatgagtgataagccttggaaacttgttttctagaccaattaaaaaaatgagaaaatcaattaggaagaataagagttattgaatgtgtactaatttatgagatatttgaaaatgatataaaagtaatgagagtgtttttataaaaaaaagaagtcattcggaaaaaatttattagcaaaataatcatgtttaattgcacaaacaatcaaaagttacactctgcaattataaaatgactattatttgattattttgctaatttttaatttttttacgagcctctagacttggacgaataacaacttaagagaatgttgcaactagaataatggttgttacaacaagaaaatcaatttttggtgaaacaaaattatatatattagcaaaattttattacgaaatgatataaaaaatagtagttattacgaaaaattttattagcaaaataatcgtatttgattgtaaattagactatgcaaattaatatagtcataaattgacaataaacaataccaacttaacagaattaactgaatataacaaaacatataactaatgtaacaaagtgattgtttttggtgagatgaaatagttaataattaattattacctgggtga

SEQ ID NO: 48877 - DNA, 2708 bp, Cannabis sativa
aataattaataatatttttttttaatttttaattgtatcactttcaaataacatagaaaaaaactagtataaatgtaatatacgtgcctcgcacgtagttttttgctagtatatatatacatattttatatgtacaatcgttgtgtacctgattaagcagaattgtctattattttagggattattttacaaatacacaaaaaacaacaaaaaatttcaaaagtacggttgtacggaattttaaatatttttatgattttatgattttatttacaaaaaatatggtatttttatgtatttttatgttgtactcttgttaatttgttgttgatttttttgttattttcatgttattttttttaagaaaagatcactattattataaatcaagagtcatttacaacaatagtgaaaataggataagaaatttctcctatccaacatgagtcttgatccaactctaaagcatgttttgctataccatgaatagcttgtttagcatatctcctaacatgagaaataacagctttagggaaaaaagataaaagacaacgaatatccataattaaatcctagaaacacgataaatctgtcaaactagaatttaaagcattagagagtctaagggcattagtttcaatatgagtaatatgtagttgttcttgcaccacccaattaaggctatggaaaagggccttagcttccatttcatctgaacgaaaacaaccttgaactggctttgagagaccggctatcacgtgcccttgactgtctcgaacaatggcacccacacctagcgtttttgtagccaaatccagagcagcatcaatgttaagcattaaagccgttccatttagaggtttccatggcatctcccctgttgtgttcctaattgaatccaaggtcggcattgaagttgaaggaaaaacaacagcaccttgttttttattttgattagcattaagaaacttgtccatataattaattacaaaagctgcagtttcgagaattgttcattctctttcctccatgaacaactttatttctctccctccatatggcccacatgatgcacacaataaattcaaactcaattttggaacaaagttgagagatagataagataatcaccattgtacatatactaagcttttcgaaaatctatggtaaaatttgtattctttgaaactgattttgcgtgtggacatgagaaaagagagtggcctattgactcccacgcatttctacacaatgagcacacaggcgaatcaatgaccttccttttgcaaagagcagcagcagttggaagagcaatgtggaaagttttcccaaaaaatatttttatttttgtaggaagatgcaggttccaaaattttgtccaccagtttttttgcaagtgtgaagttgaagaatgatgttggtcatctaagcttgctgctaaatgaaaactggatttcactgtataaatatgtctgtagttgtgtgatgccatattaatctatcaccacttggaaagaaacttaatgggatagtagtgattctgtcaatatccaactgcccaaaaaaattgtcaagcagctccaaatttcactcccttttggcagtaattagatcagcaaccatgagtgtggccgacccattgaaagtgagtggtttatattctgtatgtcttggaatccataaatccttaccacactgaataccaaacccgttgcctattttgtatcgaagtcctttagcaagcaactctctttcccaaatgtatactttgccatgttaatgaaggtgagtgtgctgattttgcttctaaaaaagagttgtttgaaaagtacccacactttaagagacggcttaatagagaatttggcatgtcaaggatcctccatacttgtttggctaagagagcttgattatagtacacaaaagatcgaaagctagcccattccaccttccactttagatttgcaaagtagattccatctttttcaatgaatttttgtaccatctttattagaaccccaccaaaagtttgccatcatactttcaagttgttggcaaaaggattttgttaaacgaaagaacctcatggcatatgttggaattgactgaacaacgactttaagtaaaacttcgttaccgctaactaaaaataatttatcataccaggcattcatcaatttccaaacccgctcttttatattaccgaacagctccttgtcatgtccaagtaagaaggcaacccaagatatttctcgtgacattcactaatcggcatgtttaaagcttgattgaaaaacatttgtgatgcaatcgcagtgttaggtgagaaggacataattgatttttagtggttaagcatttgtccagaagcacgatgatagatatccaacactcttttgatttgcaagagcaagagcagatgttttatttgtctcacagaacaacaagctatcatctgcaaagagtaggtgagatactgaaggtactcttcttgtgagccaaagtccttggaggttgccaacgacttcttcatattgtagaagtcttgaaagtccttcggagcagataaaaaaaaagtatggagacaatggatccccttgtcttatacctcttgtgggtttaagatgtcccacaacatcaccattgagcgagaaagagaaacttgcagaaaacagacagttttgaatcaaggcaatccacttactgtc

SEQ ID NO: 48878 - DNA, 1547 bp, Cannabis sativa
aaaaaattcaagtaatttgaaattacgaaactcattatctacaacacaaaactgacaaagttataataaaatatgaactaataattgtccaatcttaaagaaaaatatgaaaaagttctaattgttaataaacttcactcattatcttcatcgtcgatttgttctccatatatgatcagtaatttcatcaaggatattagtcatttcacgaatttgatctcttgaaatgctaaactcaacactatcattcaaagtttcgtggggtggacctagaaattcataatctaaatttgtgacacattccgaaagaattcgtgcatcattagctgatcctttccatccatcaacaacatagataacttctcaaaaataactaattttaaacctgcttgaaaactaccacaaaaattaacaagataatattttaaccaaacaaagcatatacacaaagacaaatatatgaaaattaaaggaaacaaaaaatgtaagaaaaaccacataccaagattaaaacattatagagaatttcaacaaattataacaacattatttatcaaggaccttattttgtgtataacaacaaaccaacaaattatatagggataaaattctaataaagaattaaagaatgacatctatgaaaaaattatcaaatttgcatagaaaagctaaaaggacaaagtaattgtattgatgcctccctcatgcaaagtaattgcttgctcaagataaggtgaccaataagtaaataacttctaattatctcaacacaccaccttgataatataatcctcaaacaattattgcacccagactcatcacattttaggcaagaattttttatagaaaaagagatgttgattaaaccagaagaagcactgaacaacatctcttaattaataaaagcaaagtccggttcatagaaaattactgaccaagtcaaaagcttttcaaagcatcatctacattcaattcaataacgaatcacatctgagtcaaaaatctcaaatataacattttctgcattctttttctattgttttgtcagaaatagatgatatgaataaatggttaattatgagaaaaaagaggtaataatattgtttagtaataatgtgtgaatgatgaataaacaaagattctagtgaccaagaataatcgaaatgattagaagttggtcaattgcgaccgagaaagtgcttttatcataccttccatagaagattggcttaaaggtagagaatcaatgatataatagtgcatgtttgagttagtcttatattctttacgagattcagaagaataataataaaaataatacaatttttgcatagaaaagaatggtttagaataaattaatcaaagaataaagaatataatcagttatttcaccatctcaatctttagtcccttagataattagagggagctaaaattgcccaaaactaagttaaacttaaaaccatttacaaatgaatcactacataccgagaacatgcctccattcatgagtcctaattttgtcttatgtcagtgagatatataca

SEQ ID NO: 48879 - DNA, 1917 bp, Cannabis sativa
caggaaaattcgatgttgatggctattcctttgatggaggagatcagggaacaagtttttcttatgcatcctttgaaggcacctgggccagacggattttcggggtgtttctatcgccgttgttgggatactgtgggggaagaggtcaccaaatatgtccaggaggtgttccagaatggggttcttaatggtgacatcaatcatacgtttttgtgtttgattccaaagggggaaaatccgaagactgtggataggtttagacctattgctttgttcaattttgtatacaagatcattagtcggattatttctcaaaggctgaagattgtaatggatcggcttgtgtcccctaatcaataggcctttatcccggggaggtggattgctgaagcctcgattttaactcaagaaatagtgcacacgatcaacaagaaaagtggaaaaggtggcctcatggctatcaaaattgacatgcacaaggcctatgaccgattggaatggatctttcttaaaaaagttcttggagctttcggtttcagtgtggattttgtcaacttaattatgcagtgcgtaacaacagtctcttattcagttctcttaaacgggaaaccgctcaagaggattaggccggggaggggtcttcgccaaggagaccccatgtctccctaccttttcttgctatgtaacgaaattctgtcaagaattctggatagagctcaagttaatggagacattcacggcataaagatctcaagaaatgcccttgccgtgtctcatttaatgtttgcggatgacactcttctattcacaagagccaatacggttgaagctggaaacattggcatgtgtctgaagaagtttgaggactggtcgggtcaattatgcagcaaacagaaatcaggtatactattctctagaaactgtgttaaatctcttcgggagaatatcgaaaagaagatgggtattagtactatcaatgaagccgaaaaatacttgggcaacccttttgtgttttcgagaaagaagaagaaggatttcgagtttttaaggacaaagcttatgcaacgtttggaagggtggaaaatgcgctctctatcctttgcggggagaatggttgctgttaaagccattgcttcagccattccctcgtattcgatgtccacctatcaactccctctcacttcttgtcgagagcttgatgctattatcagaagattttggtggagtgggaggctggagaagcagagatttatggcaactgtttcttgggactcactgtgtcggcctaaggtctcaggaggcctgggttttagacgaatggaagataccaaccaagcctttttggccaagttggcctggtgtattgcttcgggtatttcacgaccgtggactgttgctttcaaagcaaaatatttcccacgggactcgttttggtctgtcaaaaggagaaattcagattcttttgtgtggaaagggattctcaatgctaggcaagtgattatgaaaggatcttgtacggtgatagcttctggggcctcgattgatatttggcaccaaccttggatcccttggctaaactatgaagagttcagagatcttatggagtcaattcgagacaaagcaccaggtttgaggactgtggcagatttactaattcatagaacggggcaatggaattctaactatctctgctttctctttggagccgaggtagggaagaaaatcaacaccattcaattagccactgagtttagcgatgatcttctcatatggaaagaggccaataatggtttgttctctgttaaacaagcttatatggtgctgcaaggtgatcgctttgggtccacggacctgctttggaaatggatttggaataatgacttacatccgagaatgaagatggtgctttggagggct

SEQ ID NO: 48880 - DNA, 1004 bp, Cannabis sativa
tcatgagatggaagctaaagctctcttccacagtctagtttgggcatctcagcagcatattgatcttcatcacatagaaactgatgccttgatggtagtcactgctttatgttctccttcagcagctatttcatcttttcatgatttaattgttgatgtttcttgtcttctttcctttttccctaatgttaaaatttcacatgtcaaacgtacaaccaatatggctgctgatggtttggctaaatttgcattaggggtggatgaagcttgttcatggttggagtgtattcctccgccaatttactctattgttgtaaatgactctatgttttaatttatgataacgagttctttccctcaaaaaaaaaaagttattattagtttaaaatatgctaccaatagtactattttttttttgctaggatactaataataacatttgcaactacctgttactttctaatgagtttcaaatgaataattctctactctccatcgtcctctcaaagtcggacttaaaattattcgtactatgtggtcaatttggatggagagggaaccaagtggtacatggacacaaaccaaaaaaatgcttgtttctcaacatctttttttgatccagttcggtttgtagatcgaaatcttattctagtagtaggagtgtttttggaagccaccaaacgctgaaggactgatgctactcagtataggacattctcacatcttggagcttggtcaattgttctcgaccacactaaacatgtagttagttgtggcactgttatggttgggcttgggcgcgagctaaacctgcacgtaagcccacccaatttagagggtgaaaacaaaaaatatatattatttttacaataaaagaaaaaatctcattaaatcaaccaacaccattacaaccaaagtttaaataagctcaaagcaaagaaactttactatttacaacattaattatgtatttatttttgggggataatttccttctaactaag

SEQ ID NO: 48881 - DNA, 756 bp, Cannabis sativa
ttatttggtttaacaggaacaaagctctcaaaggacaatcttgcgatcaggcccacgcaattatcagcctgactcagagtttcttggcagattacaacacatcttcgtcagcttaaaattctcttggccgcctcagccttgctctagctcccacaattcgggctcctcctgcccccggtgttctcaaactcaatgtagacgcagcaatccctaagaatagtggaaaagcgggtttcagtggagtaatcaggaacagtgaaggcttggtaatcgcagctctcgctcagccttactatggaggaggtccagttgccaccttagaagcaaagtctctcctttctatgctgcgttggtgcattgatgagcatttcctagttcaggacatagaaacagactgcaaagccattactgatgccctttaccatcacaaggaagatttttcagttttcggagatctcataatgcaaattaaggaaactttgtctcttttcccaacagctcggatatctcacatcaatcgtaatgctaattctttggctgataaattggcgcactgggcttcagggttagacggaagttggcaaatctgggatagcgatgacccctgcaatctagtggattttctttctctttagcgggctccctctctctctctcaaaaaaaaagaaaaaacagtagtattaatatatttatattactaattattatttagtcatgtacaaaaagcggtaaaaatggttagaggtcttttatatt

SEQ ID NO: 48882 - DNA, 2764 bp, Cannabis sativa
aaaacaataaaacaatttatttattcaataaaaatataatgtaataactagcattaataggttaaaaactggttactgcagaacactaacttatagtaacaggtcaaaaatagaaataaattttgtaaaatttaaaacttaatataagaaaattatatatgctatcgatattcttttgaatactactagtctacggggccacgactaaaaaataaaatcaattactaaagtctcaaaagttacatttacaattaacttgaacaatgttaggctacctctaaagttttaccgtaattctttttaattcactttgccattctaattttcgaaccacactaaatagtgaactcccttcaagttttgatgtatgcatgttttcttcctcccatagtgagtctttgacaagtcttctcccgaagacctttctcttgttcaatactcttcaacctatctaagaacagtaagagagcataattacaagaaccaaaacctaattgaacactataggttattacacaaggaacactgatcttctcacaaagatgaattgtaaaaaaaattaagactagaagagatgatcgtatgattgctctctaggttctatttatagatcatagaaatactagacagagccacaacatatttttacaactgttagaaactttccttaaacaaagtttatcaaatcttgatgttatccaaatttccgcatagggtgacgtggcattcttctaggtgacacatggagaatattttacaacttgaacgtaccgtatattccttggtgtgccatccaaagttaattattatccaaaaacaactcatctaaagattagtatggaacatctggctagggtgaatgaaattgtccgagcaacttccaatctttcaattgaatccctattttggtgggatttttacacgttgtaaaagtaaaataggaaacttgctaagtttccctttcgattcctaattttgttgggaaaccaaattcatgtaattttaaatagtggagtcataccattatacttggatccaaaatcatattttctagatagctcttatgctgcaaaagaattgtaaacttttcctgagaattcttaaggaacttgcttggccagctccttgtgatcttattaattcttcaaagcaataccacaaaaaggagagtaggctattaccatgatcacggggtcaaatttttataaatctgtctgttcttattgctaaattacattataattatttctaatcattcttattgctttaattgactcaacatcgttggctaaaagcaatatcaatatttcggtactttcattaagagcaaaagaacattatttttattttgattacttcaaaacatttgaagatggttgtgactaccagaaggggctagcctactaaaagaatggatccaatgtccacagatcctaatctgcaaagtccagggaatcaaagagattcattggggatggatcccgatccaacaactcgtcagcctccatgagtccccccatcaaaaaggctaggagtaataacccctctggctgggttcactctaggtacaaaagaaactgggaccactagtatgcacaatggagaaactgggctgggaaccgaagatccaccaattagagagccttgattaaatataagcaccgataccaagttgcaaaatctacgagaggccttaggacagtccaagatcataccaacactcttcaacacaaccatgaggacaaacgagcagctgtgaatctggcatttgagcagccaaaatgccagttttaggagtgggtggatcaacagacagagatcataagagcccaacaagtagtaattgataacctccctaggtaaggaactgagctgatctgagatgcttctcatctaactaggcggctaccagtggaagacactcctctcatacgagattcaaatagagggaaagaaccctatatcccaaatggaccatagtacggtctagaggagcatccaaccaactactcccatcaaacccaagataatggactgtctaatccaaggccacagaaccaaattgtgggccacatagtaaatgagaaagtctttcttgcttgtattcttgtaggagatggccagtataactttcgtcctcaaatagatataccaaactagccaacagttaatgatggccaaacaaggagacccccaagagaataattcttcaacacgttaggacccgtattaatcgcatgagaatagattgggacgaccatgttatccctcctaacactcaaccaataattttagacaactatgtgtccagtgatgttttagggggtccataggtgacacaagtcggtcaacaggtaggtcaagttgatccagtggtgcaagcccaaatagatcaacttaagagccttgtacaaagcctgaatgacccaaaattcactaatctagaacttgcccgaacaaagggataacccttttcacctcacctcaacgcctttaatctataacacaagttaaaaggcctgcatggaaaatgtacacgggcaaagaagaccctttgtctcatattaagtattttgaaatgaagatggacttgcaagctgtaaagggtgatgtatggtgtagaatctttcacgctaccttggcagaagccgcccagcagtggtacttcaagttagccccaggaaagttcagttcataagattcttttatgcagtttcatgcataattcttatcttctagacaactcctatctcacatagaggac

SEQ ID NO: 48883 - DNA, 1544 bp, Cannabis sativa
tataatcacattatgatgatatatttttattatctggtattttaaggcgttcaacattatattaattgacgaaacactttataattagctagcgagttttcatattgaataaggtctaggccttagataaaataaaatttttgggcccttaataaaagaataggtggtatatttttaaaaattactaagaaaatatatgtatttctaaaggttttgggcccttcaacaccatattgacgaaacatcttataattgattagcgggttttcatattaaataggatctggcttgaaatttgtaggtggttttactaaaaaatatatgttccaaacgttttttttttgggtttttgggctgtgtgggccttaggtctagctcgataagatccaaaatgcactaataacgatatgtcacttcttgtggtgcttgaatcgaattattaggcaacattccacacaaacaaaaatatcttacttttggtaatattattcatttgtaaaaatgtcactttcggttatatacggtgaaatatttttacatcataacatacattattatttaattagtatttagatacaaattgttactaataagttagttttgaatcgtaataattaattaagtcacattgttactaactttaaacatattttgtcacactaaattatagttttgtgattagtattgtttttaaaatacttcaaattcatatacaatttggtgacttatagtatgatatcacacgtacacacaaaattaaatatgaattaaaacatatatatatatatatatattgattatgacaagaattatatgtgtgtgtatatatatagattggtggatatacagaagtgtataaaggagagttaacattttcgacagtgagaggagctggtcatcaagtcccaagttaccaacctcgtagagctctttcactcatcaaacacttccttgatggcactgatcttcctgataccacaagatatgattaattgtttattagtcttatcatagaaataattaattgtaataagttcataattaattatttcactttgcttaattatagaatatatagtttattaatttctatattattatatatgtagttcatttttctataatatgctatatagtttatgtatttattattaaagtgtttcgatttgatctcattgattaattattaatatataataagaaaaaagaggaaaaaagaaaagttacaaaaatttccttctattgtgtctctgtttctttctctattttttctacttatatatggaaaaaagaagaaaaaaaactattttattatttgacttcaaaaattaaacatggaatttaagtataaaaaatgatctatttcaaaaccctcaataaggcctatgcaagattcatcaagctagatctagtaccatggtttataacatttctctcaagttaggtatcacaatgcacagaacgatcttaaaatttagtgggttataagtaaaaaatatattttaacttttatttagaaaaaaattgatattttttaaaattaa

SEQ ID NO: 48884 - DNA, 1465 bp, Cannabis sativa
  modified_base (1301)..(1302): a, c, t, g, unknown or other
atttgttcgggtgtggatattttatatacaacatgcaatatagaagaaaaaaacttatgatatctatatggacaaactatagttgcactctacactctttaaattatatatgaagaaaaatcaaatcatttggacaaattaaatgaactaaaagttaattatagtatattattctctcatcacatattttaatttaataattattcacaaaactatcaataattattctcaaaacatcaactgtggtggcaatattgctaaaaaaaaaggtttaaaattaaagggatttgattagtaaagtgtatgaattatctagggcctcatggctaataaatagaggcacaattataataatatcagaggttgttatagtgactggtcattggtaatttttcagtctatatattattaattaaggtggcaacataattataataaaaataaactataaagccaatttgatacatgcaatagattcaagaagattactagtactgatgaaaatagctttatgatcattgtgtattctgttataaagtaatagtaaggctgacaagatttgaagattctgctgaggttagtatatgaaaagaggtatgggaaccccaaaaggaaagaactttataggtgaaaagaaataggtttgtctgtgggtaaaaattaaaaagttatatagccttttcttactttgctttcatggatcaaattaaaaagccaagttgttgtaaggtgtgtgaagatgcaagaatttaaagaagaagaagaagaagaagaagaaaaactataataggagctataatatagactagtggctcttcatcttctagtggttacaagttaagatacctctaattagatccttttctaggcttatgagagctactgttatggctatatacatgacacctgtaacttcccagttatacagaaattatatcctattaatttagacagaattaaagaaccacactctctggttttgaaagttctgtgctttaactaaaaaaaatttctttttcactttttttattttaccataagttttgccagtcattaattcttgcatactcttctgctcattatttatatataaaagagctcaactgtataggatgtaaaaagatcactttttttttttacattttttttaatgatatttgaagaatagacagttctactagatacaaaaattacttataggttaattaagatttttactcctcaaactttaacatttaccaaatcatgttctttaaacttttctggccgttaaaaaatcccctgaactattaagattgttnnatttaaggacttttgtttaatttcattcaattttactatatcagtgattagggctgaaaatcgggcgggtttaccgggtttcgggttggcgagtttcgggttcacaggtttcgggttcaaaaaattgaaaccgaacccggacccgaatagggcatgggttggc

SEQ ID NO: 48885 - DNA, 1143 bp, Cannabis sativa
caacttaagaggttgggtggcccatatcaacacacatatgcgtaagcccaaacccaaacgcgtctgatccctaaaaagcccaaagctgccatatattgccacgtgtagaagttgacttcgcagcgtgtggcgtacgtgaccattgactctgtgagagaaagactcttgacatgtggaccaggtcctggggtcgtgggggtcccacatggcctttggtccatgttcttcaagctctatcaattctctctccctttttatattatttgattataccataatctttttttatttcacttgtttataccataatcattagtgaaatctcaatcttataattgtggaccttttccattttggtattattattaataataatatattaagtagggaattaatgtcctggtctagtccatggtgtttaagttgtgacctaagaaatctaagcaaagaaaatattcttgtgtgtgcaagcttatactaactagagaatttcaaactcaaaaatccatgacctctttcaaatttcgtgtgcttaattataattaattaattagtgagtatatctttccccaaatttttacttgactctttttttttttttttcaatgcgcttgagccattttaaaaacatggatttgttttcttatgtctatacacaataagtgtaattggtaggtagtataattaatagtaattaatgtgtatagaaataattttgtaattaatagttagggtaattataattacattattttaaaataaagaaatactaaaagatattattagtgtctaacacacccctaggtgtcatcgtatttaatttaatataataaattttagagaatatcgttaactaatcgtaaccatcacatcaaaaacgtgttgaacactactattatctaataacaatattctttaaaatattctttaaaatacaatgtgtgtttaaatataatttcatagtttaataatattaatgacttaaaaattattggctacttgaaaattgtaattacacaccattttcattaggagccaccagaagaaaagtgtaaataaaatccctcaattatatccatttacatgattgttgtgtaattatttggttgaataattacactaaactttataattattttaaat

SEQ ID NO: 48886 - DNA, 1336 bp, Cannabis sativa
  modified_base (87)..(87): a, c, t, g, unknown or other
aactaaattagtgataacttgtaactaaatactatgttttagtcacaagtatcattttattataactaaaagtcacatttagtcacnaaaaaattatgttgtaactaaaaaattgttactaaaatagtagtaattttttgtagtgcttttaaaggatgcattatagaagcaccttataatttttactgttcttcttatatttttatgtgtgtgcgtgttttattttacaattattgattaatagtatcaaaataactatttataaactgatggtttggtaattgattactactagagaaaaaaaaaaaggttttttttttttcatttttacaattctaaatattttttttcgcatttttatggaattctatatagaaacttttattgcaactagcgctgtaacttaaattgtaacaaaaaatcgtatagaaactcctattgtaactagcgctacaaccactttagaaacccaaaccataaatttaaaaaaaaaaatatatgggataataaaaaaaaaatgtgatagtaaccagttactattattaatttctaagagaaccataaaaaatgtactaattagttagcaattttatatttttcaaacttataaaataattaaaaaaaaaacatatttcagataatttctttatgtgggtttgcattgacccaactcaatattagattgtgacagatctacaaagaagtttttggtaataatatcaaaagatatatggaattttttttcttcacaaagttaagaatgtacttcactaaaaatatagcaatacaaaaatataggatttttgttatttggtttgagcattttactaataaaagtgtttctaaattttgtaaatgatgacatatgtaattatgtatgttgaatctcccatcaatttttgccgaaattttgagtaaatacagtgctgaaaatataaaaatatattattttgaatgtgaacgaaataagttaattttactataattaaatttttaggtaataaattatctaaaaatttactaaaactaaatattatattttttgaatgacttaaacgcacatatatgaacatatttcatgtaaaaacgttttggattatcatttcttgtaacaataaattaaaaatactactaggatgaattagtattttgagctaaatagcataaaaagatttaacagtactatttggagatcaagaaaaatattataaattttagttcgtatctgttttatagtaagttttgtgtcaagttcaatttcagttaaggcggattaggtttacgaactcaaaaaagaaatatttgaaaataaatgtatttttctaataataatttt

SEQ ID NO: 48887 - DNA, 2857 bp, Cannabis sativa
  modified_base (740)..(740): a, c, t, g, unknown or other
aatttttgtaactaataattttagctacgaactttttagtcacaatataagaatggtcatttataattaatcacaaattttttacttttagtcataagttttgttgatggtaagcttgggctttgcaggtgaacgagtgaattaacccaaacagatgtgctatatttcaaattttaataatatattagtacgtggataaatttaagaattattattttttttttttaatttctggcaatagataattttattgagaataggctaaatgttatacaatctagaaaaaatgaataatacatccctatgaaaacaaagataacattccctttgctctaaaaacaagttctctatctactcaaaaattatgcataataatccaataccaaaataaattaatatctcctacaaatctaagcatcaaacttgtaataatcacaaaagtcatgaaaagattaattatcttaaaaaaatacaaacaaaaggtttcaatcacgagccaatatccacaaaaggtaaataaataaaaggatattctcacaaaatacttaaaatcctttatatatttatatatttttactctctttttctaaataatttgcggctcaattgtaaattaatactcaagtttaatttttaatgataataatacttaagttatatttttaaaactttcgtgtgtatctgtccattaagtgtcacgtgttattttcttattgttatatttaaattaatttttaaanaaaaaataaaaatttaatgatctaaaccaatcaagaactgtctcgtggtcattaacttgatacttaacagccaagtacctacgaaggaaatataacttaagtatttatttgcaattgggaattaaacttatatatttataccacaaattatttttttttacagaaaacaacatttttcatgttacaacaacatagtataataatttagtaaaaataatgacttttttgcgtattttcgtaaaagaagtttaaatttgtaaaaatgttgtgtatttttgtaaacttttttgtataaattggtattgggcagcatgggagtgtagtctcatcataattaaaaagggtcaggtcctcgggtcggacccgacaatggcgttctcactgtcactactccggaaatggaaatggaggaccgttaactcagcattgccgccatggccgcgacctcagactttccgatcagatgcggcattggaggccatagccgaagcttcccaacacaacctctctactatatttctctacaactatccctccttttctggagctttctccgctctctttgctcacctctttcactcccgtatcaacctcccttgtctcatactccctttctcttccgtcgaacctctcaggtattttccccttctttctctctcactctcattatctcactaaccaaacagagttgtttcatttcatttttcgcagggttgaggatttatgcactgaaggccttgagaatttgtatcttctcgacttttttggtcccaaaggatttgccgaagagctttctaggcgagcttcattcaagtaaagttatcttcaaatatatataaatatgaattgtgagcgatccttgataattttatttcaattcatttgagactgtttaatgtgtattgtatgatttttgatgtgattagagtgataggatttgatcatagaaaatcagttcttcctattataccatctgaggaagattgtcctgcaaatctcaaatttcatctgaatgttgagaagagcagctctattgctgtgtatgaatacttctctgctaaactttctcagaccaaacattctgatgtaagttgaatttgagtcacttttggccttgttggtacaatgaagaagatgtattttttagttttttactattgcattttgaaatttttagggaatggttgcaagtttattagagtcgaaggaccaaggtcgtgtagaaatgattcttaagcacattgaagatactgatttacgtcgatggagcttaccagatactaaagcatttaatattggacttgacaaatggaggtcgaaattgaattgcttaaccaatccatatatgtatgaacaggtttgttagtaataattgtgttttgtcttaaataaatttgtaagttgttcataatatttgggttgattttctgttaaatgttctttcagtgtctgtcttttgcacaacaacttcacataacctggaatttctttggtctccttactatgcatacatgagtagaaagtagtataaaggatttttgctttagttttagtattcaacattagtttttgctagaagaattaataactaaagattcatggaactcaacttgtttgtaacttaaatgagttattcattgtaatctgtatattacatcaatatatattattctttgtttcttgtcaaagtaaaagaaagccattggcgtggaattttgtgctctgagcctgtttgtctagtgtcacagtttctttttttttgacttagttttgataatattgttgcagttgatggagattaattctgctgatttaattgctgttggaaattcttatatttctactcgtgaaaaagctgcagagaagttgcttaataaagctttcaaagttatgttgggcagaggattttatggggaatgcctggtaataattctgtactcccttacaagtcttaaaatacaaaacttaaaaaattaactttgtttcttctctgcatggacttctcctcgtgacttcttttcttttgtatttttatttttcctttttgtgcatgtgtgtggcattaaataattgtatgatacagctacaactttccattatctcaactttatatataa

SEQ ID NO: 48888 - DNA, 3016 bp, Cannabis sativa
taagaatgatgatttatcattagtcacaaattttgttgtgactaaaagtaagactttttgtagtgctgcatacattaacgcatatttaaataagcctacagtcaagtaattcatattaaaataaatgagtaatttacagcataaatatctaagtttaaattctaattgctgataaatatttaagtttaatttttgaatctaataatatctaagctaaaattttagaactttcttaagtacttggccattaagtgtcaagttaatggccacatggtagaccttgattagtcaagatcgttaaattttattttttatttaaaacctaatttaaatataccaataaaaaatgacacgtggataatgacttgacacttaaggaccaggtaactaggaaagttccagaaatataacttaggtattattatcgtaaaaaaataaatttaggtatttatctgcaataaagagttaaacttaggaatttacgccgcaaattactcaaaataaattaattaatattttttttaattcatattaaaataaattaatattacatatgattgtgcaatggtttaaattttatttgtagggatgctaatcaagtagcacatactgtagccaatcatgtattgataaataatgttaaatgtgctatttggattgggattgaactttcttgtgctcgtcatgctttacagttggggtggcaattagttttggtgtgtcgtgttcgtattgtgctgaggtcttaaatttactaaaaagttgctgacacgagcacgacacgtgacacgacaaatttataaaacacagaaacgaacacgacttgaataaattcgtgtcatgtcaaactcacaaaatcgcatgtcgtgttggcgagttgtaagctaaattgttgattttaatgtcatcatgtcatgtgtgtgttatgttgaattttaaaatttaattttgatggtaggcacgaacacgacccgtagcttaaaaaattgataaaacacaaacataagtagcaaaattttcgtgtcgtcgtgtcgaacccataaaatatcgagtcgagttcatgtcaaactttcatattgtgacctaaattgcttccctactgtacgactcgacttatatttttcttgtataaatgttttgaagtcactgatgaacaatttttattttttttttaaaaaacatatattaaataaaaaataataacaaagttgtaaaaatttatctatattatatgctctttccaaaattgtatttaaaacttaattttttttaattattttgaggattaatgataatgtaattatttttcttaaaaatcttaggtattaaaataatttcttatttaaaacttaaatatttaacttattttatattaatatacattgttatctatgtgctaattacaaaattataaaaatagttatatgtttgattgataccgtaaataatctgtaggaggtattcaattttctttttcttcttttgttaaatagataatgatataaattataaaaagtaaatgaactaaaatatatttaattaaatattaaactagataaatgttatattaatataaatatagtaatgttttattttttctttttaaataaataataattaatgaagagtactttaaaatgaaatatatataatagtttttatataaaaaataattgaataatatttaattataaagtaaaaataaaactacactatttgaaaaatattagaaaaaaaataatgttttaatatatgtatactattagagcaagaagaaagagttggaagtagggtaaaagaacatagttctcatgcttttagggactgtatttcctgctgtcaactggaggatattaaaagcaatggcaaattttttatatggtgtaataatcagcaaggaggagatcgtatttactctaaactggacagggctatggctaatgcaagatgggtggattgcttccctagtgttgaagccatattcttaaatgaaggagcattcgatcactctccagctcttgttacttttcatcagttatcactcaatgagaaaagccttttcgatacttcaagatgtggagttcacacacagaatatgcaaacaggctacaaagaatttgacagcagaattatcatggtacaaagaagtaccaaattgttgccaaactcaaagacttaaaggttgtctttaagaagattaatcaagaaggctatactgatttacagtcagcaataaaccaagcaagaaatgctcttgataactgccaaaataagatgctcctggaaccttttaaccagctccagcaactcgaagaacttgaaaccatgaacactttcacacaagcgcataagaactatcaattatttcttcaccagaaagcgaaaactagctgaactagaaatgcggatgataacactgcaatatttcatactagcatcaaagctagaagcaaccaaaatagaatcctctccattgtagattctcaaggaactagagtagatgacccgaccaagatcactgaagtatttcttgcctattataaacagttgcttggtacaagaatgacgagtagaaggaaggtaacagcaaaagtacttaataatagacccacagttacaaggcagcaaagtgtatctcttttggctcctatttcaaatgaagagatcaaaaaagccatgtttgctattcctagaactaaagcaccaggtcctgatggctatctactccagttttttttccaagacaactaggatcttcttgggggtgacatatgtgaagcagtgagatcctttctttactctgggaagattcctaaggaaatcaattctactgctcttactatcattccaaaagtgagatgtccaaacacaccaagtgactttagaccaattgcatgatgcaatgtgatctataaagtagccattaaagttatttgctccagggtagatgtaacgtccccgcttgaagcgtccattgggtccttacacccatgaaatgaatggctcttatacacga

SEQ ID NO: 48889 - DNA, 1426 bp, Cannabis sativa
aacaaatttgggtttcttatgagaaataatctcttttaggaattgaaaagcccgttggttcccaagcccgcggcaattccagctcaatacattcataatgcacggcgggcctgagaaccagaacccgccccaataaagtttttttgaatgtcttccacaccaaagcccattacgacatccccctccatagacccactgctaccatcagtaatattatcctgaggcccattcgaagcctcttcctcatccccactataaaaaccttccataatagttttccttcttttcaaatcaaccacctgaatcttaggcaaagatgtattctgcattgattgtggattcaaatcaattacctttgactttccttgtatatcaccttctctcctagctggtagactaggagtattattaccatatacattaaccagctcattcgaaatccctcctaccatgattcccgccccctgacttttctccaagtcattactctgttgtcccccatcggagctttgaccactcggcccaccctgcttagagacaacgccggaccggagccattgagaacccatattgtaatgtcttcttctcggaaccgccttcagctcaaggctataaggttttttaatcaaatggggaggtgtatcaaacaaccgttcacaaaaccgctctgaatgacccaaaacgccgcaaataaaacaaaacgttgaaagatcctcgtatttgaatttgaccacacagaaagcaccgctctttttttccaatctcatactctgttctaatggtttatccactcgaattttgactctgatcctaaggtaatcccgccaaactccagagaaattattaggatcggatttaatatactgaccaatgtaattgccaacgtccccagccactctttcagacataaacccagaggtcatttcgtgtaattgaatccagtactccagacaacttaactcaatggatctcgggttttctcctggtttcactctttcaaggatcaatggggcacgatcaaaggtccaaggaatgccctctataacccgttcaatatcaacttcgtggtaaaattgaaaaaggaagtgatttggatgaagttctttaacatacatccctctgcccggttgccacaaagtagccatcttgtgttgcatagcctgaaaatcgactacccgctttgttaagaacctgcccactatacaccaccggtcatcaatctccgacagatcatcatcctcatcatcataaatcagcttgcccatctcctcctcctccatcatatcattccccagactttcctccattgcttcgaaattaatagagccaaaaacaacaaccaaaactagtgccaaagcataaaacgaacaaggcagaccaaacacacttacaaaaccaatcccactttcagaacgtaacaatgaga

SEQ ID NO: 48890 - DNA, 1376 bp, Cannabis sativa
tcaaacctaccgcatgatctgtttctgggacaaaagtcccaacaacacttcgtagggggacagttggcgaattaggctccaaattctcatgcctcttaaccttagtcacaaatagtggcagcaagttctccacactcatttttgccttcatatcttacttgactatctttcactaaaaccttcagcggtatcatattgtctatcatgtacatgtaacacacttctattttcagttcatatacaaaagggtctacttccaactcttcatataaaatttcatgcatcttctataaaatagtgtcagtctcaaacatcatcttactttttgggttattgaatatctagttgaaaccttcaattgcccaaacccaatcatacagtacaactacaaagacagttgaatctgcaaacaaaaatgaacaaaaaattaatttagatcacaaatatttcatgaaatatcgcacgcaacattgcaacatatcggcaactatatcgccaaacatcgctacttgttgttaaatgtcatttctgacttccccaaacactcttttctaaatatatcgataaatattgcaaataatgtcgataagcatcgccaaaatcatatacagacaacaaacgtataacatattataaaatacatcgctacacatcactacttgttgttaaaagtcattcctaacctttaatacactctcttgtcgttaaatatcgctatcagcatcgtagagtatcgtgaaatgtcatctctaaccttcaacacactcgcttattgctaacaaaattgctaaaaattattaaaacacaaagaaaaaaaaccagagaatgcaggatcactgaagttcgtttcaggaacaaaacaaccaaatcaaaataatgatatgtgtagatctattcatatcaaactaaatacaactaaatctaacaacaattactaaataaattacatactcattatttttggaagggattggtttctaaaagttgtagtttcaaggtggtccaactaactccaccgtcatgtaaggtggccgaacgacggtagctctggcaacgggtggtccaactggtagagtgtgggtgtggtgtgactttcctagagagagacgagagagaaggagggggagagatataaaaaaagtttatggttgaataaattgatgggttttaattttttgaggtattaaattgaaactttgcatgataaaaaaaaaagaaatagtataatttgaatccctaaacacaattaaagcatagattgttaaatttctcttttcaatagcctattgtgagtcctctaatactgtttaataatacatggttaataatttcttattaaagatatgtaaaattaaaaattgggtaaatactatttt

SEQ ID NO: 48891 - DNA, 1276 bp, Cannabis sativa
tattttgtaacgaccgcaaagtctaactgtttaattgtttaatgaatgtttttattttttttttataaaaaaaaaaaaaaagaatatttattttttattatgtaatatatttaagaaaaaataaataataacacgtgggtggcgcatgcgcatgcatagagtaaagccaagacctaaagagcatagcagcattggagccgtgtcaccaaacacccgcgccataggtcacggactcccattaattaactcttttgtatttttttgtacaacaacaccaccaaaaaaaatactttttaccaaactgcccacacatatatcatactgcaagacagctatgctagaaacccacttaatcaaatataaataaataagaggagttttaattataatttcttaatcaattttgaaattagatgtcgaaatatttttttttttacagtggcattcatcatagttacagtattatttttgtaaattcttttaaaattttgaataatttacagtactgaatatagagtttctgatattctagtttaccacgcgtgtttataaaacttcaaacgtattttcggcactgtaaactattcaaaaaatttcaaaaatttacagggataatgttgtaagtataatgaacacattcgtgaaaaaaaatgaaaaaattatttcgacgtgtatttttcaacgtagaagttgactaaaattgtaacaggaggttgacggtaacattcctcaataaataaatataagtgaaaaatgatgagtacaccttgcaaaattactatgtaattagagttgatcgtaatttagagtaattatacgattagatatttttgttatactaataattacactgtaattagaggagcttcaattacactctctaatttttatagcttattatttattttatcaaacaaaatattaaaaattcgtaattatcaccttatatttcaacaatatactccctatctattttagtagttaaaattaggagagaaccatttcatatactcctatctatttagaaagttataactacatacaaaaaattaattttctataataaagaatggacaagaagctcttgaattctttattttaataaaaaatataacaataataataaaattaagaagttttttttttttttttattttacgaaaatctctatagtaacttatatagcaaccaacaaaataacttaaatagcaactaaaatttacatagcaacttatataaaaactacggaacaatccaaactccaatttttttttaa

SEQ ID NO: 48892 - DNA, 1174 bp, Cannabis sativa
  modified_base (540)..(540): a, c, t, g, unknown or other
aattctataatttttattaaacattgaagtccatataatgtatgaataagcattgtaattaagtattataattcttattagtacttactatgatgtgatacttactttataaatagttattgattttttatgatcattattgaaaataaaataagtagtatttcatattaaattgtatcaatagtttatgatactttatagaaagtggtaggcaccatatagatgacattagtatttcattataaaaattaataatcgctctacctaaattttatttctggtttcccctctaccggcccactccatttaaatttcggggaaaaaaaattatctctatcctggttcccgtcccatttctagtttaagcgaggaattccctccgcaatagagaagagtgtacctgtggggcacatcccagcccaatggtagaatttccataccaaagtaggatgtggaaaaaattgtgaaaaactctcataaactatatccacaccacagtttcaagaagatataaattttaaccacttgaggctagctcangtggccataggtgggtgtgtgtcttggaggtcctaagttcgactcccaggtaaaacatgattgtaatatatcaacgcttaaatcaaaaaagaagatataaatttgaaatataatattacacactactacttctacttggtaaataataaatcaataagcttgataaagataaacaacccagattttgatccaacaaaaaaaaaaaagtagtttcagtacgtagtagatcttaacctataacaataataaatatgggaagggacccttatactggctagctagctagtccaatttgaggaatggtggccattaatttctgtgttattatattatgtatgaaaataggtggcagtagggtctatgttagtggtaatgggcaacgaagacacgtgagaatcacatgcaactctctgcatgtacccctccctaaacttttatcaacatggcccagctaagctccctcgacccacaccagtcaccatatggccatgagactatatatgtagtcagttctctcatggcccatatgggatgggaccatgcacctatatgtcatcaaaccttcccacaccaccatatagcgcccttgtgaagaagcaccactaaattttattgtcctaatatcttggggctg

SEQ ID NO: 48893 - DNA, 1435 bp, Cannabis sativa
  modified_base (26)..(29): a, c, t, g, unknown or other
  modified_base (1404)..(1409): a, c, t, g, unknown or other
tacatattattagtttattacacatnnnnaatctatatattatattattataaataatataacaatagttgcctaacaacacatgcattatataaatatatgttgttgtgcctgtattatcaacgccctgttgtgttttagtttctttacagttttctaatggttggccgaccatacttgaatttttaaaatttcaggaaacggaacaaattccattactgatatagttcaatggacaaattgatcaagaaataaattatgtgaattgtaaagctagtggcaaattcatctcaagagattaaaaatatgaagaacatgtacacaagttgaaacaactactagaatgcaaccaagaaaacactcaactggaactgaaataccaagtgaaagaaggttaccaaccgttgagaataaagaacgatccaagcctattctttattgataccaaaatgacacgttttacatttatcaactcgcaagcgcacgagtctttattgtagtgtagagattgtgaagaacgaagtcgaacccatggaaattgcgtgaaattgaagaaaaaactttttaatctaaattattaaaattctaacatagtcccaaaaatagtaaggtttttggtaacaaaataaaataaagtgtttaatggtaaaaatgacagtaacaaatatttttaatgatagttgggggaattattaaggtttcagaatctacttaagtgtatataaaaatatttatgtttatattagttctcataatttaattagtaatcaaactaattatttttttaacaaaaaaaagattttccttcgctttaaaaatataacttcttaccattaagtgtgaaataatttaatgtaaatacagaaaattaaagaatattattttttaataaaatgtagaacaaagcattaataatttctaactataaaaaatacatgatattaaagatgaaataatttatttaaagaagaaaaaatcataagcacaagtatatattatactgagaatcaaaataaaaataaatatttaattaaatacactaggtttcatcgtccatcttaataataagagagctcaaaaacccattaaaaaattaattaagaaaagcggtatactaacactgagcgcttagatagttttctctggatcttttcgtttgaaagtgtactaaattttgaaaaaccagtagacacgtgtcatgagatgggacctctgggcagccacacaccgtgcatgtctctagcaaggtagatttcctcaggtgcattactttccaggaaatacttggttggattgtcaacatgctggccatgagaaacaagaccaacatactgtgcaaaagtattagaatatattttaccaggatctagatttactaataagtatgtgttgggttttatgccnnnnnnaaaactctatttcaatgtaatccaga

SEQ ID NO: 48894 - DNA, 745 bp, Cannabis sativa
tggtttgacaaagcatgccttttggttaaacgatgagatatccatgttcaatgaagttcctgcgctattttgtggatgtgtgcatcgtaaattcataagtgattttatcactacgtcaaaaaaatatgtaccattttaaaatacataatactatattagtattttcaacaaaacttgtatgtaaataaaaatacatggtactaaataagtacagtactgtacacgctctttaatcttaaaagttatatttagataagtgagttagaattttttatcactcataaaatatgcaataacaagatttaattttatagataaacatatttcatataattataagtgtataaccatacatctaaagaatacattgctgatttaaagagaagaactcaaatagcgaaaacgtaccttaattcataaatagtaatgattttaatccatcttgtagagatgatctttgtgctaattgtagataatgatattccaagaaaacaatacttaggattttctaattttctctcttgatggagggagatgaaaatagaattagctcttatttcttgggggccactattattatataatctcatagctaggttattaattttaagtatttctaatttagcccattaataaattaaaaatattccttaaggtatctgaacatttagctcataaatcctttagtactcaatgacccacaattattaaaatgatcacattatttgggttaaacttcaaatag

SEQ ID NO: 48895 - DNA, 1442 bp, Cannabis sativa
atgagaggttattatgatcattttatttaattatttttttgtaggatcatcatcatctacattaattatttggactgatgctattgtttcaatgtatatgacaattattgatatgatttaataaatatataaaaaaaaaattattaattaattaattagattaatagtcattgtaaacaaagaaaccatggtaattaatctgttattgtcacctaaagctagattcaaaaactaaaggtgagaaattgattgactacttctttttctcatgtatatacatagcttataataatatttttaataagataaaataataaataattaataataaaactacatagatatatattacaaaaatataaaataatattatttttatataaaaatatttacaacgaaacttctttaacatttataattattatacatatagccttaataaaaaaaatagtaacaaaaatactttatcttacaattttagtgcaatcttacttttttttagtttttaagtgtcaattaaactcattaaatgtcagtttaaaaacacgcgacgatatacttttttaaattatttaatacgtggtctaataatatgttattacatgtttttaattaacacttaacaaaaatacaactgtaacaaaatcgtaacataatatacttttactgttatttttttcaaataaaattatacgtacaatgttaaaaaaatttcaccacaaatatcttttttatatatttagttagaaaagtttatagtgggaattttagatagagataaagatgtttttcaaaattaatataaatataaaatgttaatttgtcacattttttcccaccaaattgtcactgtaactgcagttaccccattaaattaagaaagtgatgttttactacttttcacgagcttccacacttacacacttttaaatattaattcaacattttctttatttatttatatattgtaaaaaataattctattttttttttaaaaaaaaaaaataataataacttcattaaaacctccaaagcatctctcaaaaaaaaaaaaaaaaaaaaaccctccaaagtagactcattacatatattaataaacattttaaagctatatatgtacacttaataatcttacattattacattaactcagtacatattaatgtggaatttgtgtgtttttataatatatttattagttattaattattattaatttgataaaaactaaactttttttttttctttggaaaagcaataaataggttaggggaccccaaagaaaaaaaaatatgtagcattatttactatacttattatattatatatcaactaccatatatataaagtataaaatatagatatatcaataagatgattattcaaatatatacttaataaaagaaaaattactctaaatactgttttttttttattttttt

SEQ ID NO: 48896 - DNA, 1794 bp, Cannabis sativa
tctctctctctctctctcataccacaagagaaaaactcacaaacccatcaccgatgtagctctagcaaccattcttcggccaccgtctggccccacgcgctagaccatttgaatccccaagtgtcggtgaccttaaccccaagcggtgtcgccactttcaacatcgttagtccaagatcacaagctaaagtttagagattaaaattttgaacgaaatttttggccaccttcggtgttcgtttgacgagtcatcttcacactaggctcagcttatcgagaagaataacctacactaagccatttcgcctagcccactactttttctagtgaagtttttgtagctccggccctttctagtaacttttcggtgatattgtgcactgctccgacaaacagtttgcatggatgtgatttactcgtcgaggtggtcaatttgatatatatactacccctattttcgataacatttccgatacaacaatttctaccaccactggtagttaatgtgcaccgcttaggtgaggtttcaaaactctaaactttaaatatagtcatgttatatgtcgttaaactcggttttaaaagtagattattgcaataatgaacattatttagctaattgattgtattggtgagagtgatatttaagattggactaaacaattagagctcgggacttgagagcttaagatggtctttgggataaagtttaacgaattgggagaggtagggactcaaattgattattggacttaatttttatatgcattgaataacattagagatattctaatttttatgatttgcaaatatatttgaataattaaaaacttaacttgcacatttttttgaactgttctacggtactaagtgtgatgtgtgtcgtatgtcgtatcaaatttactgtttttttaattccaatacctccaattattttagtataattgtaactaagggtcgattccacgagggctatgtttattcaattattcacaaattataacaagaattagaaaaggggagtttgatgattaaaataaaatagcaataataaaaataaaataaaaaataaatttgaaatgagagtatgatatgagaaactagttaaaggttattctccacccttgaaaatcattcctaattcctatagatgaatctaatttaaatttccaaacgaactattaatcctatagataacgctgaagtagtcaattatcccaatctcgctactgtatgtaatcagggcgaagcactcaataattaactcttttgcctaagcagtaaatccacgaagcatgcaatttatttaacttagagaaatctttgagttttatggagatagactaatctaggcaacaaatcaatgaaagatataattcatttgacctaggttctattcttcatcacaattaaaattgcaatttgtcacaaacacttagaatcctagactattaggtgaatagtaatcctaagatgatggtagattaaagtaaaatttaatttagcggccgtctaaagaagattaaaataataatcataacattggcatagaataatagaagcgatttgatatgacggaaactagaaattaacattcaataatgaaattaattaagaatttatgttttgggttttaaaataatccttaactaaaagaaaactactcagaattagacattataatcaaaattatagtatttagtaaaagtagaaggagaagaaaagaactagaatgaagaacactttgaaaccgatctccatctcttctttgcgctctctctctctctctctctc

SEQ ID NO: 48897 - DNA, 3109 bp, Cannabis sativa
taaataaatttataacataaatgtatatattttattgagatgtaattatttttatatagaggtatacattattaatacgagatttaaaaaatgtatatataattacaatttagaggttattcttatttatatttgactcaaattgggacttttttttttttttttttataataaattagaaattatttttgaatagagtaatcttaaatagaaattctaatgtatattgtgcacacataacacaacaatgataataacatgataaattaaggtacgagaccaatgggttcttcgaccaaactactctcccaggcaatgtaggaatctgtggtaagcaaaccatacctcgcagtgccgcgactgcgttcacttccactgtcgatgatgtcttatcaactcttcaagccgcgacgcccaagattaatgggtttttcgcggcggaaaagaggcaagtgcccgtgagcgtagcagggggcagaaacttgacggtttatggcgtggcgcaatgcgcgcagacagtgagtagaagtggctgccttgattgcctgaaagtggcctatgtcaacctccaaaattgccttcctgactcggacggtagggcggtcgatgccggatgttttcttaggtactcaaatacttcattctttgctgatgatcagacaaccaatctagctcctttcttgaatggttagttatttattttcttaattaattagctaatgttttgtttattttaattattaataattaataaaacaataatgacaaatatatagtggatcaaagtgatcaatataattaacactctgtcaagttctgtcaatctcaatcttgagaaatcagttaaggctaaagctatatatagacataagtccccaacggaattaacaaactcaagatataagtcagctgccatgcgaacttaagtcttaagtggctttttttaaaaaaacataattcattaaaataaatccactattaccaaagaactcaaaaattatggacaagcatctgtccaaacacattctcttaaactagtaacaaatgttgccagtgtgtgggcagcaccattcgccaaatgcggaatggcattacaagaaccatcaccaataaaagctaataaaaaataaatatctaataaaatagattgaaaactaaaattagtatgaagcttattaatccaatcaattgccttaatagaatcattattaatatggataaactaaaatcaaattgatgtgcaagagtcaaacttagacgaatggtaagcatcttcgccacattaatagaaaaattacctaacacacctgatgaccacgccaaccaaaccacctctgctgcatcccgtatcactcctcccagtccgacaaagccccttccccaaaccacgaacgcatcagtcgctagagcaaaggattcaggaggaggtgacaaccattgagtaggtcgctttacacctgggtttgcaaggctcattcccaaataaaggtctcgccgaccatacttcttaaactctgatagatggttatgggctaaatctagaacaacatccaatcttgactgcttgttgccaaataatactgagtttctatcataccataaccaccaaagggttgtcatcatcaattcaaaagtctcacgggatagcctgtcatagagaaataggagatttcttgcatttgtccatatacacatcgacggagcaccgaacacaccctcaaccgatgccacactggaaacaagccagaacacaaaaatagggcatgctccagagtttcagattcttctccgcatcgtgaacaacaaagaggtacatgaactttctgagagataagttgtgttgctactggtaacgccaaatggaacatgcggcaaacaaaaattgtcacttttggtggcatattaagattccataatccattctacaaacaagttaactgggataaatctcccactccctcctcaacctgaagtaaccacgccaataagtagctactttgacatttcaaatgaattatacttttcgtttcaaatgggatggatttcacttattccacccttattccactcatcgcccatctttagataatgagtgttgttcttagacaccaacaaagtgatgtctttaaatttaaatgtttatttgtttttctttttttttttgagtaattattgaattaaatatgtaatagaaattcgatatttaattattgagaaatgtgaattaccataatttattgagaaattctaaaaggcatatgcgtgtctaacacatttttcggtcatattagttttgatataattaagtattgagtcttatataacttaaggtaataacttttagagaatatcaccaaccaaattatgaacttaactcatactatcctatggacaagtctctactttacactttggctaatttcgatgaatcctcaagctcactcactgctcctgtttcgacccgtcttgcacttacaccctctcctacgtgtagaaattgacttcaaataagttagacttcctttatgagttttcttatgttcccgatgaaaataaaattactttagattctcttcttctcttaaatccatatcaacctttcactaagattccttccacctttactagatccattaaagcacttattaaaccatccttcagagctccaaaagaatatattcaagcctccaaattcagccagtgccaacttgcaccaacaccagaagtccaatttgtgactcttaaaattccacctaaactccctccataatggatggcacaagattatacccacatccactttagtgctattcgccttgttctaaattatcatggcaggaaaggacttccagttagcgctcatattggtcttcttgatactcgaatgagaacatatcaatatgcaagtgtagctactattgaaactactttaaatgcaggaacagtggtcgtcactctatttcctaatttcaacatgtctctcatagataattggctgactgatgcttttaaagtagaagtgcaacaataagagtagaccaaggcccaacttctcttggcgacacactccattatcagatgccacatcgactccaaaatcatgctcttg

SEQ ID NO: 48898 - DNA, 2518 bp, Cannabis sativa
gacatctctgatgataatggacttcttgtagccaagttctaaataccacaatttataccccttaactccatctagatagcctagaaacaagcacttaagtactctaggctgaagattgtcctacctaatatgagcataggcagtgcatccaaacactctcaggtgttcaagcttacatacttgagttgttcacaactcttgtggagccttgaagttcaatgggacagaaggacatctattcaccaaataacaagttgtctagacagcttcccccaaaattttcttttaagacctgctcctttgagcttacacctcactctctctatgatagttctattcatcatctcagaaagtccattttgttgaggtgtgtcttgtagagttaaattcatagctattccatgatctttgcaaaattcatcaaactggtttgagcaatattcccaacttctcaacttcctaatcttgcatctggtctgattttcaatcagctttttccatgtaacaaatgtgttaaaagcctcatccttccttttcaacataaacacccacactttccttgaataatcatctataatactgataaaatagttaacaccacccaaggtcttaactttggaaagaccctagagatctgaatatatatataggtcgatctatccttagtagtatgcacacaagtgctgaatttgattctactactcttcccatatacacattccttataaaatttcaatttccctttcagtcaaccttgaaacaagccttgcttgtccatttcagtaagtcctctttcactaacatgtcgaagcgtcaaattccaagtcttgatgttttcaacatcatccttaccaagtgcaggagttacttctccaatcgttgtattctcaactagatactacaacccgtttctcaactccccgctaacaaagatcaaagacccctttgaaatattgagtgtcccattgtcaattctaactgaatatccatcattatcaaacatgctaattgatataagatttctcttcaaatcgggaacatacctgacttgtttgatcgttcgagtgacaccatcatgtagcatcaaatcaatggagctaattccatgaatctaggaagccttgttgtctcccaacagtactattccacctggtttttcaatgtagttgttgaacaagttcttgtttggtgtcatgtgaaatgagcaccatgagtccaaggtccattctccacctgattttgaactaagtgcaactaaaacccctgcaaattcatatccacttgattttaaattagatgcaactataacccctgcaaattcatgtacacttgcaatatcagcttctccttgattcttgtacttattcttcccttaattgttgtctctcttcaacttagccttcaatgacatacattcatctcaaaagtgttcatcttttctgcaataataacacttctttccagttggtgtttttgaatttgaccttagcttgcacccattcttgggtttcttgaattctttcttctctgttcttccacgaacaaacaaaccatcaccacttgattcatgtctttcatcaactttcttttgaattaccttctgattcaaggttgctttaacttcagacatagttagtgtatttttcccataaaatatggtatcgacaaagtgtttatataccttagagtgaacaaattagaagtatagcttgatcttcttcttcaattctgaccccaaaattatttaggttcagaattaaattgttaaattgtatagatgcctttgaagctctttagttttatccatcttcatcgtgtaaaaaactttcttcaaatagagcttattggacgaaaatttcatcatgtaaatcgatccaagattgttccataatcccaaagcagagtcttcatcgacaacttctctaaggaattcatctcctaaactaaaaataatagcactatttcctttaatatcaattttttgataaatcttcttcacatcttcatcttccttagaatcagtagcctaaatcgcatctacaagtccttgatgcgaaatgagcactttcatcttaatcctccataacccaaagtcattcagacatgtgaacttgtctacttcatatctagcagtagccattcttgatgagttcttaaatcttgatgagtttttgaaactccaaaacttaattcttgaatccttgatctaatcgtatagctctgataccatttgcggtaaattaacacttatgaagaatcaaataaacaagaactaaagtactagaatggttgaatcaaacaatgacatcaaccaaaaaaataaatgcaaaaaaacttaatgaaatagggacaagatttaacgaggttcatcactctttttgtggtgactaatcctttggaggaactgccctttggccaagctttatttgatcttcaacaatataggaatgcagaggagaatgcagagttcaatctcatcatcaagggtgtctcgtaccttaccaatcaactcacttga

SEQ ID NO: 48899 - DNA, 1057 bp, Cannabis sativa
aactgtttttcgtttgatgatcttagtttgttgtttgttcttgtaaccatttgtactttattcttgttgttgaacgaacgacataaatggatacaaacgacaattaagttccagaaaatctgttcatataattcgcaattcgtggtttcaaatcctaactaatccggaccaaataatttgagaccgcacaaaatgaattcggtgtcaataatttggtcaatccagactgtttataatatttggttcggtcatggttttaaaatttttgctcgtgatttaaatggaaccaaattcaacagcttaattcttaatatatactataatatgattttttttaattgaatattgatatttaaaaataatcttaagtataacattacttattatcttaatattatgttaaagaatatttacattgtcatttatttattgtaagttttaaagtaaaaataattaaattaaaaatattaaaatatttacgaattacaaactagaaattacagttttaaaccaaatcaattcgttcttaagtagattagtttgagtatttaattagtttggttcagttttgaatttttaaaaacctgcaatattactagtttggttcaaaaaaataaaatttcggaccaaaccaaacaataaacacaccttattagaataataagacagcttgggtgtattttcattgtgagaagaaagcaagcaaaaggtttaaaaagggcagtaaagctttacaaagttgttgtgacaaaaacgacacgtcgtttaaaagcaaaggttaaatgacagcaagttgtttataacataaaacgacatatgattcacatgaagttgctttccaaattccaatttccaacatatttggttttggtgtggtctagtgttgatgctgacttcatctccagatttatattttcgatggaatattcttattctatattctattttatttatttttggaagtaatttattccgatcaaaccaaaaacataaaataaaaataaaaaataaattcaatgaagaaagaaagatcctggtcacaaagtgcgtcacgttt

SEQ ID NO: 48900 - DNA, 1612 bp, Cannabis sativa
ttgtcatttaacaaaacacaaagttcaattaataacttttataaaatagagggtccaaaatagtatttacctaaggataatatatacactgtcatttatataaaaagaagttgtcaaaattttttcaaattctcgaaataaaaacatatgaatataggagcaaagtaacactcttttgctatatctctctatatatatttttggatgtcatccttctcagctgcttatttcataactgcttaaattgctgccacctgtcccactgagttgctctctctatatatataagtatgaacatgtcctctttatcacttacttctactatagaaaaaaaaaattcttaatgagccacgtgtaagacttcagctttgttgtcatttacttacaaaaaaaaaaaattaagattgaaaattatgtgtctattttttgatttttttattattttttttttgtctaacttgcaagtaacatgatttttataaaagcaagcatacattaaaaattttgcagaaggtgtcatttcgtatacacacttattttcagccctaactctaatgaataatgtattagaggtattataatcacacatctttatttttttcttctgctgtctttgcttttgatttaaattaattctgttcttattttaaaattacaaatatactactcagagagacaatcacaacatctgaagttgcaatcctgtgggagaaagtgaagaatatacaatttatctcaaatgttcaaaatctataaaaaattataataataaagtcaaatacaaatatactaaaatcatatttataaaaatactaaatataacaagaagcatggacaacattttcacctctgtctatgtaaatagagtgtgtacttaaatgtcacattttaccatcccaaaaaaatctctgtatttgaagataatattccacttttgcaaaaaacctatatatatatatatatatagctaaacatatataatctttaaaggttgacatctcaagagaactttgcttacagaatacaacaagtacaaattaagttcatttcttccaatttttgtcgttccataatatatatgcttgcacttttgaatatatatatacacttatgtactttctgtttcataatgtataaattatattttcaatgtcaagtatttcttctcatttaatgtcttatctccacttttaattttaattaattgtcattttgatatcaatcccaatcgtaataaccaggatatgacgttaaagcttaattaattagcccatgacatgacactttggtttttaatcaatattaatatattgggtcttaaaatttaatccatcataagaataaaaatatttttgaggactttatttaaaaaataatataatatttttcaaaattagttttttttttaataataataaaaaaaagtcggacctgaataacatgaatacatataatggatatacgtgtcactttctaaaaccaacgattattaatattcatgaataaaaattcattaacagctaatttaaatatattctcgactaaatacaaatcaaatgtcatttttgataagcattgatgaaaagcaaatcagtaaaaaatctaatggctt

SEQ ID NO: 48901 - DNA, 1181 bp, Cannabis sativa
  modified_base (398)..(409): a, c, t, g, unknown or other
ttttggataatatagggttcattttgttattcaatagaccagatggttcaatcggtaacttttgtaaaatacagagttcaaaataggattaaccccatataaatatagtgtgattctacaatgtacttttttaaaaagagatatactgatgcaccgtctatttgtttcggcatccaaaagaatttcttattctatttttttttatatccgtatacattatagttatataaaacatcctgtaaaatcatgagaaattaagaaaaatttacaatgtaaaaagcaatgttcaaacaatttatttcacatgcatataaaataaaataattatacacgtgtaacatatagtctgtttgacttctattttcgatatgttaatttttttttaattttttaaaatnnnnnnnnnnnncttaaataactataatatatacgactataaaaaaaattaaactaaataattatttcgaatacagaaacaataagagtacaatatttttccaaaaatatatcattatcatctttttttttttttggcaattggagtgtggagtttgcttctttatgacaactataactacctagctccaccatcaacatctaaatgaaatgttaatgtttggtgaaataatagaatgtgtacaaaaaaacaaacaaaccccacacttataattattaactcattccatttggttgctaagttcagcaaaacattattttcaatataagctaataagcctatagcctatatatatctcaatcgttgaacaaatgtgtcttttttttaggttaatttatctttcattttcattacattttccccataatatattttctaatatagtcctagtaaaaaaataaaagattataaatttgtggtataaattaattaatgtctaaatttaatttttagttaaagataaatttaagttttatttttaacagtgataatacttaagtgttaagtcaatgactacgtattaattcatgatttgttcagatcattaaatttttattttgtatttaaatataccaataataaaataatatataaatagtaactttaacacttaacgattagatataattaggtattattactgtaaaaaaataaacttagatatttatctacaaacgagaattaaacttaagtatttacatcgcaaattattactcaaaataaa

SEQ ID NO: 48902 - DNA, 878 bp, Cannabis sativa
ctcatcatgggatgagatctttgaccttcacgaaggccatctttcttccttgccgccataaatataagataaaagggctctttgagaagtggaataatttgatagccaaagattaataggattcgtaagagcaaagagggaggaaatgggggctgaagaggatctaagtgattagagaagtaattaatgtagtcagaagggaaagaaaaaacaaaaaaagaaggatttggtggatcaaaagcattgaagacacatttaatgctctgaggataatgatgatagtatttgattaggagctcggggcaccagaaaccaccacacaactccggtgggtggaccaaaaacccatttcgggtaccagaaagggaaacacacacagggtacttgacactatatataaatttaagtattatagttgcccttagaacatcctaaattattattattattattattattattatttatctcaatgttttttttttcattatttatatatacatgattgtgaatattattattatttaaaatatctttaagaaatttaaaataatttgtaatgcataaaataaagtttaaatagtctatttcctgtacaaaataaaaaaaatacatgtgcaacaaatctattaaatcttatttttggtacgttaaattattaaatttttaaaaaatttgaaggatgttgatatatactattatataaacatttaatattaaaactataagtgcatattgaaaacaagaaagtggtgcattaatacacctatttttaggagtgcaggtgtgattggtttaggatttaaaaaatattttatgtttttgaaaattaaaatggtgagggtccacctaaaaattcttgattggttgagtgtttt

SEQ ID NO: 48903 - DNA, 996 bp, Cannabis sativa
tctatttataaagttttaacaataggaaaaaataatcttattaaagttttaatatcataacatatatatttgtttctaaaaaaatataatatatacatatattacatatatttattaaaaaaagaataaaaatcatattatgaaaattaataattatgtaatacatagtgcggtgcattttgaactgcaattattaaattcgacaccacaaatcgtaccgtacggtatgaaaaaaatacaaactgtaactgcaccgcaaaaaatttcaaactatatctttttaatacgttgtggtcaatgcaaatagtttgtagagtgtgaacggtttgataacattaattcattatttttaggctaaatgattgtctaaggagtaaaaattatgtttgtttatttaaggggcaccttaaataggtggtaagccatctggccagggaaatgataggtggatttggacgttggaaagtaatggtcaattttcttgtaagtcggcctaccttgcccaagcagcagatagggcccctcattgtgatgttgctcctacactttggaataaactttagagatgcaaaatttcagaaagattgaagaccctgtggtggtgtattttctccaaggcaatcccggtgcatgctgagataaatagaaggttccctattgaggatgtgaattgccccctctgtgggacagaggaagagtctattgagcacttgtttctatcatgtactgtggcctatcacctgtggaggtcttctccgtggggtatttaccatgtctgtgacaatgacatccgtatgtgggactcggttaaatttatatgggatcttaaaaataaaggcatcaatgcggatgaggtcttcctatatgcatcacttacggcagatgttatctggtggatacgtaatgacaaggtccataataatagtctgattgatgtatttaaatgtattaacaatgttcgctcttcttttgcagtttatcatacctctttctttc

SEQ ID NO: 48904 - DNA, 1558 bp, Cannabis sativa
aactgaaattttaggagcaaaatttcttaaatttcaattctgtcttggtctctactttttcgttcactttgctctgttaagtgctaaagtgaattgttactgtgtacacaagtatatttatttaaaatattaaggttcaaactatttaaactctgtattgtaaattatgatgaattttttaaatattgagattacaactgttcacatatcaaaaacacgaatgtggaccgtaaaagcacccaactttttaattttctttaattaaattatctctttttgagcttgattaatgataattaattgatattacagattccttgtgttgcctcaactggtggacttgttgacactgtcaaggaaggctttactggtttccaaatgggatctttcaatgttgaagtaagttcttaattatgattttaaaatcatttgatttatatctaaaatagctgaaatagcataattaagataaatacagctcaaactaatatgttatattaaatattttattttaattaagttattaataagactaattaccgatattttgctaacataagagttgttaagagtaaaattcaagaaaaagtgttgattgtatttttttcagtgtgagaaaattgatccaattgatgtgagtgctgtggctaaaacaatcaagagagctctaacaacatatggtactcctcttatgaaagagatgatccaaaattgcatggcacaagatctttcatggaaggttagtactactagtacattaattacaaggcaaattctaagttaagacgggctaagcctgcatctaagactcatctatcttacagatctaaataaaaaaatatatcttaaaaattatatatattttaaataatttttataataagtctatatacatgtatttaagactttgttaaatggatgatgttattataatagggacctgcaaagcaatgggaaaagttgttgctgagtttggaagttgctggaagtgaacctggaattgatggtgaagaaattgctcctatggccaaagagaatctccctacaccctaatcaacctaaaccatatcatattataagttaattattaagtgttttgttttgcaactatagtttagtactagtaatagtatttatattagccaagtactatgattatttagaattatatatagctcaataggacaatgttctccaataagattaattattacattatcaactctcaagagggttttgtttaattttgtttttcttttcacttctttctgccctgtttttttatgagatcagtattatgtgatgtaagtaaataataaaaattcttctaaataaaatttgtctttccaaatttctctccacaaatttggtctttaattagggtagtgtggctgagaatgttgcccatcaccctcaaaataataaaaaaaatttacttttagttagaataaaatttgttattagttataaattatcattaatgtgttgtgactaaaagtttcgttgctaaatatattagtcacaaaatcataatttgttataactaaatgtgttttta

SEQ ID NO: 48905 - DNA, 1177 bp, Cannabis sativa
ttgtctttggaaaaaacaaaagaatgggactccctcaccacatatggggtttcaagatttttttcattaatctaaaaattattgtaatttttcttgtttcatcatcttcttcttcattgcacccgttgattgcaaaatcaaaagaagaacaccgtaatttcactgccatatcgaattttcgaattgtaaatcgaagatttctgagtgattgtccagatttaagcccttaccaaaaaattaatgtgagttcatcaaatgttaagcttggagacgaagaatatgttagtgtgactattagtggtgttatggttccttctcaaaatgattgggtgggcatgatatccccttctcatgttgagtaagatatattaattaataataataataatatacaatatatgtaatattctaaatttattagctaccaaggatacttttagttggaaaaaataaaaaataaattaataaaaatagaagaatatgcataaataagttattatttttttcttcttgcattagaatgctccacaaaatttaatttaaccctagaaatataaaaatgctttatttaatataaaattaattaattgtttaatgataaattaattgcagtgtgaatgcatgtcctacaagtataaaatattatgtacagactggtgacatttttactgaccttccccttctttgccattatcctgtcaaggtaattattattattaatataaactctcaacattttttaaaaacttactcttgtatgtaaatatttatatccatgttatatcatgtttcataactattatttttaaaaaaattattaatcattcaagaagcatcatctagtaatgttataaggtatcattatcaacaagaaatttacatgcacttaaattttattcttttaaaaaaatatttttacaattctttatttttttttttacatttttactaaaaaacaacctccgtatttttgtaaaaaaaaaaaactaaaatctatatataaaaaaaaaattaaatatgtaaaatatgtataattttttttttgctatttttgaatatttatgaaataattcctaccaaaaacaaactcacaataataaatcgtgaagaattttttttcaaaaaataacaaaactttattgacttgttataatacttaactttttaaaaatgtata

SEQ ID NO: 48906 - DNA, 2308 bp, Cannabis sativa
  modified_base (1474)..(1481): a, c, t, g, unknown or other
gtatcacatactcgtaagtatgttgaaagactaagagaaataagcaaagtgcgacttatctcaaaattcctaaagactagctcaagaattgtcgtaaaagacagtagcaagaataaacatcttaactagcatctcgcgaaatatgaccaactattcctgaacacgttaaagaatgtgagccaaagttagaatatgttagatcgacaacgacaaattacttcatgataagaacaaaaaataattatcaacaattattttattttatcatgttgtaaatataaaatgtgatgattgtctatattttatgaacaatcacttaaataagattaaaagagaatgactggcattcctaaaactcctataaataatagggacaaaacctatgggctttctgtagtccctcgccgcagccaccaaaagtctcgccacgacgacaacacttttttatttcctgcttcgatctctcttagttaaatatgtataattttcacatacaaactctaaatgagttgattcaagatgtgttagaaagctgaaaaagaaatctaaaatttttaacgttttgactttttctaaaatctacttttcatcaaaacctatcacacacgtacatatataaatttgatgttttttagggagaattattatagaactatatagaaggaaaatttgaagtaaagaagtagaggttgattgtattcaacaaagacggcattgtgcatattattaattacctctcgatcgagtagcccaagttgttgaaaaattcaattctatgtcaaaacgattaattaattgcaaaaccaaacaacccaatgtatataaatgaaatataatatcatatacttaccatatctatttatttgtatcaattagtctttataattaaatgtaaaagaaaacataaataaaaaacttaccaagaaaataggggtattcattagatcacatccaacagattctgaccttaccaatccaatccaattatttattagatattaaattttgtcatccgatccaatccaatcaaaccaagtcattcgatctgatctatgtattgaattagatcagttctaaccattggatacattgactgattttatattaaattgaattggatccatccaacccattttaactaccatttaagttgatttaactaaaatatatatatataaaaatatagtttaaaatttaataatccaacatacataataaatattagttaagttcaacttaattctcatgatctcataataaaaccactaaaaaataaaatttattcaatacgcattgataattttattagtgtttaggaagataagaattaatattttaaatctaaagtttttgttctttaatctcatgtgtcaaatgtatattaaataaattaatatatatttttaaataaaatatataaattaatatatatttttaaataaaatatataaattaatatatatttttaaataannnnnnnnaaatatataaaattataaatataattgaatgaccgttggatgataattggatcggatgtcccatccaacaatcgatctcatccgattagattttaaaaatttacattcccaatctaattcaattatgattggatatccaattcaattgaattagatgggattaaatcgagcgattgtaattggccattaaatgactttctacacactcctccaacaaaatacatatagattgctagagcacatacttattgtaataataaaactagttgcatgcaaattttagttgagaagtattctcatatgtatttgaaaaatagttaattactaaatctattaattattaaataaattattctttatcatatgtattaaatctatataaaaaatatattgaaaaaaaaatttgttgactactagacaatatatattataagcatctggaatggtgtattattttactatattagtgtggaatcttcacactatttcactctaataacacactaaattataatgaaatttgaaaaatattctcgcactataaaaaatcttacttttatcacaataaaatttgtgactaaaagtaaaatgttgtgactatttataaaacataattttttatgttgtgactaaaatgtgtgtggctaatgtattagtcacaaaaattataatttatcgtgactaacttgttgtgactaaaattaaattagtagtaacctatatttaaatactatacgttagtaacaacttgtatctaaatattatattttaataacaacttgtatataaaattaatttattggcaggtgcagtatttattaattttt

SEQ ID NO: 48907 - DNA, 726 bp, Cannabis sativa
  modified_base (664)..(685): a, c, t, g, unknown or other
caattctatccccaaaattaaagatagagttgaagtcccctaatagaacccaaggcttgactgagtgtttcaaaatagataggttagaccataaagttttcctttcttcaatgttattaaatccatacacgaaagtagcacaaaaagcatgttggagacctgccattttaacaaaccagtgcaccaactgaggtgtttcagcaataacaatcactttcacatactgtctcctccacaaaatcaaaatcctgccttcaatggtgggacttgaaaagtaatcccaattcaaaaatttattatccatcatatttcgcatcttctcacccctaagctttgtctcaacaagagcaacaattcctattttattcttactgcaaaaatcaacaacagagtcttgcttttccattttattaattcctctaacgttccaactagcaacactgcaattctccattaagattaataacattagggtcaatattctcctttgagacctccttcattaatctagatggctcctgtaatgcactaaacgagttcccagtaaaagcaatattatcctgttttatgtttgatatttggctctgctttttttgtaactaaagaccttctaggagtctgccaactatcatccacattagtaataaagatcagaaataacatnnnnnnnnnnnnnnnnnnnnnnatttatttcatgattatatctataatgtatgaattctattt

SEQ ID NO: 48908 - DNA, 778 bp, Cannabis sativa
tttttttttcttttcctttaaaaattcttagttttggttgagagagtgaatgaataagaacagttttagcttttttattttgtatgggaggtgacaacacccctctcttctaatctatacgtttctttaaagcgatgaggtgtctgtctcttggggctttaggactttttgggtggtgaatgaattgagaatcagagacaccaaatgctatgctaagctctctctctctctccatttttattcatacaatttttcgttttaatttacatttaatttttctatgactgatttatctctaacaacctatggttcaacgagaaatgagggtgaaaaagtgggagattcacattagtttaaatcaccctttaatacatagtttatatcaaattacattattaattttggcaagtactattatgttaggttctcttttattatatcaaacagtctcattttctttttttttttaggacaatttttttcaactataacaagccaataatgaagtgtaataataacctttgtaattaaaacacataaataatatatatataaatagttagttagtcagttagagtgagtgaggcagcagaataataaaaatatgggtcaaattataatgagtatatttgtaatgttgtgggaaacaaacatgaatatacaagttgcaaaagggtctaaaatttcaacttgggagaatggtaatgactaatgagtgactgaacctggttggttttactagctgtgatttaacaaattatgaaattaataataataa

SEQ ID NO: 48909 - DNA, 3181 bp, Cannabis sativa
  modified_base (226)..(228): a, c, t, g, unknown or other
  modified_base (2223)..(2227): a, c, t, g, unknown or other
aaaattatatattttcactaattttaatgaataagtttttgataaaaaaaaaattataaataaatgtgtgataattctttcatttgtactcttattaaatttaaaatatattaataaaatcaaaattaaaaaaacgataaaaaaaaaaatctcatctgcatgggattatttatcctaccctgctggatgggataaataggataaataatcccagacagatgagatnnnctggattaattatccagacttctgccaagtccaaacactggattggacaaattagcctatctaatccaatctagtcctgcgtaccaaacgagccatttatgatatatttaatcaaaaatttactttataggaaagtaaaaggttattatctatcttaattaaatttgtaataacactataaaattgaatcctcataactccctgtagggtaaattaagagaatttaacttcacatattatcctaattaataaataacataaaattcttaggggtaaaattattacacctatataattaattacatgttatgtccattagagtgaattttaattaatataaaattttaaataattaaaggtattatggctactccctaattatataaaattatatttttacaatgatattagttattgggctctatctaatttttttttattattatttacataatagacaatcactaaaattagcgatcctagtatggtcatccgaagattattataaattattctagatatgaataatatttatcccaatcgcatgccttcttatgtcaaatcacaaaattgcttataatttattaattttatgaatgttttatgaatattttataaaatctaataaaaattaatgtgctaaataaaatattcaacttatcttaatgtttgaatattttcttaatatatctagcactattatggaattaatatatagcatttaaattatataaatattaattaattgcactaataataaattggggccttttcatttttacacttcaaaacagtttattttacaattttacggaattctacatagaaatccctattgcaactagagctgtaacttaaattgcaacaaaaattcgtatagaaaccccttttgcaactagcattgcaaccacttaagaaacccaaaccgtaattttttttttaaaaaaaaagttaaaaaagctgtatttggaataattctcctaataaatttataaaaaaataaatacaaaatagtacaattattatatgataacaaattaaatatttaatccataatatgtaattaattatgcatttatagtcatataatatcttaaatatttatactattaataaatttgtataaataaaataaatatacgtacaatataattatatgaatatatacttaatgaaaaattattaattaattcaatcatgcaataaatcacttaattaataaataaatataacaattgcacacttgtagaatactcaaatattcacattcttaaaatattgaaattattataattacatgcccaaaaataatcatgtaattatttcaccaattaaaatttttccattttaaattattaccaaataacatataattactaaataatgttgaataaaaatgaaaattttcaaaaaaatataaatttattgtctaaattaacccaaaataattaaaatatgcatttcccaaaataaatgaaaatacttaattttcataatttttcttttgataatttgtagtgggaaaacaacatgtcgttttcctatagaggaaaacactaggaaaacgacgtgttgtttgttatggtttatgccctaaaaaatttataagacatttctaattattaataaagagttgaacattttgatatatgcttgaatgttaaattaaatatttagtattgaataattgatattgaatatagtaaattccttatttatatatgagtctgtggcttgtggctatacagagaactaagatcaattagctgtgaatcaaatattcagcaacatattaaagttatagaatctttaatcgatggttgctagtacacttcactaattcccgttctacagtacaagtaatcttggttcggattactgatgtagtgagatatctaagtgaaagtactgtatataatagaaattacatgacaatgacctatatgaataaagttgtctttattaacatgccgtttactataaagacctaattcnnnnnataacgatgatcaatagtagatcgacctaaatcctgagttatcatgaaatcatattcatgttattagtttctttaatttgctcgttaaagtttctcagagaagatgattcttaaaacttatgttttgagaatctaataacatggatgactggaaacatgatcttcaattatggaatccttactttcctaacggatcaaatgtcggttctctttatgtgttaattttagtactggaaagttgcacgcaaattcaaatgaaattttgaattatattcccattagtgaattaatggaactaaaggataacaaagtaattaaaaaggtaaaatggtattttgaccaaaattaattacgaaccaacacatggagggctaattgctgtaattaattatatcaatagacattgtagttaaattcagtaaatagaattttataattattaagagttcaatttcatatttatattgagataatcatgaaattaataaataaaaatgagtcaataaatccatattccaaacattagtatcataatttctattgtacacccaagcaaggaagtcatacattcatatgcatatatcgtcctaccttacattcaaaaaacaataaaaactgtaataaaactcttacatatttcaaatgaagattatagacaccgaaaaagaaaactcatagatacataaatataggttcagaaaaattaaagctactaatataaattgttaaaaatttatatgaatgatatgaattatatatgatcaaatataaatgtaaaataaattaaacagatatgtattatgaatgaaggatcgaaatacctttaactattaattttttgagttttaatcccacatgagttttagatctgcaaaagaaagtttgagggacatgatttggtagatatcaaagtttggggagcatgatttagtatataaacaatcactgaaatag

SEQ ID NO: 48910 - DNA, 2703 bp, Cannabis sativa
  modified_base (2337)..(2346): a, c, t, g, unknown or other
gaaatcgagagagggaggaagacggcgagagaggagggtgatggtgcggaggcgtgggtggggttttggagagttaagattttcgtttagggtgtgggaaatagggaagaaataggtgataagaaataggtgggcatgtgggaaataagaaaaaaagtaggtggacacgtgggaaatgtgaggagaagtaggtgacgattttttaatgagcccttatacccgacggtttaaaatcgtcgggtatagtataggcgacaatcgcctatactatacttgacggtttttaactgtcgggtataagggcctcctaaaaattttcattttattaaaaaacgtcgtctattgtctttattacaattttaaaccgtcgagaatactaaatttttcctgacggttttaaatagttacttaaagtttttagcgacggtccccaaaaaaaatcgtttttaggaccgtcgtgaattttgatatttgtagtcgtgaaagcatcaatgataaaaatgaggtgtacatcctgtaagggaatacatcaaaggatcaagcaacagtggcatcaaagataatgatcaattctattatgctttgggacagaagacttggacatgtgagcaagaaaggactttagatcttgacaaggctagggcttcttagtgaaaatactatggaagacatggaatccaatgaacaatgtgtgttagggaagaaaataagactcgactttagggtttggaaagcacaacacaaagggaactcttgactacatacattcaagcctatgggggccatcacgagtgtcatctagaggtggagccatgtattttctaacatttgttgatgacttgtcaagatatgtatgggtgtacatcctcaagaataataatgatgcctttaagactttgaaacgatagaaaattttgattgaaactcaaactagtaggaagataaaaagattgaaaactaataaatgattggagttttgtgttgatgtgtttaagaactattgcaaacaagttggtatagctaggaatttaactgtgaaaaatacaacacagaaaaataggttagctgaaaaaatgaatagaacaatctttgaaagggtaaagtgcatgttgatttattctagtttttaataaatttttgggcagaatttgttctatttgcctgttacttgacaaatcatagtccttcctcagcaatcaattttagaatttccaattgagatgtggtcagggaagccaacaaggtatgataacctaaggacttttggatgcattgcttatgctcacttagacaacataatttggaactcaaggctagaacctatccatggattttatcagttgatccagcatcgtacgaacaagtactgcgggtgcaggtatgtctctgaactttcccacactaaacaattttcctacaccaagagtgtccagagtggctaactcttctatgttttgctcaattaagtctgccaacttcatcataatcctccccctctcctgatcatcattcacacaaatatgagattgttgtctcatattggggatttgtattaagaggctttctaatacgaaaatcccttggtatgacaaagttctttaagggccagtttgacatatctgtgctgtgggaaaaaatagctacaacagaattatagaaaaaaattaagcagagtgtttagtaaattataaattttaaagtgttgtgagttgttcagattctattatatgataatgttataatctaattcattatgatctaaaatatacaaaaacttagtgttatataaaaattttatttttatccatttttaattattttctctcaaaagtataaatttatatgcatttaataaaaataaattataattttatcacatgtaataaaaaaaattagaaacacaaatatataagaaactctaagttgatgtgaaatgttaatattaaaaatataagataaaaaatatttttcaagacaagacaaaaaaaaaataagagatttaaaaattatttatttattttagatatttattttttgatatataatagataaataaatatctttttagtacaaataaatttattatcttttaatcaaaataattttttcaaaaaattggcatgtaccaactttcactgtagcttctccataaattttcaataagatgtttttgaactgtttactaaatatttttttagtgattctacaatgcacccccttaaaaatggatgtactaatgcaccttctacttgattcggtatccagaaaatttttttagtctaattttttttatacgttatagctatttaagatatcctacaaaattttaagaaattnnnnnnnnnntacaatatagaaaataatgttcaatcagtcaatttttcaagcgtataaaataaaatagtcacgcgtccaacacactgcttgaacacaattttcggcgtgctaaagttttttgaatttattaaaattttgcaagatatctgaaataagtataatttacatgaccatgagaaaaaaaattgactaaaaaattatttcagatactaaaacagataaaaatgtatcagtgtaccccttaaaaggtacattatagaatgggatattttcaaaaatatgggaaaaatgagtcatcttatgataaatatggcaacaaaactaaatgccacaaaatatggcattaactaaggaagcaaactacaa

SEQ ID NO: 48911 - DNA, 977 bp, Cannabis sativa
aatatcaacaatcccaacacatacagtaactaaaaaccaaacttaaaacctaacttaacttcaagaaacacaaagaaagagagcttaggaagcaataccttgaatcaaagtactcaattacaactagaaatccttgaaccagatcaaacaactccaaccctagctgttgcccagaaaaatcgagagagagaggtttttctagatttctcttttttttttcaaaccttaagtaaataaatcccttttatttaatgaaagccaatctcctaattagcccataatatccaaaaaagaataaaaaaggatatatagcataatgactattttgccttaacaaaagacaaaaaacttaatatcatataagggtttttggtcatccctaaactcgacactttcctgatattttcaatgcctaataatagtgcgcagctattgacattctaaatcatacaaaacatgactctctaatgacccaacgtcgcttttcactgctactggactagaacaccagaaacaagaaattcacatttatagcataattgatacattctaaatttaaataaatctccacaaacatgaaaatgataatttataattcaatcataattaagcctaattatttaataatctaatatattgaacttaggcggtctttacatttttacattatatatattaactttttaattttttttttatttttattgtagcacgtgtattattacaattttactgccttatttaaatactatgtactgacatttttaattttttttttttttttgcattttttgttaccatgggtctcccaatacatttatagtgtaataattgttaatctaattagaatattctgagtgtaagtttctcttatgcaatttgtcgtaagcgtatttgcacatgatttattttatcaccctataaatagaagcttaagtagttagaattctaggagaaaagagagacgaaaaaattca

SEQ ID NO: 48912 - DNA, 569 bp, Cannabis sativa
tatcttgttcgagctatctcttttatacgtgttgtttgagccaactttagttcgtctaaattctttggtgtaatgttgaatgatattatggtttaatgaagtttattttttactcaaaataaataaataaataaatgtgtagcatcaacaagctcatggattggaggctatagtaactttttacaagtggtcaaatatttgagaatataattcttctttttttcttccttgtggtgtttagggagattacacaatgactctcaacagttaggtcattgatttttgaatattaatataataaactctcatcacccaccagccttcttaaattttttacagttattttttttttcaccaagttttgtgctttatgtatgagtccatactccatatgcatttatcgtccattagtttgtaatcatggtcggcattgagttaaggcggagtaatctatttaaaattttttatcttttaagaactgatgctcttaaaaaaaaaaaaaaaaaatcaaagtaagaacattgattgcaaaagcgaaacttacactatgtaaatagtgtaagttattt

SEQ ID NO: 48913 - DNA, 1113 bp, Cannabis sativa
aagtgacatgggtagaattggtacaatgtttaaaaaaaagtaaaatgatagactttaaaaaagagggtaaaaataaaagaagacaatataaaaagggtataaaaagcaatttcctcaatttttaacggccagaaaagttcatggagcatgatttggtacatgttaaaatttagggggtaaaaattttaattagcttttttttaattatgcacttaaataatttaatttcaatttttttatatattggatttttttattaagcaattgtacaaagagcgggtatattgtctagttaaatcataattttattacatgccatcgtgtagatagatagagcggacgaagcatgatagggacacttggcttgaaatagtttccgcttttacaaataaaaataaataaatttaccaaattttgaactaatttacctatacaagtattgaaatgattgagatcaattaaacagttttaacttaatgaatttggaaactagaatagaaaaggactgagttcttcagttacatttcaatgactgcacttcaaaattttcaattattcaaaatgggattgaaaagtataagctaattgtaaccaatctaaagatgaactttgatagagaatgcaatgtcacaaggactaaactagttgaggttacagagcaagatatgagctctgaaaatgctgtgaagttagatgaacttaattaagtttgagtaattgttggtaaagtaatccaatgttgcaatgcacttcaacaaatccaaaatttgaacacaattggcaaatggataataaattcattccaacttccaacatagaaacctcagatttggtaatttgaagacacaacaagttcaatagccaaataggtagaaacactcagttcatccaaatcaaccaaaggaaaattcaaaaccaataccccaaatccgcagcgcgagacttcaagattccgaagttgagcttgttggaaacaagttctcaacttgcgaaatagtggttcgagcctcttcaatttctgtaccttccttctgattcaactcttctaactctgctagagtagctttaagctcggctaaggatgactcgagccgctttctacaatcaggaatc

SEQ ID NO: 48914 - DNA, 2053 bp, Cannabis sativa
tctatgtgttttgttcgagcatgacacacaagattggctgcaagggcacttgcacttaaattatcacaccaaataattggtgcacctggtagtttaaacttcatttctcccagcagactttacagccaagagatttcagcagcaagttgagccaaggcacgatattcggactccgtactcgagcgagcaacaaccgtttgcttctttgaagaccaggatattaaggagtctccaatgaagacacaataaccagctactgactttcgatcgtcaggacagcaagcccaatcagcatccgaaaaacctatcatagacaggttttcactgggtgctatatgaagaccatggttcatagtacccttgagatatctgagtattcttttggctgttccccagtgaatatctgttggttgtttgaggaattgactgagtttattgacagaaagagatatcaggtcttgtatgactcaaatattgcaaggctcttattacacttctgtatagtgttggatgcttcataggttctccatcattgatggacaagggtctgcctgctgtaataggagtaacacttggtttagtattttgcattttgactctttctaacagttcactgatgtattttctttgtgtcaaatagaaccctatattatcacggaacacttcaatccctaggaagtaatgaagtggtccaagatcttttagagaaaaggttctgttcaacctatcaatgaaggtgttgagctcttgagacttgattcctgtaacaattatatcatctacataaacaagaaccatgatgacatagttaacatgtttgtaaataaaaaaggatgagtcgtctttggagttttcaaactgccagagtgtgagtgtggaacgaagttaatcataccaggccctcagtgcctgtttcagaccgtaactcgatttgttaagcttgcagacatactcagggtgttttgcatcttcaaaacccgatagctgcatcatgtacacatcctcatctaacacaccattgagaaaagcattattgatatccacttgtctcacttcccaatcatatgcagcagcaagagtaagtacaacacgaacagtagctgctttcacaacgggactgaatgtctcaccaaaatccaaaccaggacgtggatgaaaacctttggccacaagtcgcgctttaagtctttgaagacttacatcagcattgtacttctctttgtacacccatttacaaccaacaacattatagaacttcaagggaggtaccaggatccatgatttattgcgtttgatggcaacaacctcttctgacatagccaaattccacccctcatgttgaagggcagcagccactgaagtaggttcaaaactaggggagtaaaagtagcttgaccaaggaaagtgagaggcttaaaaatactagctttaccccgagtaatcatgggatgaactggtgcaatatgagctggtggggaagctggagcaacaggtctggtaggagatatattatcgggtgaagttggttcaatgggagtaacagaaacaggtggagctactgtgtctatatcagcaagaaaatcatcatgaggcaaatgtataggtgaaccagaggaagaatgggaatcacttacagtgtgaggagatgcaggagttgaaggtgatacaggaatacttgaggttgagacaattggctgcacaactggagagactggaggcaagacaaaccaggaatggggagtctgcattgtgacaaattgttcaggtttttgagtgttaaagaaaccggtatagcaaggaaagtcagattcattaaagaccacactccgggatatataaattcgaccatgaggactcaaacacttgtaacctttgtggacatcactatatccaaggtttaaacatttgacagtgtgaaactgaaatttatggctttgatatggtcggatgcatgggaaacaggacacaccaaatactttcaaaaaggtatagtcaggaacccaattgtacaactgctcaaagggtgactttcctttaagaactgatgtaggga

SEQ ID NO: 48915 - DNA, 889 bp, Cannabis sativa
ataacgatgtgatgtcctttttggtagcttaataaattttgagtaattttcgacataaacacttaagtttaattttcacttgcaaataaatatataaatttaatttttagcatcaataatacctaagtttaagtcataaatttttatttttttttttaaaaaaaatttgtatataaagtgacacttagataatgatttgacatttaatgttgagatacctacagagttataaaaatataacttaagtattattaccgccaaaaattaaacttaatatttatttgtaattgaaagagttaaacttaaataattatgccacaaattactctataatttttaacaataagattgtgctgaacaaagtaaaaagttagtatacaacacccgaaatcaatattgggattagtaataaatatttgttcacccttttgttctatggtgatagcattggatcctccaagactctctccaccagctcgtgtacgtccttgatgtgcatcctttttaactgttactgaaaaattagaatgttacttactatttaacaaaaatatgtgttaaaagaaggataattaaatggatatattatataccaacttcaattgcattcgtcagaagttgagcaaaattaacgcaagttttgtaattgtctggatagctttgtttctcttcattatctaatcttttcaacaataaagttatgcgatcttcagattctggcttcagctcatccacaaacgtccctttattcgaatataatgaatataattaaaatgaagacagttttttaggtaccaacatatttgttttgtcaaaataaaactgttaactaaagaataagtggcacttacaatgggaaatgaggttgtgccaatgaccaaggttgcta

SEQ ID NO: 48916 - DNA, 3601 bp, Cannabis sativa
  modified_base (46)..(56): a, c, t, g, unknown or other
  modified_base (3547)..(3547): a, c, t, g, unknown or other
ttaaatagctataaataattccatgattaaacataaacaactgctnnnnnnnnnnntaactaagcgggctttacattaggacatttaagtttccaatgtctcttttctccacaaaagaaacactttcctttcccctttaactttggtagggaagccttcttctctttgtcagctattttggtagccttggaagtctcatgatttgggttgttaaccttcttctttttccttattgttgttggcaacaaaagtattgtttgctttagctagagccgcaccactagaagtagaagctttacctcctttctgtggtcctcaaatcagacttttaaatgtcttaagattgttgattaacttgtgaaagtccgtcaacacattatttatatgatagtgtaaagtgaattgaagaaaagctagagatagactgttaaggatcaaactcccttaagtttctagatcaataacagttccatggacttcagcctcttagaaataacctgccatctggagatggtgatcacagacattctaattaggcttcatccatgcgtttgtaaacatttttgttgcattaaaacatgcttgatccgacggttttccaaataattcacttaactgatttataatctgggagctgtgaaattattagaaaaccttgacttcaaggtatctatcatgctaaacaacataaagaatagagctttgctattggctttctcccgatgctcatatctttctttaattgtcttattagcatttttgcctagcacctcacttttgtcatcagttaagacaaacaaagaggtctcactattgagagcaatattaatgttatctctccacttgatgaagttagctccagtgagcttattatcagagaggtgtaacacaatgggatttgataaaggtattttgatactacaaatattaaagaatagaaatcattaaatggtttaatataattctattcacaatttggaaacaataaaaatatcaaaagaatacaaacatatatctcatatattgtccaaggctttcaactataatataattttcctatttaggcgagagtcaaaaatattattggttgaacagagtagttagctcttctaatataacatacattttagcaaccttttatttaatcaaatgtgaatctaacatttttcgtttaggccagagacaaggtcattcacattttatgagctgtcaccattatttcgtatttataaacctattctaagtagtcatctttagggatgagtctactagaaagaaatttatagaatacttatttttcgagattttactttgttaaattgtctaatggtaatcatccattagggggacgacaagcgcctcgagatcttattaaacatcagtcatacaaaactgcaatggagatcgaatatctcttatttaaagcatattattttatgtaaagaatatattcttttagaaatatttatttctaattttttattttaccaaccatatacaaaatattctattaaaattaccaatttagttagactaaatctgaatttcaattttaatatttataatatattattaaaattattctgaaaataaattaattattttccaactttagtatacatttatatattctacataaatatcaatatcaaaattttttaaatattgatatactaaatataaattagaatttaggtatttataaaatatttattaaggttagtttgaaaataaactaatttattttcatctttaatatattttcatataaataaagagtattatcattaaataagttgatctaaaattaaacactaatttacaacttcttaaaataatcttattagaattttcttaagtataaatataattttaaaaatttatatttaagataaatattaattttagaaattatcttataaaataaacccttaatttatgttgatttaaaaattaacagaaaaaatatcaactgaaattaattttatttttaattaaatatatatatatatatgtatacatgtatacacatatatatttgaaatactagtataaaattcaaaattagtatatatttttttttgtcaataatttagcatatgttacattaatgaaaatatttcaatttatgttattctaagaattaataaataattattcaacttatatatattttctttaatatatatatgtgaacataatctaatttaagttaatttagaaaattaataaataatttttctaattttaatatatttttctatttaattaaatttactttaccaaaataaataccaaagtttatttattaagctaaatgtgatttttttttaaattaattcaaataaaaaatactaatagcaaataggcgtaaaaatatgatagttatacaatttaactttctttattaaaatataatttttgaatatttagttataaataactaaatatcttattttaaaaatatttaattttaattctatgtgtaaattttaaaatttacatatatatatatggattattgatatttatttcataactttttaaaaaataaaatataaaaatatctatttagaaaatagttaccttaaattttctaatcttaaaaattcaaaaaaaaaaaaaaatctccatttttcaaaatataaactttaattagtaatatattgtttgttaaaatatctattaagatttaatgatgaagtctaatattttttgaaaaaatagatatcatccttttctaaattttaagattttaaataagatattaaagtttatagttacttattttaaaatatctaggtgtaaacttagattttatcccttttaatataaatatctaataagataattttaattataattttaaagtttaaaaagaaattttaaattttaaaatatcaaaaatttaaaatatttgatattatcatttaacattaaaaaaaataaatataacaatatttaaaatattctatttaattctcaaggcaaaaggcatcctaaaacttatatttatctttcatttattaaaaatcacaaaaaaataaatttattttaattttagtaattttgactctatttataaattaaaagtacttaaaaattaataaagttagacttttcaataacttaatttagacttaacaatcaaaagatatgccaaaaataaaattaaaaactatgaaaatagaaactaaagtttgcatgcatgggcacctacgtccgcacacgtacaaggctttatttggtagagaaaactcgacatttacctagcatccgcgcgcacatgcaaccgggtgtcacccgggtgtgtggcagccctagtttctaatttttaaaatttcataactttctcaattttcatcaaaattaagattcgtataaagcaaacttgcataatttttcttaaatttttagaaaaaaataattccaatcacaaattcaaactattttatacaaaaaattcgtaatttattaatccttcaaattgttatacctgaaattcggctgtacttcaggaagtgactgttggaattattttaccagnatctagatttactactatgtatgttgtttagcatcctaatatgaatttctaaaa

SEQ ID NO: 48917 - DNA, 1123 bp, Cannabis sativa
cacatcaccccatgtagaaatataaataacaatatttaaagagaatatgacagtaagtttaagacgcacatgattttttggtttagaaaccaagatggaatggcaattattctattggggtcaagatatgctgcaattatccacactagtggttgaatctgcaatggctttccccttttcatgattagtgaccaagagaggaagaataggtggttgtctagtatgaagaatgatcagagtaattgtgttacgagccaatcgcgtaacgaaagttcgaggcctcgccttagaaaaatcctgcctataatggtcatatccgaactttgaaagtgcaacaccctccaaccaaggaccataaggaagattcagatctattccttcatccaacttttctaagaatattggacaattattaaaaacatggccaattattccacattcataacaaaagtctaagagtcgctcatagcaataatcaagccatagttcatcaaccatctacaaaaaagtaaccatttgaccccggatgagtagcttgtagatataaatacccatttgtattctcaaaaaaggattccatccttcatttaaaattcctcatgaacttcaataaaactactaatcaagtctctaatcactcaggcaaaagtctcagatttactaaaaagggcaaatgaagaacttggatccaaaatagagtggtagtcataaattccatagaagcattatgcaaattacaaaactaggtaggcataaaacacatgttgattatgaaatttctatagttctttggataaaactctcctcaatcaccttcacaactaaaagtgatcgtataagattcaaactcacatggagagatatcaattgcaaatctaccttccaattgtttaaaaatgaaattctttaattgtttaggattttaaccccttttagagtgtatcttgcaaagcaggcaatgagatgaagaatgtggaggaggaatggggacattagatatgttaacaattttcctttctctatcagtgagagcattctagatgtcaggtaggaaaaaaatcatggctaaaggaagaaaacgaaatcaatcatcgaggcagaaaaagaacagagaaagaaacca

SEQ ID NO: 48918 - DNA, 1340 bp, Cannabis sativa
  modified_base (1314)..(1314): a, c, t, g, unknown or other
cagcgtctttattgctaatctttttcaggcgcatcaattgtaaagcgcctgtaaaactaatcattcttgtagtgtaagtatatgttcaatgagcagattatactcaaatttatatcgattgttaaattgtaactttgttaataagaaatagaatgagagacatgatttttacaatggttcatccccatgatatgcactacaacaaaaactgtcattaggagtgacttttttcgttccaaaaaacctcttaatttgttccaggagattattgggcgcgactagtcattcctgatgttatattcctgataactcatgcctaaaaattaatatcaggaacaaaatatagcaacatgcttgatgctaaaaatctggaatgaaaaatagttgttcctgaaatgtgaaagtcactctaaaaaatgaagtgagcagcttagttttcacacagtaacaagaacgattgttttgttatcaggaacaaaattgtcgttcctgagatcatttttcaaaatatcatgtaatatattacaaaccataaataataattacatttaaaatagatatataagaatatcccataattttaagagatatttacatttcaaaagacttctaaaattttcttttcaattgcaagttttaaatgcactgaaataactttgttcgttagaaaataatggaattgaaaagcaatgatcactgaaaatgctaaaaactcgtatgtgggtctccttgggagagccttgccataagaagagtggaaaagcccatgcattggcctccaagtggcccccacatgactaaactcatcaattcccaagcgaaatcaggtaatctgtcttttgacccaattttaaaagtgaaaacataagaattgttgtatgaccatgagacaatcatagatctcccttaagatatttctaatgtaacttcatcacattatttggataagaattgagtgagttatagccattttactgaagggttgggagcagagtttgaggattcctgctccatgcaagtagtgtcatctttttggccaaaagatggcgttgcttacccatacatgttctttaacacttaggagtatgtattaattttttttttttataatgattcatatatttttttattttgggatcccaaaaccctagcatgcaagtagtgccatttctttggccaaaaatatagcattggtcgcatatactcataaaagacaatttagtgtcctttctaacttgatttatatgtcttgacattgaaaagatacatttgaccaagttttcaatggccaatctgttaggttttatgccctanataaaactctttacaatctgattagt

SEQ ID NO: 48919 - DNA, 873 bp, Cannabis sativa
tccctactgttcatctccaaaacaagtaagtcatcctattcctttcctgcttgcagagcccctgcctcaccaccaaagccagaaatggcaatcgatctctcaccaccagaaaatgcaatttttagggaaccacaccgcacgcttcgacttcccgaggccagtagcaccgtcagatgtccccatcgctggtcgtctcgaacgaagagcttgagaagcagagaagctcctccgttcaacatctccatcttccatggatgccggcagcaataacacacttccagcattcttccccgaggccaatgaagctggtagtctacgggagacagttaacttcggcccaggaaaaacgcactggtatgaggataaggttgaaagccaagggccgaacatgggaaaagggattccatcgctgttcgagaccgtcaccggagatgtcagcttgcatcctctgcgttggtgcccaagacacccacaaaaataacagaaaatgcctatcttttcatatttcacttgtatccacttcttcacccccaatgcaatatcaaaaaaacaacctgagaataatggtttttcagcatcgatatcaaccaggactttgaggaaactgcaccaagtagctggctttccttcatccagttctactcgcaccacttttccaaccaacccccctaatagatacccgttagccttagaaaaatactcgtgagggaggttatgaatctgaatccatgtacgcaacagattgaaagccatcggcccttcaacggtaggagtccaagctcgaaggaccaacgaataaccacgcacacaccaagggccattctccatagcctagttcctatgatcagtacattcaaaaccgaacttgaagac

SEQ ID NO: 48920 - DNA, 1228 bp, Cannabis sativa
gccagtttaataatttcatttcacagatttttcattgaattatgcaaagggccatcaaattgtctcaaaatttctttctatccaaagtaaagaatgaattttctgtctccaatatgaattactaaactcatagcacattccacagttaaaattcgataactttttaatttacaaaatataattattaaataatcatgaagaacaaacattctctttaatcatttcagatctaaaaagccccaaatttaaccaaaagatgagataatagaagaataaaaagaatacctagcaacggcatggcgaagcagttcatcggttccaaagtacccaatgttgagatcaacgagttggccacagctccggttgatgactttgcggcagatacttctcaagtccaagcctaagtcaggatcgccgatgttctgcatatcaatggttcgccacatgtgaggatccttacagatatcaaaccacaccttgcaaaccatctgagcactcatcattatttcgatcactccaagacgagaaagaatcgacgccattacatcgcgcggcaagtccagccagttccgtacttctcctgacggagttagcttactcgatgacgaagaagaagaagacgccagatgattacctcgtttcctgcgacctgaatcagtaacatagtttttcagtttccatacgaaaaattgacaagaaaataccaaaaaaatcggtgaaaatcacctccattgttgaagcagtttccacggccaccaaccttcctccgccataaccgctacctctctctaaccaatctctagtcatgtaactgcttccataaccaccgtagcatctctggaaccaatctaaggccatacaatcaacatcaccacaatgaaaacaaacgcctccgaaattaccgccactactgcctcctcctcctctagcacggcctcggccgccaggtggaggtagtccctgaagaggtctctggttaggtccggtaacatctacggccttggtacgattttttttatctggacgaatgagaaactctacggtctcaccgtgagcgagggttcggaaaccaccgccacgaccgtcggggcagcgggatcggatgccggagcggtgaaggaacaactcttgggcgccattggaagggattatgaagccgtaacccttctgagaatcgaaccatttcaccgttcctaacaatctttcgttgttgttcgccatttttaac

SEQ ID NO: 48921 - DNA, 1772 bp, Cannabis sativa
acaaaaaaatgaagaatcgtttgcgattcctcactcatgtttaacttcttgatcatgtgttgttgctctaaaaaccgttacatagccattttatctataaggtaagatatatatatatatatatatatatatatatatacttattttgttgtctaccaagtactgagtgttaaatttatttgttgacattccaccactaataaataatgaggtgagttttagctgtgttgaatttcttgtacctataaattctttatcagttcacaccaaataaagtcttcaatttatccatatgcatgtataaagttgaatttactggaactgtataaaacaaatcaagtaaatgacatttcattatactaaatagtcataaattaattattagagaaaaaatgctctttccacgtttattgatactaaaaccaaatcattgaatataaacaattcacaaagtgaactagagtctaaacttgaggtggacaatagtaaataaccatatcactacatacaagaactttccttttcagtccaattttcggataatgagaggaaaaaaagggttgaattgatatgagaaaatgtatatgaaagaatgagtagtgcaagggacaacttcaataatttgttctatgaaatgcaattggaaaaaagaatttgtttttttttaaagagttttaatggctttagggatcaaataatagagagatataaaagatttagggtatcttaagtggttttatttacttgtcagaacttttttttataaattatttattgtttacatacaagtgtatattagatctagatgaagggtaaattcaaaagtcatatttataatggttaaaaaataaaaaaaatgtctctatgctatgattacaaaataggtgttcctacatttcttataaatatataggtataggtattatcgtatgggtgattattttggatactgaaacaaattatggtatggaacaagctaagtgacatgttgcttgctatagataagtacgaccttatggcgcgtacaatgcatcgtcttttatgagtgacgtgttgctccaaaacctgtttaatttgtttaaaagtggctttaaacacctataacttatttccaaaccttttaggtatacttcgatatctcattatactaatttaagcccaaaaaaataatttttaaatttctataataaaaagttaaatttcgcatcaccaacgttaaatattttgcacaaatttgtgtacaaaacaaccttatattatattaaatcaatcataacacatcaatttcaatctcaaagttggagcaaccaatgcccaacttaatagcaaggagctcagttattaacacattttaaagatcttagaacgctatcattttggtaagcaacgacgactcctcttcgatgatcatgcgcgcgaccctgcaccaaggccgcaaaaccttttcccctttttcaagtacaacatcaacattaattttcaagaagcttgcagttggcaaaatccaaactaagcaatttcttatgtttgtacttagaatctaaaccatttgaaaatgaacaaatagcacctctgattcccaacctttttccaggtgtatcatttaggttcccaaaagcaatattcaatccaatatattataaaaatccatgaatcggaaaggggttttacttgaagaagaagaaaaaaaattatgcatcctttgttgttctctactattgaaaaagcttgggtggaaaaaaaatagtgtaataaacataattttacttcac

SEQ ID NO: 48922 - DNA, 825 bp, Cannabis sativa
gactaggaccccaaacttggacctggacctagacttgaccctagaatcggaccctgacctggacctggaccccgaacactacacccacacctgcacccgaacctagactcagacccggactctaaccccagactctgaccccaggcccgaacccagacccgacccacacttgcacccgaacctagactcagacccggactctaaccccagactctgaccccaggctcgaacccagacccgactcaacccaaacccggacctagaccccgggcccgagactacaccctgactcgaacctggacttggaccctagacccgaacttgaacctcgacccagaccctagacaccaaaccctaaccctagatcccaacccatacccaaacaacgaaccctaaccttggacccttgcttgacttggaccaagaccaggaccccaaacccaactttacctagaccaggaccaagacctggaccccaaaccttagcttaacctagactagtaccccaaaccccagcctggacccaaaaaccagacctggaccttggcctaggtccgggatcggggtcaggtccaggtccaggcttgggtttgggtcgggatctaggaccgagttcgaggtttgggtctgggtccgggttccgggtctgggtacgggtctaggtccgggtctgtgttcgggctgggattcaggtttgggtctaggtctaaagttggatgggtttatgtcatagtatggtgtagaatattattgttttagtaaaaaaaatctaaaaataattttaaaaatttaagtcaaactctattgaatttttaaaatgataaa

SEQ ID NO: 48923 - DNA, 951 bp, Cannabis sativa
aggtaacaaaggtttaattctattcgccagaatcttagaaatgaccttgtacatcacattgcatagggagatgggtctaaaatggttggttcttttcgggttcgggacctttggaatgagaacaacattggttgaattgatacccctatgcatactaccatttgtaaaaaaatcagacactgcctaacagaaatcactatgaacagactcccaataatgcttgtagaacagaacagacattccatgtggactaggagccttatgactgttcatggcaaacaaggttcttttgatctaatcggtgcttgggcaagtaagaagagtcttggactcttctaaagatattcgctcttggaatagatgaccgcaatcatattccaaaccattatccgcccctgcgaaaatacctttaaaaaatcgatgaattctctgccaataagctcacggtaaaaaatccaggaattatttttatctaaaatactctcaatggcatttcttctacctttaatggcagctgacataaagaaaaattttgaacatgtatccccatcttttagccaagaaatccttgccctttgtttccagtatatcgactttctttccagagattcattcagcgctccccgcatatcacactctcgattccagtcccgcgatccagcaggaaggctctgcagagcgttgagttgattttcaagctccttgatgaccatatctagtttaccaaattgagtgcgattccaatgcaagagatctacccttgttgcccccacttttttaaacactcgggcagggggccaaggatgactaacagacttccaagtgttgtcaactaccagcttgcttcgctcatctcgagtccaccctttttcaaatttaaagaatctctagaacttttgatccataccccccgataggaggcacgaaggcctatggtcagagttgctagtc

SEQ ID NO: 48924 - DNA, 1074 bp, Cannabis sativa
aagtattgaagggagccaatggtactccggtagagagtagggtcttcgaatggagcactgtcagctgtgtaaagcttgtatccaggacaggctggtgtgatgcaagacttggaagtatccatgttagttcgtttgaggatatccatggcatactgagattgtgacaaggagatagtgttgccagttcttgtagcctgaaaacccagaaaatatcccacagaaccgagagttttgagtgcaaatttggtttggagatcagtaatgactttgtgaacagctttagagttggcaccagttataaggatgtcatcgacgtatactagaatcagtaggagactgccattggaggtgctaaaaaagagactgctatctgagacagagtttgtgaatccccaagccaataatgcacttttgagcttctcataccaagctctaggtgcttgttttaagccatacaaggctttctttagttgacacacatatgtgggatagttgggatcttcaaaaccttgtggttgctgcatgtaaaccacttcttctagatcaccatttagaaaggcattatttatgtcaatttgttgtatgtcccagccataggttgctgcaagtgtaaacatgattcgaatggtgctggctttaacaacaggactaaatgtatcaaaataatcgacaccagcagtttgttgaaaaccctttgccaccaatcgggcctttaatctttcaacagtcccatcagctcttagctttattcgatacacccatttattgtcgataacattcataccatgatgataaggaactagaacccaagtattgtttttctttagagcatagtattcctcccccatggctttattccataaaggattgttcaaggccatttttaaagaagtaggttctttaatataagattcataggcatgtaactcagctgcaagaactttgggcttaaaaataccatatttggatctggtggtcatattgtgtgaagatgttgttcttgagtcatgttgtgtagtttgattttgaggggcaggtaaggcaatggaattgttggtaatgggagtaattgtt

SEQ ID NO: 48925 - DNA, 767 bp, Cannabis sativa
ttaagatatatatgaacaaacatcaaacaatatatatgagagtataaaaaatacattttattaatttttaagcatgatacgcttagaattatttaatcagtacgacaactacatatctaaattagaaactcaaataaaaaaaaataaaattataaatactcaatatatccaaacgatacaatcttggtgctccatgacttgctttttagtgaactcggtttctgcaagtctatcccctcgcaagtccatacatgcaagaactaacatttgcaatatctagatcaaaaccaagaaatgaaggagaaaaatatacaaaggaaaaataagaagaataaagtgacttacccaaaagaaaaatggggaatgattactcgatgaacaaattgtggattgataatatagaaggaggattctattttctatctattgtcccttcgtagccttctcatgcccattttcatagggatttatctttactaaacagtcgacgatgagggcggagctcgaacacatagagaaagagagagaggagagaataattgagagaaagagagagggagggttggacagtggacgacacaacagagaaaaagaaatacgatggtttttcaaaatggggaagaagtgagggttgggatgtgctagggtttcgcaagttaatttgaaaactcgaaataagtttcagcatggataaaaattagggttattacaaaaattaaatcttttttgctttggtggatacagtcgcaaattttttaacctctgtt

SEQ ID NO: 48926 - DNA, 1611 bp, Cannabis sativa
gtcatcaatccaagaagcagtcagtggcatactcgtgtataagagccattagtctgtgggtgtaagggcccaatggaggcttgaagcggggccgttacaaagacaataatagagtctatagtgacggaagagaaaaattatagttttataaacattgggtactaatatcgctaaatataaaaaattaggtttatgtcaattacaaacttaaaactctgtgtacttatgctgctatttatccaaattgtaatttttctttaattttatcagtatagacttcgttttgaatttattaagagaatatttagaagtaactgatgctgcatatttctattttgggtacttgtgccgttaaaactttaagtatttatatgactatttactattttttatcgataaattagatttttttcaaattatgactattctagaattttgtattgtttggaggattttctttgttacaaagtcaattatataaattattgcaaatattcattttagttacatttgaaacgaatggggccgaggtttgattctggagtttgtgtttggatttagatcagagagtggggtttgaattaggttcggaattgggattccaattgtggttcaaataaaagataatataaatagattattttttttttgagtatagcgtaatggttttttacaatcatatattagcttaaaggtcctcggttcgaacccatgatctctccctttttcccatctctcccagccttagtggctttaatataaatagattataattaagaaaaaaacaaacttatcaaacaaattttaaaagtaattatttttttttattttttttgaaattttgattttcattttaaaatttacaaagtgaaaaagttttgtaaaatttatttttgaaaatatttttttataataaaaaaattaaaaatattaccaaaggcactataaattatttaaattttaatttattcaccttaaaaataaatattaattctaagaattctcatttactctcatcagctggtttgcccgagaggttaagggggtagacttaagatctactgcacataagtgcgcgtgggttcgaaccccacagccagcattttttttatttatttatcttttgtacatagtaacttggttaatgccttgctagaaagatgtggttttgtgaatacaaatgatatgttttcttttttataggaagtaaggtggctatttgttagagataaagaaatagaaagaagaaaaaaaatcatttctttggttatatattaaagcattagaatgttatttcaatgaaatgatttttctattattttggtagaatgactatttcattttcaaataaaaagaaagactattccaatgcatgatgagaaaaaatttaatttttttatacattttaaatttatttcattctattcttattcttattcctatctcattcttatattctcattcctcacaaccaaacgtcacctaagtgtgatataaggagattatagtacaaattaggggtgggcatccgatccaatccaacctttttttcctcatccgatccaatccaaaattggattggatcggttttttaattggatatccaattac

SEQ ID NO: 48927 - DNA, 4435 bp, Cannabis sativa
aagttagacaaaagaaaaccgttgccttaagcaactaactagtaattattagacaaaagaaaagcttaaaagaggagctaagccaagctctaataactaataagtaataagaaaagggtttatggtcttctcttaatatcttaaaccctaaaactcaaccacaacattggaagcagatttgtgtgtatgttcttgcatcaaaatgcagattgccttaagaaaattatcacagggagcttctctaaaacaggtacctctcctcaattcatatagcttctggaatatgttttaaaaattttcatgtacagattgaattacgaatgggtgtgctgtttcaatattcgaacgcagttagatttctcttctttgatgaattgtgttaacgaagaggaccaggatggtttaatatttgtctgagtattatgacgcgtttctttgctaaattgatgcatatatttgtctgagtattatgatgcgtttctttgctaaattgatgcatatatatgtgtgtgtgtatgtatgtatgtataaattgatgcttatataatataagtagggattttaatttgtatgctgctgggcttctgtatttatttagttgattataaatttcgtacttgctgtaatcctttctttgtagattttcatgaaagaaataaaatagttgatatattcttgaagaagattctttatcaactaactttagcttcgggtcaatgcgagtgctagttctgaaagtgtggtctggtctttcacaaagtttatttctgaatttttcttgattaggttactatgagtaaagaataattggaaagtaagtcttaagggggagtttttttccccccaaataagtacacgaaaatgcacctctttcatgaacatgacatgaataatagcataaatgttagctttgaaactccggttttgatcacattttgggtgttttcctatttattgattttacttttttcatttttattcagtctatcatctactgtcgcactttttctaccaagaatgttattgatattggacaaccaactcctgcatcgcacccacaggttagtactacaaacaactttcactatacatacatacatacatacatacatacatatgcattgcacacaaacacagaatcaactagctaaggatattgttctggtataaggatgatctgatcctgtttccttttcagttactcaaagaaggggaggtaacaccaggcattagctctgaagaatatgtttcaagaaggaaaaagtttctggagcttcttccagagaagagtttggccatcattgcagctgcccctgtgaagatgatgactgatgtggtgccttacaattttcgacaagaagctgattatctatatatgactggctgccagcaacctggtggcttagctattttaggccacgagtgtggattctgcatgttcatgcctgatgcaattcctcatgtatagaactatattggttttttgtagtgcatgcaaaatgcatattgtacacaaatgaagcactaagtttaagggtcttttttccttttctttaggatattatatggcaagggaaagttgctggtgttgatgatgccttggaaacattcaaggctgaaaaagcatatccaatgcgcaaattaagagaggtaagcagattctttaaaatcttagcgcagcccctcttcccatgtttcaatgccactttagctaaaataaattgacactcgactctaatatcagaatacataaagttgtcactttcgcaaatttagctgttgtgattctcttatgagttcctccattgaccattactcaagattgtgtcaaaaggcagaaaagctttattttctaagttgatcattgcagtgatctgataagcatcatgcaggtgcttaatttaaagcgagcaatattattaattatatgctttcgactgtgaagtaaccttttcaaaatcaagctatcttctgaccacttatagtaagcctttctcatgcatttatacttatctcactttctattactgactgcagatactgccagatatgataaagggatcgtccacattgttccacaatgtccatacagccataccagcatatatgaatttggagcctttccaaaaagctgcagacactggaagggttaaagatgtggcatgtatcacccatgagttacggctgataaaatcacctgcagaacttaagttaatgagggaatctgcatcaattgcttgccaggtactatttacaataccttttcctaatcaggctcatgtggaatcgtgttctcataaattatttctaaatattactcgaattattccttcattcatttatacttaataattatactgggcttggataggctctcctgcagacaatgcttcactctaagatgtatccttgtgagagtatcctatcagcaaaatttgaatacgaatgcaggataagaggtgctcaaagaatggcgtaagtatttgtatatagtcggatcccacaaatgttacttaaattctagccatgcccatcttattttgtaattagaagtgtttgtggtagacctggtgggcaatgattatatggaatattgtttataatgccaataactgtagtttcatgcaagattgtcattttccttttccacacgatcaggtttaaccctgttgttggtggtggacctaatgcaagtgttatacattattctcgaaatgatcagaaagtgagtccatacaaattgtcatttactatttttggtttcaaatctacttagctagacaaattgtccacttttcaaacactgctaagtgctataatgtcgtgcagatcaaagatggggatcttgttttgatggatgttgggtgtgagttgcatggttatgtcagtgatcttactcgtacttggccaccctgtggtagctttacctctcctcaagtatgtacaacttgacatttctttggcactctgtttgtttttttaatctcattctccataaagtaatatgtatgtgtatctgttgttccccttcattaatgttgaatgcactggtacaatttttaaatttttttaattctttggcttcttctgtacacttcacagatatggtttccctctctgttttttttttattcattctttctttttccttttcaggaagaactttatgaccttattttgcaaacaaacaaggaatgcctgaagctttgcaaaccgggtgctagtattcgacaaatacacaactattcggtacatgccctcttttattttatattttgtgagggtaagagtggcaatggatggtggctgtgattgtgttttcctcgctttatcatctctctctcttagttgtctatctctctgtctatcgaactagataattgttgaaattgtgtccattgcttgcacaggttgaaaaactgcgcaaaggactcaaggagattggaatcttgcaaagagaagcaagcagttcatatcatatgctgaacccaacttctataggttctcttttcatatcccttgacatatgtttgttcctgtatgactaatgctatgagtgttatgcttgaaactatggccattttcatagagctcattgatttaattaccatttaggtcaaactactggaaattatgattggtgatgatttgtttttccttgttgtctaggccactatttagggatggatgttcatgattgttctaatatcagctatgaccgtcccttgaaaccgggtgttgtaagtgttctttgttatcactgaacaccactttttcaaaatgtttctagtttgtatctattttcctctgcggcatactgtctccatggttttatggtatgccaatatctttacttacctgaatgctgaatgtttatgttgaacgtacttagctgcggcgttgtgtttttactttgacaaaattttattattattgcccaggtgataacaattgaaccgggagtctatattccatcttattttggtggttcagaaaggtatttttagcttaatcatttttactttatgagattggactcaggtctgtcatgatgtatcattgtaagcacttcaactacaaatgaacaaaggaaaatgtctcactcaatctcaaataggtccaatactgtcatgattatcttggcttacccgtcttactatggatgttatcaaaagttgatttctaatattgaataatcatctctcaccaaagtaatcctaactgtaaatttccgacctttacttgaacaagatctgttctataggcttatacatctgttttctaattttcttgaggggctgtttggtattgcggtatagggaggagtgggaatgggaatctgaaagtttaccatgtttgtttacggttttcaatttttagaaaatcttaactgtaaaattagatccagtgttaggtgctatgtggtagatcaatc

SEQ ID NO: 48928 - DNA, 1400 bp, Cannabis sativa
  modified_base (1273)..(1278): a, c, t, g, unknown or other
ttccttaacatgttttactaagatccatacttaaagttttgatttttttttctgattttagcattttttttttttttgacttttttctatcttttaatgattattttcattagttgggtctcatgatcaatatagtatacagcttttaaaattaaaatttataatccttaagtcacggagaagatattttgatatgcgtttacaagagatatggggttggtttatgatttgtttttggaactgggccaatgtgtggggttgatgctgatgagttatgaagtgggtgggtttgccaatagagattgagatggttttgtggtggtttttcttggtctaggaaatttctccatgtgagcttttgagtttgataccatttatttattactaaattatgtcttgtatttttcttttatatgaaaattatgtctcgtgtattgaaagttggataaaaattaatatgcaaggagatccatatggctttacaggttttttctttcaacctttctttctttaaaatgatttttttatttgttgatctggttttaaaataggcttgcattttcattattttaacgttgatttattgttgctctatctatctccttcattttctcctccaaacatagtagtggacatgatcatcggaaaagttttgtttggacatgtccaaactttggcggcaagaaaagttggtgaaagttattttaattatattattttgtttattttttaaaacctccaatgaaaattgatctctaaaacatggtttgttgaagttcctttacttttttttctaaattaatacatattttattttatcaatctctatgtttgaaattataacatatgcataatttcaattaaattcttatctatgccaaactttttaaaaaataatgaattaatgtatatatcttatattatatattattgctcataatttatttcagttaactagccttttttttttgtttttaactagcctttaaaaagtattaatttattcattatttatataataatttattttaaattacttaatcatagtatatttatattttatattgttacatgaggtagtaattgttttattatttttattattaaacaattttaagttattagttatttgttataaagctattaacgttattgaagttataataattagatctatacatatagtaattgtatttgacaagataaatcattttatatttttcttataattacctcatatactatttttttaactttttttttttcaaatttnnnnnntgagtttctaaagtggttgcagcactagttgtcataggggtttttatacgattttttattgcaatttaggttgcagtgctagttgcaagtagaattttgtaaatatgcaaaaaaaaaaaaaa

SEQ ID NO: 48929 - DNA, 930 bp, Cannabis sativa
attaaaaactgatcaaattcaattacatttatatatattaaaaaaattatttatatttatttacatataataaaaatatatattaattatatttttagcaaattttattttacattgaatttgtaacgtttaattgttttgtatattattagtttcatgatgttttgttttattttattatataataatattattgttttacttattttaaacttttagttgtattatacttataacaataatatttttatagagtattaaatttaatatatggtaatatttagtttttagtgtatttttttttatcatatttttatattaatattaaaaattaagtatgtaattaaatatttaattaaaaaatctaattaaactgaatggatgataattttctaaattcaattactatgttgaatttagattggatttggagaaaaaactaagattgaatcatatgcacaatccaaatatatatatactaatactatagtagtctctatgtgtattttttgtaccacataaacgtgatctctatcttgtgcatcacctcccatttgtattttatatataaaaaaggaaagaaatatataaaaataatggaaggcaatttgttgtttgagtagataggtattgtgaataattaaagcaaaacagacaaaatttttggcctacggcgaacatgggctgctggcagctggacttcgctccttatcaataatcaatatttagatctaacaatattcacttattaactacctcgaggttttgagactcacctcactattaataaatgaaattgggttgtcgtgggaatatgagtaatgatgtctgcacaaacgttaaaacattattatatatatcccaataataatgtagtagtaattttttaaactgtgagtaccctcttaatcaaatgtgttaattacatca

SEQ ID NO: 48930 - DNA, 2518 bp, Cannabis sativa
tgtatattaaaagtaaaaaaaaaaataccgaaaaaatgaataattattgtaaaaaattagaacaactacgaaatgcaaaccataatttgaaccaaaccaattcatttttgagtggtttagtttggtttgatttgatcatttaattggtgtagtttggttttgaatttttaaaaaaccgcaatactagtttggtttgatttgatcatttaattggtgtagtttggttttgaatttttaaaaaaccgcaatactagttttgtttgaaaaaaaaatgaaaatctggaccacactaattcgtgaacactcctaaatagtggtatataactttgttcccataatacaatattttaatatatgtatataattttattagcatgcaacatatataaacttattatttttatatattttaattgtgtgatatattatttattttaaataatatttaattaattttttattttattatgttagtatagtatatatattttaattgttagtatatatattttggtgaatggtatatgtatattttttgttatacggtacattatttttttagaaagatatttaagttctattttttattgtacttttgttgacgtgacatataattttattagcatgctatatatatatatatatttctattgtaattttgtaaggtatatattttttgctatatggtatataagttttattgtatagtatatcatgttatgttagatgatttactttttattttattatacataaagatagtatataattttgtaagtataatttatggttgtatataattttattaataaggtatgtttaacttttttaataatattatattattttttattattggtatatatattttgttataagcgagtaaacattgggaaaaattacctcaaaaaatttaaacaataaagttataatatccttaaacagtacacctagactatttgaaagatctcaaaataaaaatcggaaaataaattttattagaatatctaactacaaaaaaaaattatcaataaaatactaaattcttagactctaccacttgattcaatcaagtaaaacataaactaatgaaacttaaaaataactagccaaaggtgttacccctttgctagtatcaacgactattacccaactaattctaccccccgccaaaattcaataatcataccacactaactcataaaaaaaatgatttcctaaattatttgtttatcgagattttcgaaaaaaccaatataaaatataataaagctaaagaaatagatcaaaaataaagaacatgacaagagatttttacgtggttcgagtaataacgaattctattccacgagtcagtattatttggctaaaaaaaccttttagtattacacaaaatgtttgccaagtttatgaaccctagaacttgccttagcttgcaagaattcagattctaaccctttgcatgaatgagttgtcttctattttatagacttagggttcttaaatgtaaatgttgtccactgatggggtaaataactttcggtccatctagtagagctcgacctatgaggcatttgatcttttactaatgtagatgccacatcatattgatattgtcaaaacttgtcctattttgtggataataaagacacataaatgtttgattggtaattatcttatttccttatttagaataccttattcttggatataatattgaaaataaagttatgatattgtgagatttgataataaataagtgagatctcaagcttaatatttggaggctcgttaactactcttccaaaagcactgcttgatactatttggagacctgctttgctgggtcgttatcttgcttggacgagtcatatgtctatcatccagatggcttgactttgataatgagtttgactcattgtcttgattgggcctacgtttgggcttgtagtagctgaactaaaccttaaaattacatgtgtcctccttcagaaaacacggatagcattattaataaagattatatcgtttcccaaaattaaatagttattttctaaattttgctaataactctaaatttaaaaaacataaccaaatttaactttttttttttttgaggaaaacaaattgttattattaatgaatacaaatcattacaacaacattttaacttggaagtagaacaacctccaataaatacaattttatccaaccaagagcaaattttgaaaaaactcacttctaagaaaaaggattaaaggtcataaacatcaacaataaaatcttaaaaataagacaattgagatgtgtttacccattaatgatggaagaaactagtaacgaacattgtttcaacatgtttaatttgcaaacaatgttggagagcccattgcagcaaagactttgttatgcggccataaactcttgatttttatataaaccaaatactacacatagtgcaaatgaaaagttgaaactttgtttttgacaagtgaaagaaagtccccaccaaacgtag

SEQ ID NO: 48931 - DNA, 3421 bp, Cannabis sativa
  modified_base (2427)..(2434): a, c, t, g, unknown or other
ccatatttagtggcattattttcttgccatatatatgtaaactatagtatattttcccatatttatgttaatagcccgaaaaggcatgtccatatctaaataataataaggggtttttacaaaaatattagattctaagtaaaagtttacgattttactatcacacaaaattttttacaaaaatattatttttttataaaacaatctagaacaactgtaaaataacaaaacagaacaattaaaaacaacagtagaacaattaaaaaacaatcgtgaaacatcagtgaaaacttaacacagtacacaatatttttttttaaaaaaaaaaagaaaaaaagttgaaaatttcaatatggtgtaagaatctctaataataatataatataacaaaacatatgacccacatgtgcatatttgacttaaaacacacataggccaaaatgcttttttttaaggttaaatattattttggattgtgtattttgtaaaaattataaattagaccttttattttattaaatgacaaaataaatcttgtattttctaaaatagtacaaatatgatcctaaactagttttttgtcaaaataaaatttaataataattcgatccagaggtgttataacaaaactgtagttaaattttttacatcatagaaaattgagcttagatattatttatcccattttaaaaaatacataatctattttatctaatttaattaataatttttacacaacacatcgtaatatttacatcaaatcattttcctaggaaaatacaatctcttaatattgcgtgatattgttgttttttgattaaatgttgtggtgtttccacagacttcatgttacaatatattgttgtgttttaaaagcaatgcaaaagtaatgattcatataaataatggccctaatattgtgaggggaggttaattacaccctatcactaaaagcacttgcaataataatcaattataagagtagagtgaaatgtcaacgaacgttgtctttgatcttaattctcaagtttggttcgaaataatttggactctaaaaagcatatacctttaattttaagagcatgggccagagaaacaagttgactcaataaaatttataactattcatatcatgatggagaataagagataatgcaactcttatcaaaaatacatgatgatgtgatataccttatatataaaataataatatatataataagaatatttctttatcaaattaatgtatatggagatgaaacgataaggcatataattaattagtcaaaaccagaaagaatcgagcaaagccttcggattcttgaagagaatagatgcttataactacaatatcatatgaataagtacattccaaaaggaaatatagattccttataacttgatcaccaaagatgttggagggcaatggttcatgaatatgcttattcaatttgcctcttatttagggcacataatccctcaatcattacactaattagagtccctttgtgctttatctcttatctatctcttttgtattattattaggaataattatggcgtaaatatttaggcatacatatttgaaatattgtggcggtaaagaggataaattcaatgatttattttagcgtcaaaactacataatgttaataaaattataattttcgtttaattttattaatacagattctattttaaatttattaaaaaaaattaagtacttatcttgggtaaaacaaagaaagaatcacatgtttgattttcttgggataatttgattggagcctccttttcttttgccttttcttcatttctaatacaaagaaaagttaaaaactactttttttttattacacattaactaaatataattccaaaataattttaattaataaataccttcttttataatcaatatagtaaatatatcctcacctaacttatcaaaattagaattttttaatgcacataatggagatatgacttataaaattgaatataaattaaagaataataaatgaagataaaaattaaaataaaaaataagtatagaatgtaatttcctaaaaaaagaattcacacaaatctccagttctgactggaagtagttcataactatatcagcgcaaacaaagcccaaagaagcaagtataattatggcccatatgatccaaattgaagagtagttatggccaatatgacccaaaatgaagagtaattatggcccatatgacccaaaatgaagagtaatttggccaatatgacccaaaatgatgatgttgggtatgagtattttggtccaaataatttattaggactgttttgcaaaactatcataaaatttatcttaatcggtcagtatttgtgataacagtcacaaggaattcattgatattatatagaaaaaaaaaaaaataaaaaaannnnnnnnaaaaataaaaaaaagaaaaagaaaaagcagttgatattatgatagcaaacaaactcattttgaaaaagaaaaaaaatctagaaacagttgggtttataaataggatttttaaagggaattttacatcaaatatcaatttttttggtaagaaaatatttatatttataattttcctacttaatttttttttactatttttcatttattaaagtttcaaaaaaaaatcttctttatattttttaattagcttttatttaagtcagttgttaatttttttttctttctttctctttcaatttttcgtttttattttttttccaatttctctctctctttctttttttattattttttttctcaaactaattttttttgtatatgtataaatatataataagcgtatatttttatttctcatttttctaacactttttcttttccttacaaaaaaattaagagcactctctaaagtctttttttggtaatttagatgtcaaaatattttttatttatggtgagatttctttgtgttaataaactgattttctcacataaataatgtatttaaatgtttttttctatcataggaaagaatttttattcagctgtctattttctaagtttggaaacttcttaagagaagaaattctcttatggaaagttaatttaatatggaaactttgactatagttatttctctttaatgtgtttgattgtgtcttaataaaatcatattaagcacactatttttgacacgtatcaagtccatatacataatcggacaccattttgacaagtttcctttttctaatctggtttgttgctgaagaacctgtctctgatgctgcaaaacaggattatcgtttaagaaagtctgtacaactgtagaatcgactttgtagctgtctctatggttcctatgttctataaatagaacctagagagcagctaatcgattcaactcttctagctttttttttttttttt

SEQ ID NO: 48932 - DNA, 1310 bp, Cannabis sativa
  modified_base (199)..(208): a, c, t, g, unknown or other
ttttgtgttccattattgttttataaaaatacagtatttttttaaaaaaaatcgtatgatagtatttttgtaaaagttaccttaaatttcagtatttttgtaaattttctttaagaaaaaaatgctttgatgtactcttatttgttttggcaactaaaataattttttagtttaatttttttatagtcatgtacgttannnnnnnnnnagatattttataaaattttaagaaattcaaaaaaaaaaaaaatacaatataaaaacaaatgctcaaatagtctattttaaacgtgtataaaataaaaaagtcacgcgtgcaactgtctatataaatccagttttcggcgtgttaaattttttttattttctcaaaaatttaccagatgttttaaataactcaacaaacacgactatgaaaaaaaatttgaatgatctttttgtttgcgaatactgaaatagataaaggtacatcaatgcatcttttatagggatgcattgtagaattttttcaaaaatttatatcgaaatttagtttttcttttttataaattttcaaaatactctttttgtatcttttatttataattttactgtctaaaatttttatttataaaaaattcttttaaaattttaaaattataaaaatatactttgctcagcaaaaagtaagaaagcaactaaaaagtaataagaaattaacctcacgacaactataaataaactataaaataacaaaaaataatcaagtatattgtttttattgaaaaaatatttttgtaaataaaaaagttaaagtgtaaaaatatatatatattttttgtattgatgtatttttgtattttttttaaaatttttttatctattatgtaattttttttttatataattattactattttaaaaaaaaagtttgatgagaaaaaattgaattagtttaggtccacaaagtattttgtcactagcgaaatatggagaaaaagaaaagaaaagaagaaaaccaaacattgaaagtaaggaaaataatatttagaagaggcaaaccatagtaaagcacgaacaacaacaacaatagattttcaaagtaaattgagtaatttgctgtataattacttaactttaattttttaccgtaataatatttaagttataattctggaactatgtaggtacttaaccgttaaatattaagccattaaatccacgtgttattttcttattagtatctttgaactaaatttttttaatgacttggaccgatcagagattgccacgtgacaatttacttaaccattaacagtcaggtacttata

SEQ ID NO: 48933 - DNA, 577 bp, Cannabis sativa
ctagagtcttgttgttgttggtactactagttttgttgaggttgactcttctgaggataaaacccttgttgttgctgattaggatattggttttggaaattctgccgacgactcccttatttaaaaccataactattttgatagtacccaatggcttaggcttgctccattggcagactgtctacatctacagggcaagtgtcagtagaatgaggccctccacacagctcacagacgacttgagcttgttttgcttgagcagtcaccaacttcgttaaggcctccacctgggctgtcagcttagttatagtatccacttcatacatacctgcatcttttttagatggacctctttctgttgaccattgttggttagtcatggccatctcttcaagtaactcaaaggcatcattcacactcttcctcatgaaagccccaccagctgcggcatctatgagtgttcgagtgtcgttaatcaatccattgtaaaagttgtgcacttgcagccacttctcaatcccatgattagggcactttctcagtaagtccttgaatctctcccatgcttcataaagag

SEQ ID NO: 48934 - DNA, 1513 bp, Cannabis sativa
tggtggaaggaagaggccagtgcccaagggtatcgtctatggtaagcccacaaaccagggagttacccaattgaagttccagaggagtaagaggtctgttgccgaggaacgtgctggacgcaagttgggaggtctcagggttctcaattcctactggatcaatgaggtcaatatttctgatcttaatagttttgaaataactaaaagagttgcaagatgcatttttgagacatcgtcatatccatactctgtcacgggccttagacttggcgatctaggctgttaatcttaatagcttttaaatatattatctgtatttttgtcactgagtattttgctaatgcaggattccacctacaagtactttgaggtgattttggtggatgttgcccacaacgcagtccgtaatgacccaagaatcaactggctctgcaaccctgttcacaagcacagagagcttcgtggtcttacctccgcaggcaagaaattcaggggtcttcgtggaaagggacacaggaaccacaagaaccgaccatcccgcagggcaacctggaagaaaaacaacactgtctctcttccccgttaccgttgattttggtcatactgttttgtgtttttgggtcattttcaggataattatttcgagaacgttgtagttgtttttgtgtttgaaattttggagattgatataatacttgagtcatgtttcatttgaatgatttgctatctaatttaatatatctagtttttatggcatttgaatggatttagtgttttctataggagagacatcaattaatattctcttatcctatcctctttatggacataaagttttctaaattatggtatttttcttttctatatcgtaaacaatattctgacttgaggcttttatttcgtttttcgggccattctttcactttgcaagacatgaagtgtactctcacatatacaagcctatttcacataaaacggtgtgaatacagtggtttgataggttattgaattacaacagatcttttacttaattctaaagctttccattgatatagctctctttaagattacacaatgcttgtctgattgaatcctcgtcttggctcgaaaattttaggcatattagacgttgagctacatggtaagccatttggattggatgataatgttggcagtttacttccattcgcttcacttcctagacattggaaaagagaccacaccaatcaattcttaggttacattccattatcatataagaaagcttcattaataaaatctgtctcgtagtgaaggaagtttaaccatggatttctattaagaaataatcaaattgtaattgagcttcttaatcgcaagagaacaagtgttaggtgcaagtcacggtttatggcattttttaatagatattgatattgatgcatatcgattcaagttaattttatctcccatgttccagggtctcttaatttcggtacaatataacataatctaaacagtataacttagaaga

SEQ ID NO: 48935 - DNA, 6518 bp, Cannabis sativa
tgagtttagtcaaaatacaagtctctagcgagttatataatggagtgtaagaatgaaaggagattcatttgttacttggatagatcctgctccaatcatgtaggcgagtgatccatcaacaattctaacaatggtgggcttaatacacaatttgaatgtatggaaaacctttatcacctggcctttggttgaaagccttagaatccacaatccaaggatcggtgttggttgaatttgcaacaaatgctaacatgtgcttcggttgaaggtggaatcgaattttgcgcaacagatttctaaccaaaaagcttttgtagtgcttcacttgatttttcgagaaatgaccgacttaattggatgattctttagaggttataactacattagcacagggtttgggttttagtcagcaggcttgtcataaatcctccaacaagtctcatggaaatgtctaggctttacatagagaacaccatggtatatccccctcccgaggcctactatcttgagaagaagtgacatcatcaatttttgtctgctttcctcccttctatcaccataaaaaacttcactaacgggatgaaatggtttgatgctcataattctatccctaatttaatcaaggtccttcttcaaacccaataaaaatctaaaggttctcttttgctcaacaatgttcttgtaaagtgcagaattagtggacacttccaagagtatacgtcaaacatatcaagatgtttccaatagcttgtgatgttgctgtgacattgtgtgacgttggagtccccttgctttaactcgtagagcttggtcttagtttcaaaaagttcaaaaatgttttcagaattagaaaaggtgtcatgggctgcatcccagactccttgggctgtacgatagagaaaattttctccaatcttaaacggtgttaattttgggcatcactatatggttctttacttttcattaacatagataggatcagtttctttaggttgcacgacgacacaagtgagatagtcatcctcccctaagtcggagatacacatgaggacggtctgagaccattgaaggtatttgtggttctgagtttgtgataggtgattgggagaggagcactatcaagaacttgaggaggattaggagtcttggtgaaaacagatttgattcggggttgaattttcgaggttagggagtagattgaagtggagtcagcaagagaagttagctagagaagacatcactaatggaaataattagtgagggacaacagagaaaaattcaagtttagaggatggtgtgataccaattgaatttctgaatgcaaataattagtgaggggcaactaagaaaaattagggtttggaggatggtgtgatcaaggttttgaaaatcggaattgagtactgatgcgttttcccttagtcccacaacaaggtgtatgcctcgaggcgtatcgagacctacgcctcaacaataagaagaaaaacttcataaaatatcataaaattcataacaatcaacacacaataccataacaaggtcataaaattcatgaaaattactagttaagtcttaaaatcataaactaaattcataaaaggtaaaaaatttaattgaaaaatggagaaatttctaaacatataaagaagaaatatatgtgcgaggttgatgaggactgaggaggaagagacttggctgagaaggagagagatgagagattccatatgagagggttaggttttttagggctatttttcctatcttttctatttctattaaaaatttgttataatgatccaaactaaagtctattagagtcatttcaaagtatgaaaatagctattagaaaaaatttaaaaaatagcccaaatctgcccacaaaaaaacagccctaacacacagcaaaaaaaaaagcccattgttgaggcgtttgcccaacctcagtacgcatcgcctcagaggcgtgcgcctcaagtctgcctcatcaatgtgaggcgtagcctcaaatacgttttttcactgcctcaccttgaggcgcgcctcgaccaatttttaaaactatgggtgtgatactaagtgaatttctgaaagccctagaatctaggaaagtaaataaaagaaaaactaaattaggaaagaatataaagaaatcattatatacacattaattctattatttttacattttctattaatttttttactcattaaatttcattcatttccattcctattcattcccttcctcatcccctctactatcatctctcaatcagacagataagtctaacatatttaaaatcactaaatgaaaagaaaaattcatcataatggtcatgattaggtagcacataatatagtacggtatggtcatgcaaaattaagagaatttagaggtaaactagctgcaaaatgtaagacatagaatggaaactttttttttaaaagtaactgacttcatttcaagctaaaataactaataatgcttctcccaatcccaatgatatatgtgaccaacacttaatgcgcttcctttatggtccatacactttttcgaaactttctcctaagacaagtaaaacatgtaactaagtgaacactcgcatactaatacaaatgctcatccgtaggagaaaggttcaacacacatggaagttctgtctgagtctggccgtagtaaacatgcttgagatttctccactattttcttcatcacttatagttacaagggaaatataacttaccatcgtgcacatctaagtttaaatatacatctcaaccaatgttaatacatccttcatatggtatgttggtcaatcattccaaaggtattgtatataagttgcaaaaaattccacgcatttttagtagcagaagcatgaaaggactagacctgagatctatattcttgtctaactctttgctgtgctttctttttttatctttgttttaaccagattattcagtctaaatactattatttatcaaaagcatttcaaacaccaactatacatacatatcaatattaaatatatattttaccatacaagtcaataataagttgcaattatttaattttatacagcgaagagaaattatcttaatggaagagaataaaagaagtcgctggatgcgtaccttcactgaacatctgagaattcagagaatttgacattcttgatccatctctttcccaacgccactgcccctctgtttttggcgctaaataagggttatccctttcaggagtgaaggcttctagccgtccttcaaactgagcagaattgttatctatcatctggccagatgcatgatgcctctgaggagcaacatatgaattgacaccagaatcagcatactgaccctgccttctcatcataaactcaacaaggcagctcgaaaggtacacctaaccaccagagataagtcaagcacataaataaatcatttattgagtaattttccacagttcaaagacacacaaattattttgtcaagacaatcatcattaagacaaacaatggtcttgacattataagattgcaattgcaatgaatatcgtgcctttgatggggttgggtttgagttccaaattcatgataaggttttgtcattttcacaattttgtgaatttaatttcaatttgttttgaaattgatagatcttgacaagtattcagattcaacatacagaaaatccaattatacaagcaataagcactaagcacagcctccatacttgtagcactggggtacagaaagcaacaactagcaaacaaatttgtcaaatgttttttgtaagaataaagattttaattgaaagcaagaaaccaaaatataagttatggtctcactacataactacataagcattcttaaaactacatttctggttaaaaaatacctaaactggcgaaaatgaataatttaatagatatgcaaccctgcaatgtttcaatgtaaaaaataacaaaaataaataatgacaattaaaggaagccttatagatagcattgccttaaagttcatccttccattgcttaagtttaaaatatttttatccataaaaaataaaagaaaaaaaatatcgtgaaaagttgtcttcaaattggcttcataaaaaaatattcataatatagctattaaaaaatctgagtgagttataaaattatcacaaatgaaatttgtttaaaactcactatatcaatttattactttcacaccttaatctaattggttgaggaatcaattggagactaatgaaagaaaaatcactatcgagttagtttactttaatagaaaagtgaacaaatttgctaaccataattatttaaagagcattaaatcaaaggatatgatagtgaaaatcaggttggtgtattcatgaaggcaacatgctataaaggatgacccttaatagtatgcatcggaatatttcacacgcaatccatatggtcaataaacaggtgcgcttgacatctatataaaagcattagtaagatttcctttgagatatctagctaacaatatggtccagtctattgtctcttgatagaaatttggagtcagtcaaggtggcggatgagatgttgacataaaaaatttataaaatcagcaaaagtggctctatggttgtaggatgtgatcagcgtctcttagtgctggccagaatttttaattggcgaagatggtattctaccaagttcaaattataaaacagttgggtaacacaaaatcatagagtaaattgctaaaaaaacacatttaaaatttgtataggatccagaaaaaagatgtacctgaattgcgattcaaacttattccaaataacaactatatcatcacatgaataaactttaaattacctgaactagaaaagtattggtagtatctgtacacacaactaggtgccaaatcgatatctctcagacataccatacttgcaaacaatagttgattaaaaatgtgcttcatttacttattctcttcaactcttcaacagaagccttacattgatgaatagactaaaaaatattcaaggtaggaaagccacaaagagagtattataaacaacaataacttaaagattataggtcacgatgattttcattcccttcgttctgcagctggcagctcggcccacatgcagtgtgtgctcctggtctttgttgtgagaagaatcgcagtatatttctcactctaaatcagtaagtgaattctaagagtgctatctatattctcagtgagaaaaacacaaaagggtgcatttagattttaagctacacaatttcgttagctacattatccaattactgaaagatgacatcctcctatgtggggtgtaggaaaaaatttccttaaaacattttctcttcttctattttccgtggtagtttaaaccatgtttcattttgttcactatatcacacttgttcctagtattgctaaacaaatttcccttatgcaaaacacacaacttaaatttctaggacaaataccaaaagcttgagaatccaaattcaaataaccgaaaactttcagaattgagctaatacataataaacatatataatctgcgcagagaagcacgaacacatacatatcccacccattctataagaaaatccatcagtttcttgtagacattttatcaaacgagtagtatgcataagctaatttcacaaacaaatatgcaattcaattaacaaagaacacatctaagggtctccataaatgataacagaagtccattaaagttaaattcaaggaccctagaggtaccacgttcccaacactgaacaatccacatatgaagaggacaaaagataataatcgaacatcaataaagaaggatttttcttacctaaaattatcaacttttgaagatatattgtgttccaattgagagaaagagctgaaaatcgaagtgggttgagttttcgagaattttgatgcaggattttatctacttcagctgatgatttggaattggaccgacatttggtagtaggtttttctgttaataaggtagaacttgtttactcgataaataaataaattaaacgatttaaatggttaaaaaaaaaaaaaaaaaggctaatttagatttttgctccttaaattttgacatatactaaatcatgtccttgaacttttcaggttgtaaaatattctcctcgaactattaagattgttagatttgagtacttttgtctaattttattaaagaaagtctgacgtagatgaaaatttaaggggcacaattctgtacatattaaagttcaagggtcatattttataaatatcaaaatttaggggcacgatttagtatataaacaatctacatattagcaaaattgaatgaaattataaaaaagtctttaaatccaacaatcttaatagttcaggggaaatttttaacgacctcaaaagttcgggagtacgatttagtacatgtgaaagttcaaggggtaaaaatccaaattagccaaaaaaaatacataagacactatttttttt

SEQ ID NO: 48936 - DNA, 918 bp, Cannabis sativa
atatattattgatatgatttcattttattttccgcatttcatatcattgtatatgctatattatatacactatatatatagtctaacaattaatactagtgctcaaggcttttgaaggccacccataattatggaagctagagtgagcatgggtggaaaagatgtgaagcaagagtaggctttttatctaaaatttcacaaattttgttctttaattgctacatttcagaacaagctaatcaagatatatctctttatattctctgtagtgaagttcaactagtgactatacaactattaaacttgaacatatatttatagggtttgaatattttcagattttccaaagtgagatataattttgaaagatgaaaagtggacaagcatgtgatataaagagggttttttaatgcgaatgtatattttttttattgtacaatgagtcatgtaaaaaaagaaaatgataatatgatatacccaaataaatttgtgtatgaagtgatttatatatgtatatatatatatatatatatattatgttaattgtgtacgtacaggaattgatttctctatatagtatgtataaaggtggatataatattgtatattttttttttatacaaaaaatattaatgattattgtgactaaagaaatatgtaatattattttgttatgattaaaaaattgtgattaaaaataaatgagtgatgactaaagattgttgtcactaaataaaatattaattagtgacaataacagttgtcactaaaagaaaataagttgtgattaagagcatctctaatgacacacattatcactaaatttagcgtaaaaaaatatttctactccaaccacaacattaaaaattaaactaaaaaaattccttattattacattaattttttaataaaataaaa

SEQ ID NO: 48937 - DNA, 1442 bp, Cannabis sativa
attcagttcaattccctgtggttcaacctcacctgtgtgagtttactacttgattacgtgcacttgtcgtattgttcttaattttcgtaacatatgtacactttttctatgtgttatatgcaccatattataccatccacactcataggaattttggagagcaccaataagatagccatcacaaaatttatcacatgtgattgtctttatttgctcatctagtttctccatataaattggtgttgtcttggcacaccatttatatatatgtactaggtgccatacatatatgctttctctccacttcttttattattattattattattattttactaataagtgtgtccatcatggataacatactagcgctattcaccttcatgttccttatttttttgaagatgtaccatagcgactactcgaggtgaccaccggatagacgaagacctcaactcatcttgggacaagagttctaatagcggatttaaatattagggagacaataggcagtgaggtgtacgaccgaaagccctagaaggacttgaggtggaacaaatggatgtaaagataacatttctacatggcccacttaaagaagaaatctacatgagccaacctaaaagttttaaaactggtaatccagatgaagtatgtcttctaaagagctccttatggcctcaaagtaggcccttaggcaatggaacaaaagatttgaccaattcattactaaaattagttttgtcaagaataattttgattcatgtgtctacctgaatcataatatatacttgttgttatatgttgatgatatattaattgtaagaaagagaaaagtagagattaataagctgaagttgtaactaaacattgaatttgagataaaagattttggcaaggtcaagagaattctaggtattaagattgaaaggactgaactaggcataattaagctgcatcagaagaagtacttagagaaagtaatagaaaaattcaagatggacaaagccaaagtagttacgacccattagctgctcatttcaaattgtctcaaactaagtgtctaaaaatggagaaagaaagaatagcaatggatcagtagcaaatgatcgatttgcatttttcagaattatcatcttagtttaaagttctttgagtatgtgttactcctcctttcgccatagccagaagaatagaaaggacacagaaaaacgaagaagaagaagagaaaggagctcaagatcttcttgactctgataccattttagtaaagaaaaacagagtaatacagagtgagaaaagagagaaaaaagtgtttcattgattagagaatcatagtgttacaatgagcttatttatagtttgatataatatatataaatgtatacataaattgcaaggtgaaaaccacaagattattctactatggtttaaaagacaca

SEQ ID NO: 48938 - DNA, 791 bp, Cannabis sativa
tcttttattttgcacacttttatttttgtcaatagtttggacatctttgaatctgcagaaacatagaaacagttttatcactatagaagacttcaatttttttaaataaacatggaattaatactgtgagaataccagtcggatggtggattgcttatgatcctgatcctcctgctccatacattggtggaactttggaagctcttgataatgcattttcatgggcaccctaggattgatttacaccttattttagacaactacttctttaaatatacataaaagtatttagacaataattttcttatataactaaaaactttggtacagatcatacgatataagatgcattattgatcttcatgctgcgcctggctctcaaaatggcatggagcatagttcaagtagagatggttcaacaaactggccgactccagattacatctcacaaacaatgcatgttatagattttctagcctccaggtatttttgcacattattcggaatttgaaaattgtgttgtaataagtgaaatttgtgtgttataagttctgtaaactttaattgcaactttaattgctgagtctcttacgctcctgaggtaattgaaattttgggatctttttttatgtttgggctgaaaattttggatgaatcactgattgaatgaatcttctccaaaatattttgtttgattacatgaaatagtgactaacatccaaatttcaaagttgacgaaaaactctgcaactgaatgaggtaaaaactactataatatttactttataaaa

SEQ ID NO: 48939 - DNA, 2744 bp, Cannabis sativa
tgtctattccttggttaccctaaagggataaaaggatacaaattatggtgtttggaagagggacatagaaaattcataatcagtagggatgttgtgttcaaggaacatgagatggctatgaaactgctgcaatcaacaattgacaaaatgatcaagatgtgacaggtttggaaattcaaggcaatagggaagaagatgagggtgcaaatcaggtggatacacaagaactcactcattcagagacatatatagaagcaactaaagatgaaacatcactagctgattcacaagattatcaacctgttagagacagagagagaagacaaataaagtcaccaaaaagatttggctttgctgattgcacagcctttgctcttgcatcagtagaggaagttgataacacagtattaaacacatatcaagaagttgtcaactcaaagaataagaagaagtggcttgctgcaattgatgaagaaatgtgttccctataaaagaataaaacatgaaaaacagtcacaaggccactaggacagaaactaattggctgcaaatggatttttaaggaaaaaggaaggtttgccaggtgaggaagttagattcaaagcctaattagaggctaaggggttaaatcaaagagaaggtgttggatttcaatgacatcttttctcctctccagtggttagacaaacatccataagaatcatgatgactaaggtggcaaagtatgatctagaaatgaaccaaatggatgtgaagacaacatttttgcatggcagacttaaagaacaaatttatatggaagagcctgatggatacaaaagcagcaatccaaatcaggtatgcctcctacaaaaatcactttatgggctcaagcaagctccaaggcaatagaacctaaggtttcatgaattcatggtcagtattgggtacaaccaaaattattatgatccctgtgtgtattacaatagtgaaccaatctggttactgttatatgttgttgatatccctaatcacaaaagccttgtgtttgtctttattagttggtataggttggataggtcatgcaggctccagtctctcaagcctgatgaaaattggggcatcaccaacagttcccccgcgggcaagacactactgaagagcgcggtccctcctagtctctgtctaagccaccacagccaatgaggactttttagaagacttgctcttctccttctcaacatcagggctctttctctttctcttctccttccctacaagagcattgcctggatcctcaagaggattagccggggcaacaacaccctcaccagaaaggtacatgccatactttctgaagttctcctcacagggcaaatcataaatgttatgccgagcagttgggagtgataagatatgattggccctatcccttaattttaatttaggggtcgatcgactgtaggttgggacccagtgagaaaactagcagacaccttttacaccgtacgccataaagtaactattggtatagcctccaatctttgacatgggcgtgtcaatagtgccacccaactacttatagccctgctggctaaagtagaagtaaccaaacctatactttcctggactagatttcagctcaaaataataattcaccatgaaaggtgtagactgcggccaactaagcgcatcgtacatgacgaagagcactgaaaggtactttatcccctttggtgtaatctaagtcagacataacttgaagaagttagctatgtccatgaagtatgagtgcagagaaagtacatccccttgctcgacatgggggcgagaccacgctatgcagttcggctgaggatggtgagccaagtggtcttgagcaggcctaatacatcaaacttggctaacaagtccactagcgatgatgttgtaaaggttggcagccgataaagtagagcgaggagatacccatctatctccattccccatctgcaaaacccatggcactgtagcctcatcctcaatatggtcaaccccgacctcagaaggttgacccctactgttcaaaggcactctagactcaccataagagcaaacaagattaccctataccacgttgcactccataggattcctcctagcagccttaggctcttttttaggctcagtctgatcagactcctcctcttggccggccatgggctcctttgcctggctagcctcaagttatttagcttgttcaacttgataaactcttcctcttgtcataagcttggtaatgtttaaaggtagtatattaaaagaatagtctaaatttttaagtatgttttaacaaattttccttttgttttgtatgtattctattttcttgttttgattgttattcatttatttgttccttttttgcaactattggtgtttgcaactatttgtgtaaaggttcacctattgggttttttcagtaagtgttgagaaatctaatttgactgagaaaaaaagaagagaaaaaagaattgtttttatttttattttattaatttttaaattatgttttcaatatttaaaaatttaaaataattggactaattaagtacaaataggtggctgcaacgtagatttctagttatacttacttgttgaatatgtatttttgggtttatttgatacgtcatattacaccgtattgtattgtattatattgtattttatgcaatatgtttatgtgtggtattaatttttatgggcacttaaatatataatatttt

SEQ ID NO: 48940 - DNA, 850 bp, Cannabis sativa
ttttaaatggataaagcttgaataagtaaatatactaaaataataacaattaattatgtagaataattcagtcatgtaggtacaaagaagaataatcaacttttatataaagaagtgctttagaaataaaagtagccaacatcttctccaatgtagccacatgttatcaattatcagcaatatttttttgtattcttcctttaagagatcaaaatatacaactactattgtatgtcaaaatttgaacacttcctagacagtcatatcactttttttttttttaggcttgacaatataatatttaatttggaatgtacatatcttactacctgcacagattggaattgtcattttatatagaaataaccaaataaaatgaatcaatcaaagttctgtaatttcgtattaaactaagtagtaagtaatccaccaacattggtagcctggtcctgcataaatatattataagatcaataagtgagaaaaaaatgagttataatattttggaaggttgaattctttgccacgactagatatagatcacgttaataatagtactcttacattaaaaaataaatagtttttttttttaaataaaatatagtttcattagcatcaatttatatcatgtacaggtggcaatttcaccaaataattttgacaagtactctctaattatataattaatgaatagagtgagttaggtgattgtagtccctcactatttcacaaacgttttaccaaatcaaaacaataacatttttatacaaaatacacatatttacaacaacactaggtcgatcacttacgaaataaaaaaattttatgggaaaaaaacacgaaataagac

SEQ ID NO: 48941 - DNA, 1814 bp, Cannabis sativa
  modified_base (1772)..(1789): a, c, t, g, unknown or other
gatcactcaattattgtggaaggtacgtaactgcactattaacaatccctttagtgcagaaaacttattttctcaaccactaacaatgatttgatgacgagtcatcaaagaacaaagaagaaccaacaacgaaacaaaacaaaacaaaaccatgtcatacagataagactaaaacactcaaaattaagacacaaaaccaagattaatcacagtagcaaaaatcgaatcaccataacaaaatacaacctcgaccaaattgcacctatgtccagaataggctggcgagtcttgccaaaaaagacaacctctgataactataaatttaagaacaatgattaatattattattaattaatttatataactattaaaatattatcatagtcaaaatcaaaatagacactaatagatgggatgacacgattatttattttagtcctatcaaatccaagtacatcttatactcaaatatacaaaggatattaaataataaaaaaacaaattacataaactattgccctttatatttccaattaagccaactcactaaccttagtttttgttttataatgaaagaccatatcatatatttgagatatgcataacattcaacgttatgctcataaattcagaattttgaatacacagaaatataatgtgaacatggacaaaaaaatatatattataattttttataagttgcttagctgcataatattgaccattaattaatttgttaataatttattaattaatgtccataaaaaaaggaaacattaatgtagtttcagctgtaccacagaattaggtaaacttctgccaacaatacaattatactgtcacctaaataaataccaacatttcttttttttttcttttttctttttttttttttataaataaaataccaagatttgtacatataataaaatattgatataaaatattttggaaaattgtaaaaaaaattaaggacattgaggatgtgataatgcttgacagatcagcagtaaagtatgcaaagtacattactctgataccttttatttttctatttatttaatcatcacattaataaacatgtaaacaacacccaacttggattcatatgaccaaatcatctttttatttatttatttatttatttatttaagtttttatatattacaattatattttacttggggctcgaacccagaacctccaacacaccccacctatgatcacttaaactagccttaagtagttatataaccaaatcatcaaatatgaattatgtttacatatttgcaatggtggtaagtttgatctttattttatttttagtgaattagtcataaatttataagttttagtaaatgaatcccaaattttaaatatttaaaaaaaattcctaattttaagctaatgttgcaaaaaaaaaaaaaaaaacctaaaaacttcatagaataatttgcttaaaattaaattagaaatcaatttataaaaatttatatatttagaaacaaatttgctaaaaaaaagttgtctaacatttccattaaaaaaagcttagaggctagcgttccaaaatttataagtttagagcatctcaaatgaagtactaaataaatagtgtaatgttatattttaatattttgtaaaattattctctaataatatgttaaaacaataaaacttgtataaaatttaacatatattaaaattaaactaaatttataaacaatattaaataactataacatgttatgaaataatataaaataatatannnnnnnnnnnnnnnnnnaagaagaagatgaagagagaaagag

SEQ ID NO: 48942 - DNA, 911 bp, Cannabis sativa
aaaagtctttaaatttaacaatttaatagttcagggagaatttttatcggccaaaaaagttcaagggacatgatttagtacatgtcaaagtttgatggagaaattgctaattagccatatatattaatgttttataagttacattttaaaaaatatgggactgggtgatttatatatagaaatgaaatatgaatggtgatttaaggtattaaagactttatttaatactaccaatatttatttataatttctttaaagaaaaaatatatatccactagtattaatttatgaatattttaatttttgaactcttaataataaattaagatatgttaaattaacttatatattaaataagtagagtataatataattgtacatttaatatttattttaatttatttctgtgatgttgcttcttaaaggacttaagttgttctcaacctcatctggtttactgccaaatgaacagaaaacagccatttattgtgcaggaatgcctgaatttgaagtccctaggatccttgaagtatctaattttacaaggagctcattaccatttagatatcctggtatccatgtttgttcaaagaagatatctcggactgaatgccaaagtctgttggaaaagatgacaaatagaatacgaatgtggagtacaaggaacctatcttatatggggtagagtaaccttgatcaattcagttttgctagctatacatacttactgggcacatatttttattctaccaaagaggctcttgaaagatatagaagtaacatgtcgatcatttctttcgaaaggcactcaagaaggggttggccctggtttagtggcctgggattcagtatgcagacctaaagcagcaggaggcttagtgtaacgccctaatgctaaggcacgctacagt

SEQ ID NO: 48943 - DNA, 1371 bp, Cannabis sativa
gctgaaattggatcctctaacattgaatatctacaactccaaagatatctgatactaagaataaaaataaaaacaaaaaatctaagtctctaggtattgcaaaagcaacaatgaatcatgaaatatcttctaagaaaaatattaggtaaaattttgtttgaagatttttttttgtgtagctaaaatttttcccatgccactttgtatatatatttgtgcatatatactatgtccttttttgtggcagtagtttgtttatctcaattttttaaaggttgcttgtatgtaagtagtcatagatccaaagcttttaatatattttaattgatttataatatgagttgtttagatttgtatgcacattgatagtgtttagtgcttagaataccttgttgtacaattatttaaaagaaaaatctttcatttttttttctctctaaaatgcctccaaattatagatttccttgtaaacacatctcttcttttgcattttgttcattttgtttaacatgttgctattcaagaaccaaaatgtgagaacgttttcaatatgaagagaaataggcatctttttcttttgctccatagatagtaaaatgccttcatgtgtatgaggtagctatatttcagttgcctatattttcattataaaactaacatttatttactggattgtgagatctcaaataacacaataatattaatgcatattgtgcaatctcttcattaaaaattacaaaactaatagcaagaaaaataaacatatggcatagaaataatatcgataaacaaagtgaaaatataattgttatacaagtaatctttatataattcaatgaattaaaaaagcataaaatattgagtaaatatcctaataatacaaataattctaaaagcaacttaccttgattgcatctgaaattgatagaagttacagaaatcttgaacagattgctatattcttaagcctataaagaaaaagaacatcatattaaagaaaattaataaacaacataaacataattaatgtagataatcaatattttttagcatacaaatagaatcatagagcgaagaaacattaaaaaaatcctgttccaataaacataattcaaataaaaacctaaacactataaatctgcaaatgacagttcaactataagtcactatatctacaagtgtcaaacaaaaacataaacaaaaggcagcaccactaaattttagcattatttcataatcaaggaactaaacccacgtgcattattcaaacccatgatctttttatgctgacaaaaattaatcacaaacacacatttctatcatttaacataaaaataaatattgaagtagtataatacaactttcaaaatc

SEQ ID NO: 48944 - DNA, 916 bp, Cannabis sativa
caatctcttgcatgatatttcctagtgtttttactccttacatacattcattctcttaaggactatagcaattgccttattaagaagaagactaaaatattgtaacaatagtctcttacttaaggagagattcgaacttgaaatcttctgaaggaaaattacatacacgaacttgaattacgagagtcaagagtctttaaatatttacgagtgttgatataatgacttgtcgtcgtagggttagaatccttgttagtagtctcaggcgatggtgaaggttgcttttagcccgtgagcgatctaattataggaattgtaatagatagggcgtcaatgagtttttagatggtattcacctttctaaatggtaatgttctagttcataatttttgtgtacatatcattactcgttatttatctatcaagggtaaatagttgtttctcaaagtttcatatgatcccaatctcatcaaaattggacaatggtggattgtattgggtacatagatagctaagccaaaggaaatactaagttttgtattgaaaaaaccataaatttgcaaaaataatttgatattatttaccataataaaccaaatcacacaacaaagtgcaaatactcctaagagataagaagtgaaagaattaaggtacaaagaaaacaaggaaaaatcctcttgatgattaaacaaaacacacttgttaaaattcagtctcaaaattctcaaaaacttcttaattattaaggtatgagaacactatgaatgtctactacatatgtgaattgtgtggctgtaaggatgattatgaatgcctccatccattcttctctaaaagaagaaaactcaaaaacagagaaaataaaaatattaaaataattaatgtatttatgcaaaagaatttgtataggactatg

SEQ ID NO: 48945 - DNA, 2251 bp, Cannabis sativa
agggtccaaaatggtatttacttttttttttttggtaaggatctcccatttaagtttagttttttttttctttattggtaaggatcgcacatttaagttaggttgcctgcttttaccatttcaaaacgctcgagattatcttaccgtacttaattaattgccgtcccattacaaaccttccatatatgttatgccaaaacataatataaatatgcaaaattggataacgaccaaatccatggacaaaaactaaatatattaggacatattattatataaaatcaaagtatcttttcattaaaaaataaaataaagtccaaagtgatatactacatatatacattcacacatgctggtcaaatgactcaaatcccactctcctagctgctactctaaccaaaaaaaaaaaaaaaagctcaaaatcatatggagcaatttgaaccagcaaccgggggcaatcaatatgagaaatcctttgttcaaccatccatggaaaagttcgatttcaatgatgtttactttaaggaggtaaagattatcatgtacttacatgtatagttatcatacataaaatttacacaaatgtttaaggaaatgaagtttttttttctttattatttaattaggacgaagagagcttatcgaacaatttggtgagcaatgggagcgtggatttccgagggagaattgcctcaaagaaaatcactggaggatggaaagcctctccatttattataggtgaattttatttttaatgataatattgtgcttaaaactaccctaattgtaattggttaacaatattctattaaaattattatattaaattataacacatttggagaaatgttgaggcatatatgatatgtaattatgtatattggcagtgaatgaggtagcagagaggttagcatttttcgcgattgcagtgaatatggtggcttacttggttttcgaaatgaaaaaatcacttccggactctgctactattgtcactgattggattggagcagcttatgtcctcacaatctttggtgcttttatggctgacgctttcttgggccgcttcagaaccatcatggtcttctcttgcatttacgccctggtattcttcttttttatttagaaaaataccactttttttgtatgtattttagagaaaaaccatttttttatatataatattatatgtatgaatgcaatcgaagggaatggtgctgttgacactatcagcatcattggatagtctacgtccaccaccgtgcgcggtgcggccatgcacacaggcaacatcgagccagaataacttcttgtacgccgcactagcactgatagcccttggtactgggggaatcaagccctgtgtttcgacgtttggggctgaccaatttgacgaggcggatagcgaagaagttcagaagaaatacgccttctttaattggtttttcttttcgatcaatatgggagcactcttagctattacagttcttgtttacatacaagacaggtttggctggatttggggatttggaattccaactgtgactgttttctgctcaattatcatcatgcttgttgggcttagattttatcgatatcaaaagcccatgggaagcccatttactcggtttctccaagtccttgtggctgctttcaggaaccattatagaggaatagaagtgggccttgccactgagctgtatgaggttgagactatggaatctgatataaagggtgcccgaaaactaagtcataccacacagtacaggttagtaattcaatcttcctaattcagccctttctttcacagcccacagctcacagctcatgtctttaaatatttggatgttggattttggttgccaacgaaaaaagtagtattgaaaataaaagaatcaatttttcaatgtttggtatgaaaaatattgttgaatcattttttttttttacatataattttttttttttcataccaaacattagaaattgatttttttattcttctatatttctttatctccacatcaaaattcaagtttcaaatataatctaagaaaataattctttttaatatttatattttagattttcttttaaggagaattatcccataattatatactattttttaatttttttttttaaatttatatttttatgtgagttgctatgtagattttgattgcaatttaagttttcacgttgaattctacgtgtgtttctattagattttcgtaaaaatacaaaaaaa

SEQ ID NO: 48946 - DNA, 1858 bp, Cannabis sativa
cccctaccaaccacctctcctcaagatccaaaaaccttagtccctttcattcccctcgattcgtcgtcttccaccgtctctttgcaacttgctatcgctagactgagcagtcacttgcacaagaagagaggaagaaagatcatatttagatttagggtattaatttgtttattttatatttttatatttcatttattttataatatttaaataattaaaactaattagacttaataaaaactaacatgtcaagtgtaaatagtggcagttctagttagcatttaacaatcaaaattaactagaacctcaaatttacaaacaaaatgaaataaaacgagtattgcaaaaaaaaaaaaaaaaaatagagagttaagtgtgtaaaaattggaacataaaggaatttggccaaatataatacattttgatcatcttagttttatgtataagaaatcattacattctagttatcacacctcagaaatctttccctcctgtaatgagaattcaagcatcattcccagcaccattagccatgttggaaaggcgaggaactacaacaggtccgccacgagctttgtcaacagccacagttatcctcaaaggtcgacccagcaatgcctggaacaaaacatagatcatgagcatggtttctttaaacaatcaatacatgacaattatattagaacatgcttacctttccatccatggcatcttttgcacttaaggcatcatcttccttcaaatattgaacaaatccaaagcctctagacctaccggagtctttgtcatatattatcttcactgaaaaacaaatagaaacatatacaatatagagaacatgttatattcaaccatatatttcacacacaagtcaattgttttttttttccctctgccccagttaaacgtttggaaactttctttcttccccaattgggattagacgaattttttcataaatcacttttaagttacaatggcgaaaatccaagtacttgagcatgaactagttcacttggtttcaaataccccataattgaaacaacttaaaaaggtcttacccaccagtcaggcttttcgtcaaacacattgatacatataaaataaaaagaaaaagaaaaacaattgtctccattactaaatcttttataccttcagtgacctctccaaaggaagagaaggcgtctgataaggacttctcgtcgactgaccatgataatcctgcaagacccaaaagcaccattaacagtttaagataatattgatcataatcatcaaggacgaggtggaaataacggaaatgaacctccaacaaaaagttttctatttgaggcattagaggaggaagatggtggtgaacagtatctcctccaaagaaaaaccggacttcggagtattgggaccgtcgttgatggagctcttctacacacaaaactcatcaaggtgttgctcatactgagccttactacgtttacgttacgtctagtagctttaaacttagtatttgctttaacaaagatacacacccatctgttaaaatttaaaaagtaaaaatattttttaaaaacatgttctattttttaaaaacatgttctatttttatttttcaattttttaattaagaatcaaaattttaaaaacaaaaaaaaaaatatatatttttaatattttttaaatagttttttttttttaatcaatatcttggacttcgatcatgacccagatccaaatgccccacggctctggcgctgaatccggtttctgacttgaacccaaatccgaccccggacttagacccgacgtagataaaatcaaaaaatgaaaaatgaaaatgaactttacagaacacacttttatt

SEQ ID NO: 48947 - DNA, 974 bp, Cannabis sativa
tttcaatttacgaaatatatatttttgttttaaaagaaattagaattataataattaaaaatatttaaataatatatatttactcttaaactttttgatttcaattttgagaaaattaatattgatattaattttaatcttaactttattaatttatttcttttttaaagagaaaaataaatttttttattaatagacaaattatataatatagttataacatatcacttaaagattaaaattaataagatatgcacactgtgccttttataaaaataggaatgaaacctcaataatacgttcaactaaaataccaataagctaccagcattggagcataaaaaaaagcatgaagaatgctagaactaccatccaaataaacatgtgacaaattacacctattaatgactatttaccaaagatcttctaataaaaattgggtaataacaaccctattattcaatctagaataaaaagaaataatcaaacaaccaacaataacgataacaatcataataaatgatcgcaccataaaccacgaggtcaataaaaatatgagaattcccccaatctaaacatgaacaaagatagtcatgctactagcacaaacatactttgagccaaatgagatgaccccaatgtcccataaaaaaaataagactaaaattcctgctatgaataaataaagtccaactacctatagtaatagcaaggtggtgtagcaacaatattatttaaaacaaaaatatacataaaaaataaaacataacaaataaaatagcacactaagaatattaacaccaatgaagatccaatccattactaatgagcaactcatctccgagacatacctctaaaaaaagaagaataagaaaaaaagaacactcaagcagaatgatatcaacaagatcaacaaaatcaagaatagtgttaatacattagatattatatgtaattaaactagatatttttct

SEQ ID NO: 48948 - DNA, 1651 bp, Cannabis sativa
tggtgctctcttagagactaaggttaaagggggaaaattacagaggatgatggctagtagttttactagtttggagttctatagtagttatgatattgaggggtatatttttgttctttggagaaagaactatgctcaggtggaagttatggaggagtccaaataacatgttcattgtcatattaaaatgatagggcaaaaaatagattattatgctactttcatctatggagcaaacactatagatggtagatgtgatctttggtctgccttatccatgattaatgaaactaaggcgtggattattcttggagacttcaatggtgtgcttcaccatgatgataggctaggggaatcctattagtgctactgatcttgctgattctacaagttgggttgctctagcttttgttgggccaatgaaatgaactggttcttcatttacttagactaacaagcaagatgccataattttttctcgtattgatcatgtttttcacaatgagacttggatggatgattttctaaatacctcagctcatttctcgtagaaaacttgttcaggccattacttttgcattgtccactcagttgttacagagaatattggttacaaaccgtttcgattctttaatttttgggctgaccactttgagtataagcaggttgttctcgaaagttggtgcaaacctttgaattttcatgggttaaaagggatttatctcaagatcacgaggctcaaacataaactcacgactttcaatagtcaatcaattgaaaatataggagaaacctatgagaaagctaaagatcgatttaaagaagcttagctcttttgccaagctcatcccctatatagacctcttcttaatagagagcacaatgcgacagttcatttccacaatcaagaaaagatgtacttgaatttcctaagtcaaagaagtaaaataaaatggatccaaaagtggggtagcaacacagtctttttccatgccatgttaaagaagagaaaggatgataataatattgtttcttttgttactgatcagggcactttgaatgatcactttccagatgttgtctaattttttcttgatcacttccggagcattatgggcagagctagagcaacttccttagattcaacagaattgcattgctatgggccccaaacttaaccttgaccaacatgtatatttattaaaacctttctctcttaaagaagttagggatgcggtgtttagtattcctagtactaaatctccaggtcctgatggatttgattctggtttttttaaatctatttggtttgaggtggggaaagatatagacaaagttatttctcatttcttttaatccaatctgtgacctgctgaacttcacaacacgaccctatctttaatactaaaaatagatttccattcacaagctatagattatcagcccattgcttgatgttcaactctttacaagtgtgcctctaaactcttgtgttcttgattgaataaagtcctcccgcgtttagtggatcagaaccagggtgcatttgtaaagggtcggtctattgcctacaacatactaattcttcaggacatatagaaggactataaaaggaagaattgctctgcgaggtgtaccattaaaattgaca

SEQ ID NO: 48949 - DNA, 2785 bp, Cannabis sativa
aacttgccatttttcaaaacaaaaaaagctccctttcgtctctcacaataattttgcaattgagacatttgacttaatacatcttgatatttggggaccttatcccactccttcaactgaaggatataagtatttcctaaccattgtggatgaccactcaaggtacacatggttatatttccttcgggctaaatcggatgcccctacaatcattcaaaacttctttacctttgtcaatgttcattacaaaaagaatgtaaaatcggttagaactgacaatgcaaaggagctaaaactcacaagtttttatgcctctcaaggcaccatacatcaaaattcatgtgtggctagaccacaacaaaatgctgttgttgaaagaaaacatcagcacatacttaatgtagcaagagctcttgctttccaatccaatctacacttatcctattggaatcacatggtcaaaactgctgtgtatctcattaatagaataccctctgctgttcttaaagaccaaacgccatatgagttgttgcacaacacatcccccaactataaccatctcagaaattttggttgcttagcttatgtttcccccactcacattgaccataaatttgcacctcaggctaaatcttgcattttcataggttaccctgaccatatgaaagcatatactctccttgacatccaaacaaacacaatttttcaatcaagagatgtcatattttatgaagacatataccccatgcaaaataaaattccaaatatagaaattgacagtttctttcccaactgttcacatgaaacatatccacatccaccaaattctccaacaatttcagatcataccactgatcatgaatcccctgatgcaacaccaaaacccattcataactcacataaaaaagttgcaccagcacaacaacttgcaccagcacctcataccactgttgcaccaggcaacattaaaccagcacttaaatcaactggttcgaataaaacatcaactgatgtcaataccccagctactgattccaataaacctgttgctaaagcaacaatatctgctcccaaatcaactaaatctggcagaaaaatcaacacccctgcccatcttaaagactttaactgtcatcatattggcagcacccaatatcctctctccaattatctttcttatcataaactctcccctaaattcagggctgctgttctagccacttaccatttgcttgaacccacatcctacactcaagcatgcaaagaaaaagtatggaacgatgccatggacacagaaattgatgctcttgaagcaaacgatacttggattgttgtcccattacctccaggacaacacacaatcagcaacaaatgggtttacaggataaaatataatcctgatggctcggttgaaagatgtaaagctagactagtagcaaaaggctacactcaacaacaaggaattgactatttcgaaacttatgcccctatcgctaagtttaacaccctcaaacttctaattgctctagctgccataaaccaatggcaccttcaccatatggacataaacaatgccttcctccatggtgacctcaatgaggacatatacatgaaattccctcaaggatacaaaccaaaaggaaacttacctcctaatgcagtttgcaaattgaaaaagagtctatatggtctaaaacaatcatcccggcaatggtacgctaaactaagtaccacattgctacaacaaaattttatacaatccaagaacgatcattcactttttataagaaacaccaacaatgttttcttagcaattttaatatatgttgatgatataatcgttgcaactaacaacaccacagctctaaatcaattcatcagcaaccttgattccaaattcaagctcaaaaatctcggaccacttcactttttcttaggccttgaaatagctcgaaacaaccatggcatctctgttactcaacgtccattcactatacaattactcaaagaaacaggaactcttggcactaaaccggtttcaacaccaatggaacccaacatcaaaattgacaatgaaacaggacctctccttgccaatccaactcaataccgaagcctaataggaaagctcctctacctcaccatcactcgcccggacatatcatttgctgtaaccaaattaagtcagtacctacaggccccccgtgcaccacacctcacagcagccaatcgaatcattcaataccttaaaggcacacctggacaaggcttattcttctacaaagatgctcctactcctctccaacttcgagcctttacagacgcagattgggcatcatgcttggacacacggcggtccatctcaggttactgcattttcctaggaaaatctctaatctcctggaaatcaaagaaacagcaaaccgtctctcgctcctctgcagaagcagaatatcgagcaatggccaacacatcctgcgagttaacttggcttcattcaatcattgccgatttcaacatcaccatccaaagaccatccattcttttctgagacaacaatgcagccatccacattgcagagaacccggtctaccacgaaagaactaaacatgttgaaatcgattgccatctcataagggagaagatcaccaacggcactatcaaaacaaaccatgttcctactaagtccaactaggtgatattttcactaaacctttgttccccactcaatttcatcacattgtatccaagatgagtgtccaaaatttatacactccatcttgaa

SEQ ID NO: 48950 - DNA, 1553 bp, Cannabis sativa
taatttattgaagcaaccaaaggaagatattagtgaccaaattagaaagaattgtgaaacaagttagaagcttatattgcaatactccatgtgagaagtacatactccttattagtcatcaccaagaaaaaagctcaatccaacttggtagagggacctctgcctagaaaaaatgggggatagttcaccaacacttctcgtcacctaaaaccacctgaagttgccagagaaaccatctctggcgaggcacctcccaccagatcaaaggtggagccttgcaacaaaggaacatcggagaaaaataggtttgcctggcatgatccattcctcgaatcgatctacttgaataagaaggaaaagacctccagttgaaaagtcaaagagtgggagagaccgtgtccaacacataagaaacctcagcagaagggcacaagaatgagaaggtcaggcgagagaggacaccatgtgtcccacatcccccatgatatacacattatacaaaactatttgaaccgagagaacatgtctttatagctaataggaaccaggtgcctttttaacaactcacccccgatgaaggcgaacaggtccaggagggacccgagaaagttttgtaagtttctcaaagacatgtgtcacaccaacaaaaaatgccttcacctcaagtctgagattgatggattgcaaaactaggaaccctaggaaaggatagtcaatgaaaagtacaccccacccaagaggtgacgccaaagtacacatgagtgaaacctttggcaactaatctatccttaaaccttactggctcatcatttattacaccttatttaatctttcgaattcatttgcatgaaattaccttcttgtcctcaagtcttggaaccaatacccatttcttattcttattaagcgagcttaattcatcatccatagcctgagaccactccttcttgtacttttcatttaaagcctcttctatactcaatggttatggtatgtcacatgaatgatctatggacaaagcataggcaatccaatcagcttctgcaaagcttactggtatatggatttctcttctggttctatctctagcaagctagtagtcagacagatttgattgttctttagtctcatctggcactgtgtctatgctgtcatgttctgacttggttcaaatcctttcagctattaatttcaaactctaccaaatcttccctcttgctagatgaatcttgcatcaggtaacacactgcctttctcggctttcaagtgaggagaatcatttttattaaatacaacgtttctagaaataatcaccttaggttttccattctagtatatgcagattgtataatctttttctgcctataggatatcctagaaacgtgcctttgatagatctagcattaagcttatcatcgaatggatgtacacatgatgcacatccagattctctcaagtgtttcaggtttggtatcttcccataccacatctcataaggtgtcttcaagtctatgactctattaggactcctattaacaaggtaacaagcagta

SEQ ID NO: 48951 - DNA, 1845 bp, Cannabis sativa
tttatttacattgttttagatattcatatttaagatgttaaacaacatacatagtagtaaatctagatcccggtaaaacatattccaacactaaccactttaccacttcttttctcactacctctttcattggtaggttgagtcttcattgtgcatcgatagtcaacttagctccatcttccattaaaatttggtgcataaatgttgagggactgattcccttaatatcagccaatgtccacccaacggtcttcgtgtgtgctctaagtactctcaacaacttatctatctccacattagaaagtgaaactgacactaaaactggtagcgtcttattattacccaagaattcatatctcaaatgatcaggaagtgccttcaacttaagctctgatggtttctctacaaacggcacatgcctctttggaacgactcccaatcttcaaagtattttctattcaacgacccataggagtcaagcaattttgcatattccatcacttcacttccatcttgctcattcaaatcctcttcgcttagactcacttctaatgaatcctctaacaacttcttcttcaccactaaactaaagtgtccacgagatcaatagagaaacaattatcactagcttttggaaaattcattaccttaaggacgttgaaaacaacttcttccccttacaccctcagcttcactcgctcttctgaacatctatcaatgcttggcatatatccaagaatggtctcccaagggtaatgggcatgttgctatcttcttccatgtctagaacaataaaatttgttgggaaaataaacttatctactttgactagaacatcttcaatgaccccccttggatgagccagcgaacgattagccaattgcaaggttatggttgtaggctttgcttctcccaattacaatcttctaagaactgacagcggcatcaaattgatgctcgctcccaagtcacaaagagcatatatcccttctgttcttccgatggtacaaggtatgggaaaactcctaggatctctaactttagggggagtttcttctataatatgcactgcactcttcggttaatgccactgttttctaatcctccatattttctcttcttggcaggatttccttcatgaacttgacatagcttggcatttgttccaaggcatccgcgaaggggatgtcaatgttcagcttcttgaatatttccaaaaactttgaaaaatgcttgtccagattggtctttcagagcctttacatggtgctcactgctgacaggtggtgatacttcttttgatgtaagaccctcaatactcttcttctcttctgatgtcggtgcttattggtcttgaaccacttcttccacttgttgtttctcaataggcccctcatacttcttcccacttctcaaagtaattgccttacaattttccttttggttcacctttgttgtactaggaaagttaccttgagggcaagtagccagttgccccatttgagtgtctaaggctttaatggataatctagtctctgtcatgaactgaagtagcaaatctgtttgaagactagactatccactagaccttattgttgtggctattgttgattttgttggggctaatttctctattggtagaatgcctgttgctgctgattagaggactgcccttgaaaattctatcgacgattcccccttgattgtaccataattattgttttgagaatatttcccaatggctgttgcttgatccattggcaaactgttcacattcacatggcatgtgtcatatgtgtgagggcccccacatagctcacatgtaacttgagcttatttagatcg

SEQ ID NO: 48952 - DNA, 917 bp, Cannabis sativa
ctaaaatactcaaaatcatataatggagacaagactaattgcagtagctaaaataaagaatttagtaaaattacaccttcaacaaatgaggtaaatagtgagctaaaataactcatagctatttctttagctatatgtagcttaataaatagtggtgagctaaaaatattatatattattttctctttctctctcattttttttaattatttcactattcttttttgtcttttttttttttaatttaattgataaaatatatgtaaaatataatatttaaataatagaaaaaaaaaattataaagaaattgatgtatggtgtaatgtaaatttgtaaatcttgtgagacaaaataaaaataaaataaaattttagtaatgtattttaaaaagtaaagtagaaatgttatcgacaactttttaaacaatttatgcagtatgtattttttttttttttttgatgaatgtgtaggagtaagtttcgcgaacgaatataataccaccctgagaattcactattagccaattactgtctttattgtaattttagaagaaaggccccaaataaaaactcccaagcaataggcttaaagaaaagggatgagaagttttattgattgagaaagatgaatacaatgtgatactttgactactatattttgttaataactttccataaggactatttatttatttaaccaaaagatgagtcaccatatagttgatttagaacaataaataaactagcgcaataaaaagttgaaaaattatgtctaaaataaaattatgttttaacattatgtctaaaattatttattcatttataatttggaatttaaatttattctcacgcacttttttagcttttatatgtcatttttttttgtaaggatgtatatttcacatttaatagaattc

SEQ ID NO: 48953 - DNA, 1035 bp, Cannabis sativa
  modified_base (690)..(696): a, c, t, g, unknown or other
taagtcataagttggagcttaaatcccataaacaagttgagactcaaatcacaaatgattaaaactttagtgtccaaaagattcttgcaatcacttctaaaggtaagacccaaatttttattccaatatctattaaatgataactgaaatagagttgccaaaagattcaaatatctatgcatttaggctttggctttaattttttaagttataaaatttaataatttaccaatttattaagatgcttagattgagaaatactcaaaattcctccaatacagtcaatctaaaaattaaaaactgaaaactgcaaatctttttaccagagaaaatgagtactaaatcaataatatttatgagcttaataacaatacaaaaatgtttataaataaactaaaactattgtctcttctttcttcccttaaatctacaataatattcagctaaacatgattggagtctagaatctgagacaaaatagttatactaattaattattttaggagaattatgcacaaaatcaaatcatctaatctattccatacagaccagataatccaaacatattgaagagcttgttgatttctttaagaaagaaagagaaactacctttacttgcgccggccgagagagttcgggctcgccgtcgacgccgtgcgagagagaagagttagagagagagagagagannnnnnnagagagagagagagaggaattttgtctctgtggctctgccgttcgtgaagaggtgagagaggagagaaatgagtttgggctgggcctgggctgggctgggctttagtttacaagtatgggccttaatacgagaggaaatgggagaagttgaagaataccatttttttagggataagttgaggaatattttctttttgtatctattaatcaaaaataccttcatattatatttcattaaaatatactaacttgagtaaatttcctaatatactatcattctccacttaagtctagcacatattttatattaacctaaggggtataatgagaaattatcta

SEQ ID NO: 48954 - DNA, 1132 bp, Cannabis sativa
  modified_base (993)..(994): a, c, t, g, unknown or other
  modified_base (1080)..(1106): a, c, t, g, unknown or other
aaagcttgaattccattattgtataacatgttcccagccactcatgttattaagctcccaaaacagaagttgtaagaatcatcttatttaaaaaattttaacaagtgaatcagagaactcaatgaacatatacaggagttcatgtatactcaggatttaggttgatctgctaataatcaccattgtgatatgaataactctttcatggtaaatgatatgttaatgaaagatgtttattacatatcggtctagtcatgcataatcgaattatatacatcacctttactacatgtctatcccactactaaaaatttaccttctagtgacactgtttagtgacccacatatttgtgtggatcactaaaggattaggactaacttttagtgacatgcacaattagtctctaaaattttattactagtgtccaataatttgggtcactaaaaatatgaaaacctttagagtcacaccatgcaagactgagaatccgtatcctaacctgcctagcgcgtcactaaaaccaaatgactatcacgaggctttagtgacacgccaaacatgtcaggacacatatacttagtcccgcatggaatgactccatatatccactttatgaattaaaatgatatttaataatattagactattctttctaaacttcatatatcatcgctaaatatcacaaataattgctaaactccatccctaacctcatatttattctatcattgcaaatacatcgctaaatactgcaaaatattataaaaaactagtaaaccagaagaaagaaacacaaaaaacgagagaggccgtaagagaagatgacggcgaggccttgcgactagggttctcagtctgtgtgtaagacagtaagggttctgggtcggggttaacgccagagagagaaatttttttgaaatgtaagggtatttttgagagaaaaaaatattaaagtatatatatatatataactattcaatggttacattttnnttgtaaccatatggttacattttactttgacctgtaattgcaggttactaattggtagacattcttttttttagaattaattaatnnnnnnnnnnnnnnnnnnnnnnnnnnntaattaaatatttaacaagacctctt

SEQ ID NO: 48955 - DNA, 874 bp, Cannabis sativa
tccaagaaaaacctagagagaaaactccatagcaagagttagggctcttcaagattaagaagcacgtacaagattgtaatacattcaaagccttaaaggtaaatacactgactcatggactagggttcattaacactcaaatcacgtacaaaatctccatcttatttacttaatcgtttatttattttcttaaagctcttgtttatttatttttcaaaaatatcgataaacacaaccagttttaacaagcagctacaacaaggtgataaaaataataaggggatttaatgtcatgagtgtcaagggttttgtcacatacaagtataatgttctaccgcacttaagaagaagaaagctcttgctgtcacatggagtaataaagatgaagaagtggtgattctaaagaagaaaagaaaatggttactttaattgccaaagataatgtttccaagacatctgatgaagactaagatttaactgactttgaattagattctgatgttgtagaaagaaataaagtatatgaagagatgtttgcataatagatttacatggctaaaatttgaaggaattacatgacaaataaggaattggcagccaataatgtagaactagacgaaaaagtaaaaaaaaaactaattcaggagccagagagtaaggaaagtgagacttacaagctgagtgttgaacttgtttgagcaaaacaatctctacaatttatacctcctggtacaggagctctcaaccaaacacttcacctccaaaatccctatggggatagaacactattggctacaaaatgttgtataagaagggaatagaatttccaattgaagggccaagtgagtttgaatcaggtgccaaaccatcattt

SEQ ID NO: 48956 - DNA, 4167 bp, Cannabis sativa
tatagaaagtaatagaattaaagtaggaacataaattatattttcattgtataattaaaaaagaaatgaataaatcgtgtattaacaaaaataatcttaaattaagatataggagatttggattaatggaacatttattcttttgttattgggaaggaaagaatacaatcccaaactccaatactattacatggctacaagtctacaagcctctctaaaacgttgatccttgaagaaaatcttattcctttaataaatttatgagatctcaagcaaacgtatcatttttaacgattggcttttctcctaatttagtattttaagattgctaaaccatacatctaaaatagaatgtcattgatagtcaacttttatagaatcaagttaatgttcgatgcttggtattaaaaaaatgggagaccaacaaaaataggaacttttattagagataaaaatctctacagcggccatgtttctgagaccttcctcttctacttacatgatactcaacagaaatttacatagcttaagaaaagacaagaaaagaaaaatgggataaaagaaatataacctttaacagatttcttatgcaggctccttaagccagtaacaagtaggaagaagtttctaatataagcagtgcaagtggtagaagaaaactacatcttagattactgttccactaggaatcaaggcatccttgattactgtcacaattccgctctttatgaaatacccatcagtttctctagccgcttcttgaacattgtcagtattaaggatctgcatgttaaaaccccatattttgatgttcattctcccaaagattgcatgattaagctgaggaatcctaaaagctagaacaatgtgtgtgcgcacgagaaatgaccacaacgtaccataaggtgtcatattgctaagtatagattattacgtaatattgctaatcaatcacaaaccgttacttcgtgatagtaataagtattaccgatacctaatagcaatgctcgtgcgtacatatatataatggttgtgtcatttgcacagccttttagttttgagtacatgtgcagcatttatagtttcctactgttaagtacactagcctaaaggttcatataattgaactgttgtattgcacacagaatgttatgacctcatcatgtataacgattagcaaaagaaaatagatatttaatagaaaaattcatcaccttcacatcgtcaccaatacgagcattcttgtcaattatagctcttctgatgtgagagttcttcccaataccgattggaacgctaccttttgcagccagaaaccttctgtcagcatccgtctggaaaaaaacaaagccacaaacaataattatcggcatcggataacagcacaagattattcttaacaaagctacccaccaacagcttttactttaatagaaaaattatatatatatatatacattgcctttaaagatatcagtagattttactgggttttacctcatagtagtctgctcccatcaataaagtatcttcaatgattgcaccttctgatatgcaagatcggagcccaacaacagaatgatgaattttacagttctgcacaatgaaacaggggaggggaatattataagaataattcctataggttatcccattttgtcctggaccacaacgatatgataatacacaaaagtcaagtttcaagttacatagcccacaaaagtcgagagcttgcctttatcacacaaccctcgccaataacactgtccgtgacatcagcatcaagcattttggatggaggtaaataccggggttgggtgtagattggagatgaccgatcatagaaactgaaagacaaaacaagaaaaataagatggtaacaagacagtggattaataggtgtagtgaaacagaactttggatgggcttgctgtagcccaagaattatacctgaagtctggaacaggttttttggttatacccaagttcgcattatagaaagcttcaattgtaccaatgtcttcccagtagccatcatacaggtacgcttgtacctatatagttgaaagacaattagtccacaaaattttttctcatagaggaatgagtaagaaacacaattatctgaaacataaaggaagttccagcacataaagtcgcactgaggccttcacattcattacaaagctctaacagagctcggaaagatttggtcacaacaattatgattcatgtctcagagacaaatgtaaccttttacagttagggggtcctaccaaaactaatgcaataacaactacaattggcattggctaatcgagaactaaccctcaaacccatggatgttgcacctggaataacttcactaccaaaatcattcgctccgggaaattgatcccttaaaagatttatcatcacatctttgctcacaacgtatatacccatactagcaatgtaaggcatctccttggctctctcatcatcaagacccaaaatggtagtatcaacctgccaaggtaacaaagttactaattcgcattgctcaaataaacaacaaacagctagcccatagcacgtgtaaacataataccaaaatcaaaccattacaaatctaaaagcgaatttgcagacaacttgccttcatagctttgagttgctcccctttgggtttctcagcaaactcaacaatccgtccttcatcatcgatcttcatcagaccaaaagcagtggcacgttcttcatccattggcagcgcagccacagtgatatctgcatcagtctctctgtgtgcctgaataaacttctcatagtccattctatacaaatggtctccagcaagaaccaaaaactccaagacattatgttcctcaaagagccacaagtactgcctcaccgcatcagccgttccctgcaatagtaaattcaacagttaaatacacaatcaaaacggtaagaagaagccgaccccacgtccagcataaaccaacccactaacctggaaccagttggggttctccgggctctgctgagccgcaagaacttcaacaaagccttcgtttttgtaacctcccatgttactcgcgtaagcgcgagagagatgacgattgagtgaagcggaattgaattgggtgagaacgtagatcttcgaaacgttgctgttcaggcaattgctcacaggaatatcaatcaacctgtagttcgctccaagaggtaccgcgggcttcgcacgcttcttcgtcaacgggtagagacgagtcccagctccgccacctagaataatgcctaaaacactctgcaagaacaccacaaacgacaaactcaatcatatttcaaatgacattgcaaaaacagagtaattattccttgcataacctaaataccaaacgagacaatgcaaagcgagaacgataaaccaataaaaaagactcactcgactggcatcgggatctagacatgtctgcgaattctgagaatccgaaacggccttgggagaaacgatcctgggcgctctattggaggaagaagcagctcttgtgcggctgggagtggcaattgatgaaatcttatcgccggagagatgagaaaaagcgaaagagagcgttcgaggactggttctgggactgagattggaaccattcgatgaagaatgagataaagaagttgaagaagaaggaaatctgggtgctccaacggctgccatggacgccatgaaagctcggagctgaaagccaaaagctttggagcaagaagaagagagagagagtgtattaattgactgtttcagagagatagaaagagagaaatagccctactagaaattaataaatatatgggaaagttgagatttgatggagtctcgaaaaccgttttcgccataggaatttttgtgatattacgcaactgacctgcccatctatttctgttttgtatttactcaccttgggtattttcgacttttcgtaatattacccaaaaacaatttctaaattaaaaataattatttaaaggaaaaaatctgttgtggctgtcagtttcttaacaaatggacgtcatttcacggttccaacatgcatcgactcacatgtagatattactcatttttgtagaccgtcaaataatttatttatttatatatttcctttcataaattattcaccatttacatta

SEQ ID NO: 48957 - DNA, 1127 bp, Cannabis sativa
gccatatgcttcacctgtggtcatctagctcactcctatggaaaatgtgagaaaacaatggaatatgcttacccaccgattggtaaagctgtacaactttacggggcatggattaaagtgggagtcccgatcaaaagctgctttgacccgtcgattccgaggatgagaccaattgcttattaccatgacgccggtgacagagctccggtggggagacgagacaagggaaaaaaggtaattgtcgaaggtgataatgatggatcggtgccagggggacaagaagcaggacaggggaacgttgggctgaggatttcaccaaagaagatggctgagatgagtactaaaaaagcttatgttgaaatgcagagaaaaccacccttttcgggtatgagaggtactcaggggcggtctttatccaatattaaaagacatcctatgaataatattgataatagggggagagatgtagggattatagctagtctcatggcagatattgggccttcacgtgaccagatggtggaccggcctcatgaggaagtgtgcaaatcaagggtccctcatcagcacccagaaccaacttttgttacatggcccactgataaaagccttgatgaggtagtggataatttagttgggccggcccaaaaagaaaatgaactaatccaagtagttgtctcacatgaaagtggggacttctcctccaatgggccgcttttttctggagcaaagaaaagaaaagcaagtctcaatattatcccagttattactgaaagcttggacgaggttgagaacattggagataaagccccatctactccggtcacctttcttccacctttggaggtaaacaccttcacaccaggaagtagtagtcgagataaagcagatggaaagagaaaatatgtgccgaggaagaggggcggaagttcaggaggaactagaaagcgtgggaagcaggcgattacagttaatgaaagtgagaagcaagaggcgaagggtaaactgcagcacaaaggtacgactaatacaatcaaaaatttggacaatgatttagtggatattacagtatatgaatcaagtgatcgttttatgggcgaggaggcggcccttaccaagccccctcc

SEQ ID NO: 48958 - DNA, 837 bp, Cannabis sativa
tattattattattattgtttttaattcttcttttttttttttttgtcttttatagtcttcataataaatggaatagccgcctaaataacatgggggtgaaattacttttataagaagaaaatgtcaagtaatattaaactgtgtaaatatagaaaaaattaccttttatatttttagtaaaaattttaagtttaattttttttatatatttttacggtattttaaaatacacaagaaaacaatataaaaataaccataaaaaagtaacaacaaatcaccataaaaaacaataaagaattacaaaaatacaatattacaaaattttaaacatttttacggtttttaagattttttttacataaaattcgatcttttgatgtatttttatgttgtactcctattattttgttgttgattttttgttacttttaaatatttaattttttttagtgattttggcagcaaaactacctaaatatgattagtaacacttaaccgttcaaatcgattttttgatatatagtaaaacccttcaaacctcacttatgttagctatttaccccttctgttcaaaatgttctgttaagtatcatggtggacatgccacaatgtacacaactgtacacgtgacaaatttttagtggattatattagtggcaaaactgtcttaactttatgattggcgacacttaaccacataaattaaatttttagtggtgaaaccttccaaacctctcttatgttagctatttaccccttccattcaaaaggctctgttaagtgctctgcgacaggaaccatcagatatccccttcccctgttccttcttcttcttct

SEQ ID NO: 48959 - DNA, 2469 bp, Cannabis sativa
gtaaaataaattccaacatgctcaagggaaaacccttaatgcacagaatacaactcccatgcctagtaactgtgcaagtactaatgaaacacaagatgttgaggctcctcgaagagaagaaaattttgagcaagagttcaaaagaactcaaacacatgggtaccaactaatgggccctccacctaatgtggatcaacctctgaatactgagagagccaacaagactcctccaccaactcctcctcaacgctctcaagacattagggcctgagaccatgcaaagggaaaaggacctgccactcaagactaaggggtaatcaaagactttacttcaaaattggaggatatgaggtccaatgagtaaggaccaatgagttgcttcatactcaaaaatactttcgagatgaaaggggtaagttgtgctgttactttgcctgtggccccaatggccagtagtatgagtacttctcttgagtacatggagaaaagttaaacttgagaaaccaactcaattctctctgtacttgtgatccaattgaagaatactttgagggaagtagccattacaacgctccgaatgaccgctcatgtagcgcatcgtctgaagacgatctagagttcatcctgagaacatcactagtgttgccttcaggtgcccgtggtatgaagacaacgacaagacccaagtcgatcggagtccatgatcgacttggaagactaagacacctgtctgacaccttaaccaaaatttggttagtggaagttagggcttctagaagagaccctaatcgggtaacaaaagatttaaccgagacgtaaaccaccatccatggtgtcaacagggcatagtttgacaacatagcagccctagtgaagggaattatgaccccaaagttgtcaaaatttgaactctgatcaaatcaatgctctaccattacttccaaagtttaagaacccttcctagcattaataccccgagagtgaagatctgctgtctcacatccattacatcaaattgtggaccaatctgcatggagtaaaagatgatatcaggtgcaggatcttcactgccacactgacagacctagctcaccagtggtacctcaagcgtccactatattgatcaactcatcggatgatctagtggatgcttttggcaacaaattctctccttcctaacaatgccaaattaaggatgcaagggtaatgaaacttgtaacgggactcaaggagatgagtcatctatggtttgaccttcgtctcaaggtagtttacaccatgaacgactttcttaataaagcacatggttttatcaagctggaacaagctgtcacccgagctaagggctcaaaaggcagcaagaagaagtcaccagactcctcatcccttgacattgaagcacgggtaatgggaagaaaggaagtttgaacagaggaaaaagaggcagcaatggtggaacacaaggaaactccccaggtggaaagaaatccaagactgggggcaggcctttgcgagagtaagagccctttttcaccacccactcaatcctcttggccccaagacaagagatatatacggccacacagtcaatagtgtcgtaatgcgaacctcttcccttcaaagagtcagggaagagggatatgaaaaattctgtcactagcacaataattacggtcatgataaaaataactgtaatcagttgcgagacaagatagaatttctcatcagacagaaacatgctgctctacagcagtatgtgcaacatgaagctgcaactagggcaatgcaaatctcaagactgcgctagttatagacagcctcgagattatgattggacgcactcacctagttgggaattcaaggaaggccttagaaaggtatgcaagatctttgcgacatgactaagagccaaaatactagaggttgcagaacgtcctccaaagtctcaatgctatgagtatgctcccatcacattctgatactcagactcctatcatgtcaggtaccctaacaacaatcccttggttattgaggtttagatagccaacataatggtgacaagggtgataatttatgacggagcatcctcaaacatcttattcaagcaaactttgatctggatgggtttttcttatgaaaaatgtgatattatggactattactactactttttgaggctggataaatttcctgataaattttatgcacatatttaaacagatcgatattcataagcttaatcttgggtgacttaatagtattattacatcatatactcgtcatcatctcaattcattggacaatatatatataaaaattcttaccagtgaattttggaactggatgttgacaccacaagagctcaatattctctttctcatcagttgcatgaagtgcagttacaggtggatgatgtgaaatctgagtaagaaatcaaattattatactcaaagtctcaaatataaagtt

SEQ ID NO: 48960 - DNA, 1824 bp, Cannabis sativa
tgctttgaccttgcgtgaaacaccagatttgtagcaagagaggttgcactttgattgtcaacccatataatgggagcagctgggagttgcatctgtaactcagtcaaaacagagtggagccacttgacttcggctgctgtatttgctagagcacggaactcactttcggtgcttgatctagcaactacttgttgcttttttgctgaccaagatatgagattgcctcctaggaatatagcataacctcccgtggatcttcgatcgtctggacatgatgcccaatcggcattcgtatatgcttgcaagcatagccttggagcaggtcgtatgaagaggccctcatgtattgtgcctttgagataacaaaatagacgattgcaagcatcccaatggatagtagtaggggcatgaataaactggctcagtttattaacaataaacgcaacatcgggcctggtcaaggtaaggtattgtaatgcccctaaagtactcctataaagagtatggtcagggaagggttccccattcgtaagagactgaacatgggaggcacttgttgggctgggacagggtttggtaccatccaacttaagtttggttaagaggtctgcaatatacttcgattgagagaggtataaaccagctgaagttctgtaaatttccacaccgagaaagtagtgtaatggccccaagtttttgatgtcaaatgcagtattcaaatctgcgattatctcagaaattggagcttcattaggacccgtgataagtatatcgtccacatataccaataagacaactaaagtttggccagcccccttgaaaaataatgaattgtcagatttggacaggtgaaaacctttgtggaacaatgttgatttgagcttgtgattccaagctcttggagcttgcttgagaccgtacaaggccttgtttaacttgcagacatgatgagggtatttcggatcaatgaaccctggtggctgaggcatgtacacagtttcctcaagagtgccattaagaaatgcatttgagacatcgagttgggtgatttgccaattaaaagagactgcaagagtgagtaatattcgaacagtggctggcttaaccactggactaaatgtctccttgaagtcaatgccaggggtttgagagtatcctttagcaaccaatcgtgacttatacttgtcaagagaaccatctgccttaagctttattttgtgaatccatttgttgcctactaaagtcattgatggatgataggggacaagaacccaagtattatttttaacaagagcagtgttctcggtttgcatggaagcaaaccatttggggtcattgagtgcttgttgtaaggatgttggttctttgggtaagagagactcaggtaaaggataggatgtggcatggtaggctttcggcttatggatgccagacttggatctggtttgcatagggtgaatgctgtgtatggttgttgtgtttggtaatggctcagttggggaaggaggggtaggattagatgttggcagaggtgatgactcaggtgtttgtgttggttgctgaaaggatgcatctggaggcaaatcactagcacgatcaatattgatctgaggcccagtagctgctgcattttctgctgtaagtgatgctacagttgttggtgcgggtggcatgtcatgggatggcagatgttgtacctcagtaataacatgaggtgtgttagtaggcattgatggtgtagaaaatgtagcagttggaatggtaaatgagggagaggaatgtacctggtttgtggttgtggcagctgaaaaaccagagaagtcc

SEQ ID NO: 48961 - DNA, 1063 bp, Cannabis sativa
  modified_base (380)..(393): a, c, t, g, unknown or other
aacatttttcttaatttatacgtagatgatgatcgatcactagtttttgcaagtttaatgactttattgagctgggaacatggattgcaaggcatccttttttcacatatatatatatatataataaatatttatatatacttattttccattgaaactattaataaagaatactacaactattattaaagcatagatagtaattatttcctcatatataagtactcacaaacctagtaagtagtaacctatcatttgattctttatttactctctttgttgtttttttttttcatgaagtagaatttgtttacctttcgttcctgaattcatgttccctcatagaatgaatcactactcattattattattattattannnnnnnnnnnnnnattattattattattattagcatggagtggatatagacacatacgtagcttgaaggagagaaagaaagccatataaatatagagagagatatatagatatgtatatatcatggtcccaaagctacttatgtgaagtttgaagtagaagaagtagtagtagtagtaggggacctaacttggcacatgtgtccactaattaattactgatcagaccattttctctatcagattcagtccctcatatgcatgcctttacagcttgccccatcattgttctaccagtcaactacccccaaccttaattatagtaaattatttagtattcatttcttacaattattccatactacttatatctactactcttttgaagaagagaacattgttattattgttattatgtattaattatcggtgtcgtctaatattattatgagatgcatatgataacatttttagttatcggagtcgtctaacattattatgagatgataaatttttttgaagggttagtaatttttatataataattattaaattaaaatatatgagattaatttgatacttaattacaatactatatactatattactattaacaatatgatacgttgtaatagtattgaacctagtgacaccttttaataattctctttaaaaaaaaaaaaaa

SEQ ID NO: 48962 - DNA, 5346 bp, Cannabis sativa
ttaagtttattagtaaaaatataaaaaaaagtatcattgcaattactttgtgtaaaaattctttaattcattacctttgtaaagaaaaatgttagtatcatgtacctaatcactttgtaaaaaaaaatgagaatctttcacagaaacacctaaattaactaactttctcttactatatatttataggataagtctgattttaacaacttcttttcaaactctctaaaacgttttgttgttgttgttaatatcttcaacaatggcaaacaaagtttcattactggtgaaattagtggaatcaatagcaactgaattggctaactccattcaaagcatggacaccatgattgaagagctcaactacctgactctcactcatcatggtcaccaatattaccataaagatcaacaatgtctcaaaacaaactttaatcacttactaactcaatgcttttcttcatatcctgggaatcccaacattgactccaaattcaaggtttcacacaaactcaactccaataatgccattctctttgatctcatggttgaattgaaaaggttgaatgaacaagaaaagggcttgatgatgaagcttaccactttcttgaaagtcataaagaaatcccaagatgattgtgatgcttatgaaactgatactgatattgattctgatgaggatgattattcctctgacttatctgctaagttaaaaatctaatcaacaattatatattcatttcttcttattattattcttgaaaccattgtttgaataaagatttacagataaagaacttgcaagacttggttggtatagcaaggaatgaaagaagatgatttgagcaagatgactaatcagtggggagtgtgataagtatctaatatttttgtgtattattgagctttgctcttcctgtattctctcatagacttatctcaataataatctcatcattgcatctcactcttacctgttttcatagctctagtttctctatctcacaaccaaccaagaatgagaatagtaatgattaaatgagtaatccaatctatttagtcaaagattgttacaaattattaaattaccattctttattttgtttcccaatcattttctattgaagatcaaaacatttaattttgcaaaagtacatgactcaacaaaagaattgaaacttggccaaaatacatgtaataaatgggacagagaatttcaatccccaaaacatacatgaggtataaggattctcaatagtcaatagtcaatagtgtagtggtgaaatttgtttcccatgagaaaaaaagggacctttgactgaaaaataaaaaatccagctaggaagaagatagtctcccttcaggcacttttctctccacagcacctagtctctgaggaggccacacaatgtgactcgcccgtccttgaactaaacctaaaggaacctgtcaaccacagttggttatggtttagcatagtttttataaagctacattcacaagcttataatgcaataaagtcagttgaaagattaagtaattgcaactttgtccagaaaaaagttctgtgcactttatactttttctgtttgcaattgaacgcaatcacgatgcttttataaacctgaattgtaagcttttcggaaagtttaaattaaacagccttgcagcctagtttacttttgatctgtatagattttgaattgtgaaaagataaagaatgtgactaagagtatgcatggatcatggatgatggattgcaacaaaatctaaaacttgatggaaactgagctataacatcatgttaagttccattcactactgtttagctacttacataaaagactacagtttgtgctacatgttattcacaggatttgtgcgacatttttaacacctaagaagataataagagcaattatgctattgtaaaagtatctcttcattgacgtagtaaaatcaacttaccgggccaaaagaatttgaatccatgctggaactaggattgtctccttcaacccaacagtgtccttgtggaattttgatgacatctgatgaatgacgaagcccaacccaatctccaggcaagccaattattctctttatgtgcctctccttgtgattctgtggggagctgcagatgttacaactaagtaagtagtgtttttcagcatcacaatcttggtgtcaatagagtgtgaagacaagcttaaatcaaaaggataaaaataataataatcaaaataagccaacatttaaatttgatcagctcatcagctatctgattaaagagagatcaccactagaggaatgttcactcaatgccccactggtaacaacgatgtaagaggtttctataatggaagggaaacaatatgaaaaagggcaacctcccataaccacatacaaggctgcattgcttgaggcttaaaaaactacccaccaatgtaacatgaattccaattagatcattcctaagtagtattgcaacaggaggaaatctacaatttattatttgttttactggccagcagtttcttcaaaccccccaaaataatatgataccgacattttctaagaatgtctcatagatagttcattatgctcggtaatcaaattgaaggaattactcatacttgaatgaatactactgagcactacaagtttttacatccaaaagacagtgattaatctaacaaaaatgatatccaaacagaaaaacggaaggattacctgaaaacaactacatcaccatgtgaaaatttgtacttctctagacaaaatttctccaccaagacatagtcatctgcaatcaaatccataatcaggcaataaaacacacaatcagacagccaaacctatgaatggaaaaccattattttaacattctgaaacagttcacaagttttctttccatacccagcaaagtaccagagctgggattaaatgtgggagacatagaagaaccccgaacggcagcaacacttgcatatctatcagaaatggtgattcctatgagcccaaatgtgaaaatcctctttgaataattccacataatattctgagttcccatgtgtttgttttctcacaatcaaaacagaaccatctgaataaaactatatcagtaagtaagttactgaaaataagcctctctatttatcaatgtagcaacaccccaattcaaattcataattaaatcagtaagtaacccaagtatcttgaattaccaacaaatcaaaatctaagaatttaactccctttgaaatttaacaatgtgaaaagaaaataaggaaatgaaaaaacaaaaacatagaaattcatgatagatattaatcaaaggccatttagtcactagtttctcttagacaaataatcaaacacattgtaaacaaaaaacttttgtacaacgaattgcaaagtagaaactagagcgaagtaaatagggttacattgtaaattgaataatcttacttgaattgaagaagaagaattggagagactgtaggtctaatcaagaagtgaaaattttacactcgagagagactcgccggagatatattgaaccggtaagaattcgtacaagagtactttctttcttggccaacagcaaaatttagttcctcttaccaaaatgccctcaaaactaatatagttatgattttttttttttcttttctttttactttgttaagaattttttttagaaaaccctaatttttctttagtaaagaaaaaacaattatattcatgagaaaaattttgttttagcattgagacaagttttttaattcaattcttttgttattaactcaaaatttcgttaacaaaaaatgagacttttttatgaattaaattaaataatttctataagaacttttgaagaataataaacacaagatatttacgtggttttgtagttaattgtacatagtttacgagtcattataatttttaatgttttatttacaaagtatcgaatgaaaagacatacaaagaatcaaagataaatttctttcaaagtgattacttgatcgaaaattgaccatcccttgctcagtagtcttctctcctatttatagaattttcatatggtagttattttttttaagacttatcttaataactgctcatgaaatatggtcaatccccacatttcatacaattacaacgtgtggtaaaatgcataaatgcttagtaacaatcatttggtttaatccaataaacgtttatttcactgagaaaccttcctacacattgctgctcgcatattacattagcagtttaccatgtgggtttcttaaattcgtctcgcattccatgtggtgactcatctcgcctttgtatatcttgcattttcttctaaggtatagattttgtacttagtcatattcgagatgattgcaatacatgctattttgttctcgcatgttctatagttaacatttaaaaattttactcacctttaattattttcttaacgtaagacttaaatataaaattgttaatagttattttcgaggaactttaaataccatatttatttttcttaagtgcattctcttttattttcgaactcgtgttgtgactatatttgttgctcgaaatatggacatcacatttacattgtagttttttaagattatttgtatattttaagaaaatttgataacaataataataatttgcaattagataaaaattaaaatgatagttaatattcaaacactactacaaaaatagtttttcctggcgtttttaaacagtcgtttaagagattcccatcggtttctataatcgtcgcctatttgaccgtcgcaaaacggataaaataggcgacggttaaaaactgtcgctaatgtggacttcccgacgatttaaaaccgtcacctataacagagtataggcgatggttttaaaccgtgccctatattataggcaacgattttaaactgtgccctatactataggcaacggttttaaaccgtgccctatactatgtttctttcatggtggttgatttgaactgtgaattcaatctatatatatatatatactagtctcattatcacaattaattaaaatataacaattgaatgtaaaaaaaaatattagttctcggtttgggcggattaacctgaccaaaccaactaattcattggaagggttactaatttcttttttttttttaatttgatgggttgcaattaaatttttgtaactcgatctttataattagttgaataaaatgtaacataaaccaacaaaactgactgacatacactcttaattctaaaattcaaaattaagattaacttgtaaatactcatcgattaatgtatttaattaagg

SEQ ID NO: 48963 - DNA, 2327 bp, Cannabis sativa
atttagggtttagggttttgggcatagggtttagggggaagtgtaaagagtttaggatttagggtttaaggtttaaggtttagggtttagggtccgtttactgttcaaatttcaaattcgggtcagagggtacgatttaagatttgggtctgggtctgggtctgagtccttgtctgggtctaggtccgtgtttgggttcaggtctgagtcttagtcccaaattcaaaaaccaaccacatgtcgagtctagttcaagttctggtacaggttctggttctggtctgggtttaggtccgggtcaaggtctaattccataatttagacaccgactatgggtcgggtccaagtctcaggtcttgggtcctgggtgctgggtcaaaatccagatcttggaccaattgtagctcatgtcttgggtcctagtacgggtcttaggtctaggttgtctaggtttgggtcttgggtcctaagtcatgggtcagggtccccgattcaagttagggtcctacgtcccggtctgggttagggtcccagtctaagtccaggtcccagtccgtgtttggtactagtccttgtctcgagtctttgcctagtctaggtctgggccatggttcaattttcaggtctcgagtccgtgtatcgggtctcgggtcccaagtctcggtccagggtctcggtccctgtcccagtctggttctagtcctagtccaagttttgctcttggtccttatcttggtctgggtcctagagtcctgagatctcggtcctgtccgagtcttgggttcgagtcttagttctggtatgagtctgggtgtctgggtccgagagtttgggtctagtgttttgggtccaagtttcagtctatgtatgggttcgggtcttggtctgggtctgggtttaggtctcgctctgggttctattacgggtctaggttctagtcaaagtcccaagtcaccggtcctgggtttcgagtttttgggtcacaggtcctggcagatgtctggatctgggtttgggtctgggtttgggtatagatctcggtctaggtccggctctgtgttcggttactcgtctagatccagttttgggtccaggtccaattcctgttccaaggtcccgattcaagtacttgttctgatttggggtttcgggtccgattctgggtttgggtcctggtctggaaattgttcaaggtttgggtcttggtatgattccaagatctggacaccgactacgggttgggtccaagccctgggccgtgggtcaagatctgaatcccaatcttgggtcccagtctcattccgattcaaatcctgggtgccggtctgtgtccttgtttgggtccaagttttggacagagaccggggtaaggtcttcggtcccagtccctatcctgggtcccgatcctggttctaattttgagtttgggtccccaatctaggtgtggtttctgggtccaggtctgagtctccaatcccagtctgggtcctggctcggggtctgggtccaagtttgtgtctgggttcgggttcgtatcccgagacccgatctgagttttgattagggtctgcatcctggtccgggtttgtgtttgggtcctagtcagtttcttgttcttggactcaaacccagtctcggactcggacctaagtctggggtgcgggtctgggtttaggtcagggcccgagtctgggtttgggtttgagttcgggtatgggtcctagatccaaatacttactacgggtcagttccaagccctgggtccaaatctggattacagtctcaggtcccagtctagttccacttctggccccaagtcctagtcccggtcctaggtcaggatcctagtttgcggtcggggcttgggtctcagtcctagttctgatgcccgtgtcctcggtctaggtcccccatccatgttcgagtcctaggtcccggttcgagtccacgacccgatcggggttcatgtccaggtccgagtcttggtttgggttctgatctaggtttgggtccatatctgggttcgagtctaggtccaaattcgggtctaagtcctgagttttgatctgggtttgtgttccggggcccaagtctaggtcctcaatctaggttcgggtcctaggccccgatctgggtccatgttcgggtctgggtcctagtcccattatcgacttcgattcaatgtttgggttggggtttgggtcgaggtattagtcctggtctgagtctacgttcgagtctgggtctaggtcaaaatcccgatctggctctaggttcgggtcaggtttgagttcaggtcccaggttcaggtcacggtatgggtctgg

SEQ ID NO: 48964 - DNA, 617 bp, Cannabis sativa
taaggcccacctgcccatcaatacactccttcggcccacaaacttggccttctataactctccttcttttagaatcaagaaataccaacccaacattagaattttccacctcagcatccacattaccttccataaaaatcgcctccccagaactaggggatttgtttttattaattccatattgattgtcgtgactatgatcatatcccctcacattcggtccctgatttccctcctccattgaatgggcattaactccacctccagccgtcggcaccctcaccggaattcttcttgaattcgatgaactctcccctgcccagccagcatttttcgtggctaatccagatcgcagccacttggaaccatcagcgtaatttcgtcttctcggagcggccttcatttctagcccgtactcctttgtgatcaactcctttggggtgtcaaaaagcttttcgcagaatctttcggcgtggccaaggatcccacaaatgaaacaaaaggtgggtagatcctcatatttgaaaacaacatgacacaccggtcccccttgcatctctaatttcttcttcttttttagcggctttccaattgggatcttaacccgaattctcaag

SEQ ID NO: 48965 - DNA, 1635 bp, Cannabis sativa
aaaaaaaaaaaaaaaccccactttcacacacttgttaaccgacaaatgtattaattctttttatataatttttcatatttcaagttgcaagaagaatatttgcctttttattatgagtatttactctttttttttggggtggtagctttcaagattttccatcacatttgttgagagtaaaaattaggtttggtgcaacaatgggtgcagataattgatctgcttttattgatgatccaaatgagcaccaaatagaccagtcttaagtcaagtgggattgtataattccagtacggataagtaaatttggaccacttcttttcttttaggctacttaatattatttgtttatttgattttttctaatatagggagaagaaattggaacttgagagttcttcttgatgaagagaattatagagtcactaaactatatacactttattattatttattttatttaaggatgtcaaaaagatccatttagttggagcgggtcgggagcttcgattcgacatatcacttctgattcaaaatattcggatacttattggatcttggatcaaattcacttcgtcctgcctaatttttttctagatcggatctaatccgaattgatttcaatatattaagaaaaactcaattcaagactcgaaccctaaacttagatccggaccccttgggacctagaactcggacccggaccgaactcgctccagatccaaacccgaactcggacacgggacccaggacctagattgagactcgggactcagaccgggacctgggacccgactcagacccgggccccgttgtcagatcgagactagggcccggactcagacctggacccaggattcagacagaagccgaacctaaattcgaaatcgggctcaaaaatatattataactttacaccatttattaatacaagtcaatatcaaacataatattatattaaataatactatacaaaattaaaatgaatataaaattataagcttagatatcttaaaaaaaagttggatctgatctgatccaatgcgaataaatcgagtcggatctgatccgatgagtatctaatctagcgggatggagcacaacagacctttacatgatttagatcaggtcaaatcttaatcagatccgaaccattattgaagaacaatattaacatcgatttagagtttatattatgttaaatgcatagatctttatgttttataaaattgatcaaattgatattccgagctaaattttagtaaaagaatttttcaacatctctcgtagtattaatatggatatgttttgtaaaatatagaatctttattctcatctaacaaaacataacaaaatatatgaactgattgactattcgcactaaacacaaaaatcgaattggtatgtatttgtcaagtaatattctttttcattttctgagacaatatattcctgaaaatgtcagtgaactatacatataaaaagaatccttatttgttaaaccactaagtacacacctccttaaaaaagtatttaagtttaccatcttaatagtttatagtattaaagataaaatttaaaaatttacttacaaatattataagaaaaaataatggtttttacaataaaacattt

SEQ ID NO: 48966 - DNA, 1247 bp, Cannabis sativa
aaaactagaagtattgaaaacattgtataatatagaaaagatgataaaaaaaaaaggtagctaataagtgttgaacgccatataaaacaatgaaaggaatgaaggaaaaagtaaccaagtgtcatgtgatgtgatcaaacaattgatgaaaattttgatactttctcttttgtttctatgtattgtttatatatgaaatcacttgtttcgggcaaaagattaaggccccagaaacacttatgatgcaagttaggtaaatagtgagttgtggtgtttttttttttaaagatatagaatttttattattttgttaaattatagaaaagacaagattgtatcttaataagaatatcacttttattaaacacttgaattagaaaggaacaagatactttaataaaattttgagcaaccatattagtaaattgtttaataaaagacataaatattatttaaaaatgcaagaagtttacgacaatcttctataataatccaaaagaaaaaaacataggtaatgaatttcgaatagctttgactgctaccaagcaatctgactccacctcaattttctactatggctgagctttttaaccaaacttaattaaggcttcttttttactaattacttaagcatttagttctaataaattgtttcaacaaaagtcgaattttagtaactttcttgctttgagtcgctgccagcaattgtaaatgcacatggtaccaacgagcattggattgcacctgagatagattgggttaatgttaatgtaatggagcaatatttgctacttcatagtcttatggcgtgggtggaattgcccatggaaatgatggacgggttatcgaagtcttttgcttacacaaggtcggttgtgtacaactttgtttggtggaagcaattggtatcaaagaggcgctgagttggatgaagaagaaaggttgacagcgcacaatccttaaaacagattcgcttttggtggttcaaacccttgaaagcaatgttgtaatgcaatctgtttttggttcatttattgttgactgtcttactttgcttaattttttggtcaatgttaatgtccgttatgttaagcgatctgctaacaataccgctcattgtctggctcgcgatgcttattatcggtcagattgtacttttgttagtagcaatgttcctaatgttattaacactgctgtaattgtcgatttgacttttctatcttaatgaaattatctacttccattca

SEQ ID NO: 48967 - DNA, 1389 bp, Cannabis sativa
aaactccagtgccttttccggcaccggtgacaactccagcaatcactgtagtttcatttattttattttttaaagaaaatatgaaggggattttaatatcttttatggtaattcaatctcatatatgttaagtttttattttaaatatcatattttttcctattaagttttctttctatatttatctaaactagctttattttttttcatatttataaaattaccccttttctaattagatagaaaaattaaacataaaaaattaaaaaaatttaacagtacctattcatgagtaatactcattaaaagttactcaataataatatatgtatataaattactaacaaaaataacacacaactatatgataagtcatttcatctaattatttttattaaaagatagatcccacttataaattagtcagtggcggaaatattctctctactcttcccgttgtagaaaagttttgatatatatattaattaaggaaagtttattttggatttttatatataataattattattacattttgggtatattattttttctttaacaaaattgatattatttattcttatttattctcatgtaaactcccctgacaaaaatcaagaatggaaagagagggtttccatagaaaagtttgaagactaaggaaaagccttaggaccaaaggtcctcgggtcctatgaccaaagtccttaggactcatgatcaaagtcctcgaaactcatgaccaaagtcctcaggactcatgaccaaagtccccgagactcatagccaaagtcaccgtgactcatgaccaaagtcctcaagattggttaccagagtctccaagactggtgaccaaagtcctcagggctggtgaccaaagttctcaggactggtgaccaaagtcctcaagactcatgaccaaagtccccaaaactcatgactgaagtcctctggactcttgacaaaagtcctcatgattcatgaccaaagtccccgggactcatgaccaaagtcctaaggattcatgaccaaagtcctaaggactcatgaccaacgttccacgggtaccatgacgggtcagaagggttgaccccctaagctcatcactaggccgacccttaagggcctcactgctagggcgacccccaagggcctttccactgggtcgaccttcaaagttcagtaaaaccgctctcgtggacttgggtccaaatttaaatgcactctcatgctagacacgtgccatcaaagctattctgaaatatctacaacaaagttatctattttcaaagatacttattctggaatgttattttattattattttatattttaaacgtaactctagttaggaaaaaagatatatcaggttaagaaaccttaagccct

SEQ ID NO: 48968 - DNA, 932 bp, Cannabis sativa
  modified_base (697)..(702): a, c, t, g, unknown or other
cctttgtggattgagcactagcccgtgggagggcattttccaagagccagatggagacggaccagatcgtgacttatcgagagaggtcatcatcaagtacccttgatgacgtgttggccgacctaccagtggaggaggtggccggccaagatgttgcccatcaggccagcaaacatagtgatgatcggaccggcctggactctgcagatcttgacttggcggctctagattggctcctactaccccctgcacacatgtagatagaatttttattggtattcaccattatgttggtattgtatagactgtgttttcatgttctacattgcctatggtactcactttgcgttccttgttaaattgtatgtcctatgtggcctggatcctttttagaagactattttcatgtcctgtgtggcttgaggctttttaagaacattactttattttcagccccaggattttcatgttcatatctttggccatgagccctcaatttttgaacactactagtatttgattatgttgttttttatcatggattgtgtcactgaccaagtagtctttaatcctggctatcttcttagggccttgacaagtaagggtctggatttactttgccaagccaaagtatgcctccacgacttagaggtagttttagtagcttatactaagcgttaaaatttctctgcataannnnnntgtgctagtttgatgcattgtataatatgggtgcccccaagtgaccatgcagacaagtctcttggtaacttgctattcaccaagttttacagattacctgggtactgccttgtgggagtaccgtagtacgcatgttgaactaatagaataactttgaaaagttaatctgtgagcaagtggttcatagacacaataaacataatatataaatatgcaattattcattaatt

SEQ ID NO: 48969 - DNA, 4138 bp, Cannabis sativa
gttagtaaatctagatactgataaaacatattccaacaaatctttgctcaaaataacaattcaaaacatacacacaaaagcttgaaccaaaaccaacataaattttccatttcacaagcttgaacacaaagcttttaaacaaacaagaaaagcctagaaaataagagttaaaacccagaattcaaacaaccatgcacaaccctaaaatccctcaaacatgttagatgcaacctacatactcccaaaagcttaaacacactaaaaccaccaagattttacatcaaatcatcaataatccacaagagttgcaacaacatgcatttcatcccaagaacatcaagaacacttaatagtacgtcatataattttagaaattataaaatcaaaaaggttaagaatctttaccacaagttctcctaagcttcaagtacaaaatctcaccaattacactccacttcaagcttcaattccaaaaatggatcaaggtttcaagaaatgagaaagggagagagagtgggtcggctaagggcttgaaaaaatcagaaaattgattttcaatataatttctcaaaatttgcttttgttgaaaatgtgataaatggtcaaatgaccaaaatacccccaaagccaatatattcacgtatatgtaaacaagggcaaaatagacattacaatcacacgtatataacacaatattttcaggttttcatacttatcaaataaagccaaaactaaatcccgaaaatatattttgggccccgaaccctgttcggcccaaaatatccagttatgactataccgcgacgatttgtcagaaaatacctgcagatagacagaacaaatatacaatataataatatagtccacaagcacgatatatcgttaaaattataattttacccttctcagatcaaaattatgaaagtacccctaatacactaatgggggtcttaaaatgcaatttatcagtatagtttcacatattaaattgtataataatacaatttcacattaatacataattaaactagttaaggttgctaatctgattttataaaccttagggtattacaattgtaaacaacccgattagaaagagattagcactataacaattcaaaaagaggtttatagtccttggcggtgaaaaactattacaagtggtttggaaacaccttggtgaaaaattctagtttgtaaagggttagtcaagcccgttaacttagctcgttagtggaactcaagctaggtccataactttaaataccaaggatgtaggtggctttattctaccgaaccttgtaaaaattgagggtttacaaacttttacccttaaactctttactttacaagcttgattatttgcttaatatactttcttgccatactatttgcatttacttgattaatttcatagttttgtgttgaaagttttaatttactgaaattagtttaaatttctaattcattcccctcttggaaacatatcttggtttaaaaattggtattagagcaaggactcttatttatgggtagatttcacattctaagagtatgttgtttccatacaattcacacaatagcatgttagaaggtttaagcacaagtcaaacaccattttttaatggggtagacttttcttattggaaattagaatagaaacttattttcaatccattgattaatatttgtagtatattttatgttatggtccttaaattcctatgcatgttgtagatggtgtagtaactgcaaagaaatatgatgcatatgatacaagtaataaaaagatgatgtctaaaaattccaaggctaagtatgctcttatatggattagatagagatatatgtaaaaatatttagcaagcctcatcgactcatgatatgtgaaaaatgttagaagtaactcatcaaggaactaatgctatgaaagaaactaagattcaaatttattccaatacaatataaaaatttcaagatgagacaacatgaaactatttctaacatgtatactcattttactactattagcaatggtttgaactctcttggtaaggttctcactcaaaagaacatgttgaccaaaagcataagaagtcttaccaaagcctacctaggcaaagttgttgtcatcgaagaagccaatgacctcttaactctaccattagaagagctcaatggttctctcatgaattgagatttgcatgagtgctcaagaactagaaaaggaagttgataaaaagatgaacacaattacattcaaatccacttcacatgttgatagtgaagatattgaggatggtgatagtgaaatgaaggatatagccctactctcaaagaactttaagaagtttctgaagttcaagaagaatgaacataaatttcacaaagggagagtaactcaagcgagagctcaagaaaagatgatcaaatcattcgctattaatgcaaaaagcccagccatgtaaaaatatattgtcctttgagaaagaagaataaaagaagagcaattatagctacttggagtgaaagcgaggtagaaagctccaaagatgaacaacaagaggtagctcacatgtgctacatggaaatcgatgataaattagtaagtatttttaaccaaaccattgattttgaaagtgaaagtgatgtgatgtgcttgatatgtcttatcatgaattatcaaaatcttttcatgatttgttttttgtttttttgattttgaaaaattgcttgttaaaaaatcaactcaaaaaaaggaaataagcttattgctttaacaagttgagattttgaaagtaaaagaaaaagaaattttgattgaaacctaatgcaaaaattgttccttatttgaaaaagagatggtaaacttgaaggctaaaattgatgatttaaacaaggtgatttacaattttacaaaaaaaaaaaaaacataattttgaaatgatgcttgggagtcagaaatatactttttcaaaaagcagtataggatacaacactagtgtaaaataaaaatttcttaagaatttctttgttaactcatctaataattttaacttaacttgcacctattgtaaccaagatggtcacactaaatcttattgccatgtgaaaaggaatgcctgtttcgctaaggttatttgggtaccaaaagtttcaaagactaacatgaaaggaccttgatacgtgtcgtatattgctgtatcaaatttattaattaatttaattataatacttttaattattttagtataaaagaaagtactggtcgatcccacgataactatgtttactctattattcaaaatataacaataataaaaatgggaattgtttttatttttgtttgtagaacaaaattaacaaataaaattaataaaacaaataaaatgtgtactacgatattcaagaaatagttaaaagttaatctttaccctcaacaatcatccttaattactaataacaaatgttattttaatttttcaatcaaattattagtcccgcagataatgttaaaacagacaattatctcaatcttcctattgtaagtaatcaaggtgaaacacccaataattaactcttttaactgagcaataaatctatgaagcatacaacttatctatgttaaataaaactttgaattcaatggagatagattaatctaggaaataatttaatgaaatatataattcatttaacttaggttctattcttcatcacaattaaaaaaaatacttttgataatattaaaaattgcaatttatcacaaagacttagaaacttagattatttggtgaatatcaatcttaagatgataatagattaaagtaaaacctaatttagtgatcatttaaataaggctaaaatcataattatggcattaaaaatagaagaatagaaacaattcaatatattggtaactaagaaaataatattcatcatagaaattaagaattcatgtcttagattttgaaataacctttaattaaaaagaaactagttcatactagtcattataatgaaaatgatataaaaaataaaataaaaaattaagaagaaaagaaactataatgatgaacaattattgatgcaatcttcttctctttctttttctgagtttctttctcaaaaacacagt

SEQ ID NO: 48970 - DNA, 931 bp, Cannabis sativa
ttttttttttttttttggggagggagatataatctagctaggtagagagggaaaattgtgttgtctttttgttatagtatttttaatatgcttataatgtatttatatgttcttctaatgcaaattaagtaaataatgtaaggttgttattaacttgaatttataattagaagttctaattggttgttaggctaaatatagcataatatatataatttaataaaagtaaaattaaggagatcctaacaatcatgaatggttcaaaatatgattaattgtttgatttattactaatttataatgatattacaacctagaaaaataatctcgtacgtaaaacctcgatgtggtttaaattataaagggctatatatattaatataaatataaatttcaagtttttgtatggtgggaattgaagcagagataagaaatttatattaatattgagatagaaatttcattaaatattttatttattctcacgataattaatttaatgaattatgttgtacaatgaatattaaatttttgatgaacaatgaatattaaaattgaaaaggaaaaaaaataataataataaaaagagattttttatgctactatatataattgcagagagtgacttgaatcacgctatgataatcgtcgacgcagaaaaatttctagttaacaaactaattgtctagtcaaatatatagaaagtcagaatatgaatcactactagcaaagtaacttatataagactaagttatcttaaaaatttaaacaactaattggaccaaaactacctacaaaatatatatagatatagaaaagtggtcggattagcacactatacaatgataatgttgtgaatttttaaattaaagataaaacacaattattatggcgtattctatatttagttaaaaaatttaaaagaataaga

SEQ ID NO: 48971 - DNA, 1016 bp, Cannabis sativa
  modified_base (864)..(871): a, c, t, g, unknown or other
aaaactgttttaaaatgtaaaaaataaaaaaaaaatcatttttattattattttaattaataattaagtaacaataactctaatagctctaaataaataagtaaatatatgttactaataattagtataaatatatatgaaaaacttttcaatgagtattatccattgatgagtactaaacaaatttaaatataaatattaatttaaaaagtattaaacgattagattttaatctattagcgaataataaaatagaaatttgaatttctatatgcttgatttagctacttaattaaaaaaaaatcaaaaaatacttttaatttcttacactatatcaaaaatatgtttatatgaaaaatatttaggttaaactcaacttttttttagtttttttttttttttttgccaaaaaacttttattttattatttttcagctaattgaacaaccccaacccatcgtatataaagatgagaaattttttaattaaattaaaaaattaatcataaaaactcaaaattttctaagatagtactcattcatgggtaatatccattaagagtgcacatatataaatatatatttaatttatatgtaaatgttttggttctgttgacatgtagctttctctttcaaatctcaaaaaatataatttcttttgataatcataaaacgtgtgcttattattggaaactatatattatataaaagttcggattcattaatattattgtcaagtcctgatcacacatgtataaataacataaatttgtacaccacttgaccactttttagatcataattaatgaaatttgtgaataagatttcaataaaatatatgtggttcatatatatatatatatannnnnnnntatatatatatatatattagtatgttaaattattgtaaactctctttcaaaaatgaaaaactgtgaacaggtcacatgtatgttaatttgtttagtacgttcaattttgtttgggaaatttgattttctatgcttagaaaatcaa

SEQ ID NO: 48972 - DNA, 1092 bp, Cannabis sativa
  modified_base (99)..(101): a, c, t, g, unknown or other
cctgggaaaacttcccaagaggtcacccatcctgaaattactccaggccaagcccagttaactgtggagttcttttgtgatgggctaccgaaaaacaannngcaccttgttgatataggtagttccaatcaatccatttaagtcctcttcaactgtgtagtcccatacatacgcagcctcagaatcatcacacttgaccttccccaggcgatgtgggatttcacagcttacccggtatttctccttacgcatcacgagactactgactatcacgcatgctttgttggttgattgggaagcacaaaaacaaggtggtttggaactctaaaaggcctgaggttagtgagcttgccattagctaaattgaactttatagactggtatattaatgctcaaaagaatactgtccctactcatagagttaatgattcggctgatgtagttttagagcattggacccctccccattttcctacaattaaagttaatgttgatggagcaatctttacaaatgaaaggcattttggtattggtttggtagtaagaacggcggttggggtagtcttacaagccaagagatcgattaaagtgggtattttgcagccacatgttgtgaaagtcattggcatcaatgagactttaagttggattaaataaatggttggacaaatgttgtggtggagtcggattgcttgagagtcattagagatttacaattaaaagtttaaatatatggcttctccttatggccatattatctcggattgtatgactatgtgttcggatattgttgatgtttttttttaattttgtaaaacgatctgctaataaggttgcgcatgcccttgcgcgatcttctcttcttgagactgattataattatactagggatgtgttacctatagtttatgcatccttagtttcagatgatttgatttaataaaatttcatcattattccaaaaaaaataaattgagaaaagctacatatatagcttattaagaaattaatgacatgcaaaataagtgcaacttatttatatgctactaattatgtgcaaacgaaacttgcatgttggtacatggtttgtat

SEQ ID NO: 48973 - DNA, 1199 bp, Cannabis sativa
tatgctggtaaaagtgacatttcttgtagtgacaataatgataatttataattagtcacaaattttgttgtgactaaaagtaagatttttgtaatgtttgttctctttactagctagttttctcccttttaaaatgagataaactatatatcacaagtttcattcttaattaattctaaatttgtgattgtttaaaaaaatattaaaagaagttgttatacgtagattattatttaatgttacatgtggtaaagatcataatactccattaatactatattagaaatagtctcacattatcaatgtgtgaaccatatataagattcatgagctgctcctctcactcatgtctattgattttgagatgcaccttaagtaaacacttccaaattctaatatggtatcagagcaactaaaaacactttcgttgtcttcgtcgttgatctttatttgggaactttcgaccaattatgtgtgtaactttctagtattggaatttttaacctataaaaaatccacaaattttttgacatgggccttatgggattctttcaaatgtcacgtttgactctgtagtctcttaaatgtcgttcatcatactctcatttctaagctcaaacgtgaagatgatgtattagaaatagtcctacattgctaaatgtctagaaaaataatactacagataaaaatcatgaactactcctctcattgctaattaattttgaggcagaatctcatacatcttaccttcgttttaaattataacatcctaagtttctttcactagattttgtaattacttttattatttacccgatatatcaaaacgtaattattaattatattgttacatgataaacatattattatactttatacatacaccctaagttttttccttcacctagatttgaaactttaacaatttacatgaatattcaattctctctaattaatgattggatgttaactcttacatgttaagcattacgataagtcactttattttaatttttattccccaactgataaggaaataatacaaaataccgttatttttgttatccgttagcattaaactttacaatatatgctaatttacgttctttttttttttatccatgcatgcaaacttgattgtttacgtaaaatattagatttcgctcccacaatttaaaacataagaatctatctttagc

SEQ ID NO: 48974 - DNA, 719 bp, Cannabis sativa
ttctcaactttcaggttttcattgaggccactagagaggggagtctcactttcttggtggccaagtttgatggaatatttggacttggctttcaggaaatatcagttgcaaatgttacaccagtttggtaaacaagttttccattcatattcttgccttaaatttttcaataacaataataatagtaattctaaaagctggtatgtgtgaaaggatatattgatttttactagagtattacaggtacaacatggtgcaacaagaccttgtaagtgaagaagtcttctcattctggtttaaccgcgatccatcagctaagatgggaggtgaacttgttcttggaggagttgataaaaaccattataaggggaaacatacttatgttccagtcactaaaaaaggttattggcaagtaagtcaaatcaacaattttgtgttacatttcattttctcttgtaagattgaaaaacagcactactcatcactcattattttcttcttttcagatcgaaatgggtgatattttggttgggaaccagtcaacaggtgatttcatgatcatgttgtttgattgagtattaacataacagaatcatatacttagagtaaactaatgattgtttttctcaggtgtttgtgagggaggatgtggtgccattgtcgattcaggaacgtccttgcttgctggtccaacagtatgtactccaatctttccaata

SEQ ID NO: 48975 - DNA, 1726 bp, Cannabis sativa
cctcacttgtggcgaaggaaaaccatagttacaataaacaacaaaacgaaaagtcttgagacaaaaacactatccaaaactgccccaggacgggattaaaagagacaaaacagagccacatgctgccattataaaattgttttccattctctacataaatctagaaaagacaaatcctcaaaatgtttggtaaacaattaaaaaatagcttattgaaaaatttaaaaagaaactacagctaaaagctaaagctggtaaaacccaacatttaaaaaaaaaactgttttgattaaaagactttataataaattattttgtactaaaaatgtgtaattatttattatatattacaaaaaacaaaaatatttttttgaacgaaaaaatatttaaaataagtaatatttaaatttcttattttttattttgttttaaaaaatatttaatatttatacttatatttttattattaacaaatcacatcaacctagaatttcttataaactacaattttttttttttacaagtgataaaatataattaaaaaatgttataaattatttttatcaaaaacatataaatttatattatgggaaaaataattaaaaatttcatataacataattttttatacattcgtgattattatgagctagactataatattattataatacaatcttaacaactcacaacacttaaaaatttataatttaccaaacacttagctcagcttttttccacagttctactacaatttttttccacagttctgctacaactgcttttcttacagcacagttacaactgttttttttcacagcacagctgtaccaaactgacccttaaaaaatctatctagatttattatcagtttctacattttgagggtctatattcctgattttggggaaagaagcacatctcttgaatttatgcctttcaggccttggctctcaaagatcaaccctcatttttcaaatataataaattagaataattgagcatgagaatgcctcagtgtttttcctactcactctactggtctcttacaaaatctctaaagattaccgttcaaaaccaagatcagactttgcagcctcaccttttgagtggatagcattgtagtggaaagaaatatagcttcaaatagactgcagacatgttattttatttaattccatgttcaacttgatatttgagtaagcaatgaaaataatgtagccaatcttgtacttaagtatcaaattaccaaaatattttcttataataataaaataaatgaataagttaccccttgaactcaaataaatagttctaatagatccaattaataaataaagaatacctgatttgacggtttttccataatgaaaaaacaagacaaaattagaaacaagagcaaggttcttgaccgaaacccctttatttctaagtgaactaactttaaatggaattatcatgttattgtaatctaatctgacacaatcacttgggaagaaatcactcccaaaagctagactaagggataagggtgcccaagtagttatgaaccacaaaccaatctcatacatgatgaatgtgggatcctaacaatacaccctcctttagagtcgacgtccacagtgccccactctactgtgacctactctgcggtggcccactttgggcttaatccacaagtcgccccttcctcgacgtcagccccacttaaggatgcatgacttcg

SEQ ID NO: 48976 - DNA, 1185 bp, Cannabis sativa
ggtctcagagagatctaattaataaagctaggcgtacgcatgggaaaagcatgtcctacaccctcctaccaaacagacaaataattaattattattactaataattttttttgtttaatattgactttctgttgtctctcctccaattccaattctaattaatcagaaattccatatactaggtaaaatccaatttacgggttgtgattgagtgaatggtatattccttgtggtggagtggatagatgttatagaatggtgtatttgatggagtttgaagaagttgggtcaagtgggctgctagcttaggtgcactatcaatgttgttgcaggggttcacatagctagctaagtgtgctagtcatggtattcatgtggtagcagggaattaatgtgttgtttgcatcagcaacatttcttaatgtcgatttatcacctttctttagttgctgaaatgagggcaattacagagggtttaagggttggtagtgtagagatattgcacgatggactatattgcaacaaattataaattatctacaacagccttgtgttactggtttactaatcaggtggctcttgctttagcttggtttccaaatctagtgctagtgatttggggttgttttgtacgacttccatttcgaaaagaaaaaaaaataaatacacaaatattgcctaattataaataaatttggaaaattttacaatgtaccctagaatgagtgtactggtgtaccattatttgttttaatatctgaaataaatttttttacaatctttttatagttatttaagatatttttcaaaattttaggacatttgcatataaatttaacactaaaaattagactaaaaaattctcatagatatcgaaatagatatgaatacatcggtgcaccctttttacgagtgcatataagtaaaagaaaaaaaaaaacctttggcaaatggagagttcgttaaattggaaaattctataatgtatttccttaaaagagatgcaccaatacatttctatctgttttagtatctgaaataattttttaatcaaattttttcatatggtcatgtaaaatatagttattgagacattctgcaaaattttaagaaattcagaaaagtttaacacaccgaaaaatgcgttcaaacattgtgttacatgcgtgactattttattttata

SEQ ID NO: 48977 - DNA, 1461 bp, Cannabis sativa
tatataataatcagaaaatttaataaaattatcaattctcaattgatatcatatatcgacttaatgaagagtaacatcaaagttcaacccaaacagtcaaatattggagcataatatttttgtttagatattaatattatgttattaaggttgattatgtacaaattaatatcaagttgagcaatttaatcaagcctataacgaaaagttgaataaggtcaaaataagtagataaagaataattttatgaagtggaaagctttgagaaactaaaattaaagaaagacaaattaccagttttggggaaaagtttatttggattagggtttgggcaacttatttcaaactcttatcccaagtttaaaaataatgttattaattatgaatatgaaaatgaggatggcacatgacattataggacttttttttaatgactcaaaaaagggaatatatgtcttttgaataatttgcattatattaatcctacaattcaacattaattgcttgcttcatgttctatgcctttggttttttttcttgtatctccctcccacactctctccacttagtcattaatcaagacaaattatctttactaattaattaattaatttcttatacaatatttttggttatagctaatttttgatccacatgtattaaattatgtctcctgaattcttaggtcgttaaaaattatttctgaactattgagattatcaaattcaataacttttgttaaatttggtttaattttactaacacaacaaatgtccatgtactaatcatgcccctgaactttgatatctaccaaatcgtggtcactaaactttgacatatgtgtgaaatcatgtccttaaatttttatccacatcagactttcgttagtaaaattgaacaaaattcattgaatccaacaatctcaatagttcgagaaaaatttttaagaacctgaaaagttgaaggaacatgatttggtgcatgtcaaagttccagggtgcataattagcctttatttaaaaccaaaactttaagattgtgtttggctgaaaagaatgaaaacacaaaaataagagtagaatgaaataaaatttaataaatgcataaaaaaaattataataaaaaattcatcttgcattggaatgatctttccttttatttcaaaatggaataatgttccatcaaaatggtaaaaaaaaaagtcattccattagaatgaaattttaatactttaaaatacaactagacaaagaaatgtaatagaatctgattcatttttcattccattatatttcattaactccatctaaatgcaacttgagtaattactttcataaactcgtcatattagagttttaacatcaattcaaacaatggaagaaattgtagagaaatactatgagagttgtgtatagatgacgagttattaagagagctggaataatttaaacaaaggtgtct

SEQ ID NO: 48978 - DNA, 808 bp, Cannabis sativa
  modified_base (28)..(47): a, c, t, g, unknown or other
tttcgtaaaaaataaaaaaaaaaaaaannnnnnnnnnnnnnnnnnnngtgtaaaaataaaaaaaaaaactcattataaatataaggctccctaaaaaaagaattttttatttgtttgattatcaattaatttttacttcattcttttgtttttgtttgattgttttataaatttcaatttaataaaataatctggtggaattattctatcaaaatctgaaaggaaatgttattttgatccatgtatagccgaatctcattatttgtaggctttgcgccaaaaataggacatttcaacggtcaaaattcttggaaaaaaaattacttttaatacgaacagatagtttaactttaaattttttttgacaatttagttgtcaaaatattatttaatttattataaatatttaatgtgaattaaatattattttcttgtgtgtgatctcgattttgtagctctaaaattttcataaaagagaaaaaattctttttatagaaagtttgattaaatgagttatttttggaaaaattaacttactttttggcgaaggggaaggtattaaagtccaaatcgtgatattgaatttatttggaaagtttctcgatttttcactatagattgtaattttgtcgctaaaaatcaagacttattttgaaaaggttttgtacagctgtaaaaacttgttgtgactgtctctaagatttctatatattataaataggacctagagagtaaccaaatattcttttatcttctagtctcatattttcatatcttagttttgtgagaagagtgttttttttttttt

SEQ ID NO: 48979 - DNA, 1340 bp, Cannabis sativa
attgttgagaatgtatataaatatttatttaccttataacatctgccctttttatttatatagttatcctgcattttatatgtacactataattttgaattgtcaagcttcaagtgtccaatgctttacaataaaatatatcaagtaaatttattagcatgaattagcacaaacatgttaacatcgtcttatggaaaaatttcagagacaatttctcagagtgggtagttttttgacagggttttgcaggtgctgcatcaagatacgtaggtctcagaagcatgatgactttacttggcccaatgtattgactcttctgttctgcatcttctgaattttccaaatgttcttgtcttgttcgttgatggttgatatcattgggaaaattatctaagagtaatagacatccttgaagatgctctcttggacaacatagtagatttatgtttgtgtagagtaattattattgttattttcaaatatttaatttgagaaatgccttttagtagtggaactctgaaaaattgtgatttttacttcattggaaattctacttgtttgcatctgaattcagatagaatcacaattaattttttgttttgatttagactattcaactaggtacttcatactacctttagaattcttagagaggtggtatatgttgatcatgttacatattcatgtataggatgtggaatgataaagatatgaaattatagagttctaaatcatcttaacattattataactacgtttgttcttgcttagaatttatctatcttattttgttgctggatattttggttcgctttaagcaaaagtggcttgcaagatatttttctccagtatctttgcttattttacagtccctttttctctcttcataacaggggatttttatgtcaaaactaggctattttgttagactgcatcttcaaagtctgaatgctggtttgctgctttaatttttttcgtcctcaaatatatgttatgcttcaggcagttactgaaattggtcttctgtgtttcactttttgtttttaaatgtttgtctacctggccatttgattttacttatgtctgaatgcttgcaggctttggggaacatttctggctgatgttgtcattcaaatgctaggaacggattatgcaagaatcatacgagcaatttatgcgtttgcccaggtatttacatcatttcatgctttgtaactttaattttttcactcatcattgttacacatttgtctgcctttaccaggagactccttattcattcggatagagttgctgtcatgtttttgttcgtttcgtacatgaattttacatatctatgt

SEQ ID NO: 48980 - DNA, 1469 bp, Cannabis sativa
  modified_base (1438)..(1443): a, c, t, g, unknown or other
ccttttttatttttctcaatataataattttctttctaaaagacgtagtcaaatttgatttggggtttacttttccactcctcctaattaaccagttcgatcctcatcttaattaattaaagatcgttattgctttaaattaatttcgatagtgagaaaaatataataataataaatattagaagaaactcatacatatttcatgatctacataaaattttctttccaactgaaactgatgaaaccaataaaaagagaaaatcaaacgtcaaaggttagtatgacacttacgtatttttttaatctttctaatatgtgtgttttgttatattttcatgactttttgttattgtcaaccacgtggaagaaaattataaatatatagatataagcattgtttatcttatattttatttgagctaaatatattgttggacactattgaatgacgtccaataacaattttcataaatatctcaagaaggaagaaatgagataccattatattaattaggaaaaatttacagcaaaaatatttattttatatataaactacataaaataaataaataaaataaattaagagctagggctacagagacagcccctatgttcaactatatagtgtgagtagcgcacacaaggtatatgtgctgcaatttttgattttttaattatttgttatattttttatatactaatgaagaaaaaatttaattgaaaacatattaaatattttgacaaattgctaagttataaatgatacaatacataccagcacaaatatatgcatattaatacaacttaattgacccaaaaaaaaaatatttgtcttatatcatatcatttttagtatattttccttctaaaaaatgatgtagtgaaataaaatttcaatattaataataataaatttgtaaatttggtgaaataaattaatgtaacaataataagagtagatatactctgtaataatttttgtatttgatatataaaatgatactatattattatttttattatttgacaaattgataaattttaccaaataaaatgtagtattttttacgatgttacttggcccaattacaaaatgaaacaaaactgccacaaaaaaacaaaaaaatatataaacttagaatacatagaaatgtgaattctatgatttaatttaaagcaaatatcacatctaacagtaagatatgttttggtaattttgtatatatttatatatctatactagtttttctcagccaaaaaaaaaatacgcatatagcataggtagccattatatatatgtcgttttctgttgtgaggtttatatatatattcttcatatataatataatgagctcagctaggtataggtataggtataggtttttgattgctcgtctttatcaaaatatcctttgtataatatctttatatattaaannnnnntatctaacggcatttcttggtttaac

SEQ ID NO: 48981 - DNA, 635 bp, Cannabis sativa
gtgatgttcctggctgtttcaaccaccgagcttggtaagcctgccacttctgctaatagaagaccatagtgcgggatatgtcttggcccatctttgagatcaaactaggtaagtggaaaggatttcagtacgggagagatggccaagaagataaaagaataaaaagaatcaaaatgaaaatcaaacacttaccttgaagtctaagcgattatttctaatgtcaacattaaagtgaagaattttcacattggggtagattgttgctagttctgacaaattctccatgtgagtagcaaatattgtatacctaaattagtaaggtaagatcatcatacattatacatttataatgcaagagaattctggttttagcagaattaaaagatgaaacaatttgtcttagttccttggccctatcagaaagaagaaacatccaatctctatagaattatttaatgtaatgctcttactaaaccacattttattataaatatgatttttatttcaaattctattttgaaaaatacagtaaatcaatactttggagattttcaagcgaccaccttaagaactaatatcatttatagtctaataacttaaaactcacggagtataatagagttttatggcattac

SEQ ID NO: 48982 - DNA, 1072 bp, Cannabis sativa
accatgttatctttctcacccagaatcccagacctcactctcctaagctcctgcatatgcgctccaacaccaagaatcaaacccaaatggacacaaagcgtcctaacataagttccagcctcacaagaaatccaaaaaacaaccaaatgcttttctgcgtcgaactcaagtagcttgctttcataaatagttctaatcctaagctgcctttttacagcagaaatcaggggtggcctctgaaacacagccccggaaagggtttcgagtgcccgagccaccttggcgacatcggggaccgcagaatgcaacctcgctatacaaacatactctttccccgcaccctgctgagacttaacaagccttgtggctcggtcaatacagacaataaggtttccggtgaccttgggatccaaggtgccactgtgacccgttttctcgacacggaggatccgcttaatccaagctacgacctcgtgcgaagatgggttcgagggtttatcaaggttcataataccgtaccttatgtactcggcaagggggcgtttcagcggggagtaaccggaaggaagaggagtgtagtgtccggttcgtacattgagacgatcgtagttcttgagaaggatgggccactgagaagtgtcgatggtgggagtgtagctctgtggtttgatcatgaaatcggtgtccttctgagccggctgcgactccaagtcaccaactggtttgggcgtgtctggtgcgtcatctttggagcgttgcttcttcttcttcttctcggagcgaacctcgacggaggacatggctgagcgattctctagggtttaaatggcggcgaaaatcggagggtggttttctgtgtaaaatggagactggtagctcattagggttttgggttttgtggggttttagtaagtgatttgtatgtgctgggaaaggagagagagaagccattgcaacctcagcgtcatcaaagcatgggctggactatatcaagctgggccaacgacgaaggcccaataatttgttgggtgttttacaatgggctatttacaaaaatatgggaaaataaaga

SEQ ID NO: 48983 - DNA, 1236 bp, Cannabis sativa
gagggagctgcaatgtatgatgccgctaatgctctctcagaagctatgattgatcttggaatagctattgatgggggaaaggacagtctttcaatggctgcccatgctggaggtgagattgttaaggctcccggaaaccttgtgattagcgtctacgtcacttgtcctgacataacaaaaacagttaccccggatttgaagttaggagatgatggtgtgatacttcatattgatttggcaaagggaaagcgccgtttgggtggatctgcacttgctcaagtttttgaccaagttggggatgattgtcctgatcttgatgacgttccttattttaaaagagtttttgagtgcacacaggcacttcttgatgatgagttcatctcggctggtcatgacattagtgatggtgggttactgacgtgtgctctagagatggcattttctgggaattgtggtgttgtattagatttgaattcacgtgggaagagccttttccaaacactttttgctgaagaacttggtctccttattgaggtaagtaaaaaaaacttggatgttgtgatggagaagctaattagcgaaggtatatctgccgacattattggacaagtaagttctgaacccacaattgaattaagggttgatggggcgtctcatttgaatgagaaaacctctttccttagggacatgtgggaagagaccagttttgagttggaacacttacagagattggcttcttgtgttgatcaagagaaagaggggttgaaagttagacatgaaccctcgtggaacttgtccttcactcctactttcacagatgagaagtatatgagcgccacatcaaaaccaaaggtggctgttattcgagaagaagggagcaatggagatagagaaatgtctgcagctttttatgcttctggttttgagccatgggatgtgactatgtcagaccttttaaatgggtcaatctctctggatgattttagaggagtggtatttgttggtggtttcagttatgctgatgtccttgactcagcaaaaggatgggctgcatcaatacgatttaatcaaccccttttaaatcaatttcaggagttctataagcggccagacacatttagtcttgggatttgtaatgggtgtcagcttatggctctattgggatggattccaggcccccaagttggtggtgttcatggtcttggtggggacccatcacagccaaggttcattcac

SEQ ID NO: 48984 - DNA, 1176 bp, Cannabis sativa
atgagctgaatgctccttcgttcttgtgtgacattgtaatggctgaggcctgttaatcttaatgagaacaatcttttattcaaaaaaaaaaaaaaaaaatcttagattcatgtaatagagattggtatagtgcaatactataacctattaagtattcctcctcaaatctctacaactgaaactgaatgatcttatcaatacaagcagagaaaaaaacagagcatgaaagaaaagtgagcttgcaaaagatacaagactcattgatggaacttgtatttataggagaaggattacatagttacagagaaaaaaactaagagaattagtaactaacttctaacagaaaagaaaatacaagatcctaactaattgtttgttgaagacttgctttatcagaaacaactcgttaaatctaaatttatacaattctgatgaggtaattaatatatatttataaaattagagaagagacctaacaacaaaaccctagttaaaatgagtcacctcatcatcaaagatttcttatcttataattaaatatgacaaactatatttgttaatattcttaaattaattttttaaatcattaattagtatgattttaacttgcatttagagtcattttgaggggttttaacactttttgatgaaaaataataaaagctagaaaactcaattttacaagtaagtgtatttgtggattttaaccactttaaactcagatttagatttagaattccacatgaaagttctaaatcttgttatcaagtttccataatattttgaatcactcaattacgagttgtatattaaaggagttatttgagcacgcagcatggaggaagaatcgtctaaatgccacttaagtttcacctaggtgaccagagttcgcacaatctgtacgatttgtaaaaaaaaagattttgagttaacattacatagaattttagggcttcatcaataaatattaggacttaattaatattattttttaagtgtttttaattagttttagttgttgtgttttatacaattttacgcttttggttgtaaatattttcaggtttagcattggagaagattaatagagcaaattcaagaaaaaatgtgcaagaaggatgaatgaaataaagttttgtcgctagaacaccaagaaaataatctaagaaagaaatc

SEQ ID NO: 48985 - DNA, 1634 bp, Cannabis sativa
  modified_base (796)..(797): a, c, t, g, unknown or other
tttttcttattgtgactaggaaaatttttaaggaaaagattaaaatttttgtgactaatatttcaattatatattttttagtacgtaagaacatagacattataatttttttagttttagtaacaaaatttattaggtaaaaaattaatcaattattattagtgtttgtactatatgtgctaaaaattgtactcataatttggatcatgtattaattttttctaacaatcattaataattacgtcagaattacatattaattgagcaaataagatatctaagggaaattcaatggtgcactgatgcacttctttcatgtttttgatatttagatagttttagtttgtaaattcgtacatgttatgttactccaacctatatttatttgtgttttcaaaatataaattgtgttgtcgtactaatattttaaaaggtaggcctagcatgactcgtaagtttagtattttcgtgtcatgttttgctcgtgtcagcccatatttcttaaactagcatgttttcatatccggactcgaattcgtgctttaccttttcatatacaattattaaactataagtatattttatagctttagttatatttatataactcctctataatatttaaattattagcatttatttaaatttgtgtgtagtaaataatttttacgatactggtatatgtgtagtaaataattttctatttttttttttgaaagaaaaacgtgtagtaaatatttgataaacgtaacatgtttgcattgacataggcagggccgaccctaggtataggcgnntaggcccgtgcctagggcccacactttccaggggctcaaaataaaaaataaataaaaaaattattaggcttttagttaagtaaaatttaagtgtaatataagcaacaaatatgtatagcttagttaattgaggtggagggcataatgtccaaggtcataggttcaaatctcataacactcttcttttatatttttttttatatattttgagggctcccaaaatttaattcgtcttgggcccatatattttcaaggccggccctggacatatgccattattgagtatagcccccttaaaaaaatcatctatttttgaattaagcaagttttctttaagagattgttgaaattgtggctctaaagaaagtgttatcattgttgaagtgcgataatctgagtgttagtattatcgaatttgattgtctagtattggtataagctactagaaatttgaatattttgtcacccacttttaatagtacgttgaggattgtaaatatctttcttcttagttttttttttggtaagtaagaagaaattttattttcacccaacaacaattacaactgttaacgcaaatttttgttaattaaatttgatcctaatagtgatgatctcacacagaaaaaataaaagctgtaaaataaaaagtatgaacaattaaaattctgcatagtctacgagtcaatcttattagatttgtgatagttattttttaggactattttcatactacctgccactatttataatcacatagaagacaattaattacaaagttaactgtaatctttttacaacaattattccctggaatcatgggatctgattacatat

SEQ ID NO: 48986 - DNA, 683 bp, Cannabis sativa
aataatagtaataaaaaaagatagattagttttttttttgtttttaagtttttgtcacatgtatacatcatgctaacatattttagattagttgatataattttatggattatttttcaaatatttgatgttattggtattgacaaataatggttgcaataatctccaacaataagaaagcttgaagcctcgaaataatcaacaatatttcaagtgataaagatatttatatatactataatatagtgtaattagacattggggcactagaacaataattcatgtgttgagaacatcaatcattacaaaacattggagttgttcatccacaaactcaactaattatgaaatgtcctatttccgtttatgattctgagctatatttattataatatgtattttcagtttatacttaattgcatctctatattaatttttaattatatatgtatattgatgaattaactgcatctctagctatattataaaattttcacttatatatgtttacagaattagtgtatacaaaatgggtaataataaaagtgtgctaggatcactattaatatatttaattccaaaaaaaaaggaaagaaaaatattcgtttagattggactaaaaatgattgaattggactggacaagattggattatgctgaaagtaattatgtgtttagtttaa

SEQ ID NO: 48987 - DNA, 1840 bp, Cannabis sativa
attatattttattttagggtaccaaatatgtacaatttcaaaatataaggtattaaataaatattattgaaaatacaaggtactaaatgtatttttcaagaaaagatatggtactaagtgagtatattcccttttctatattcaagatagtttttagtatttaatacattggcgtacaatgtagttatctaagagtatttgtaaattttcaaaattttttgaataatttacaatattaagattatttggtgtaataataaagggtcttactttaaatcaagagatctaggaattaatttctatcatctacttttctatattttttaaaaagtatttaatattgagttatgaatgattaaaccttgaagctcgtaagaacttataaattttttactattatactaaactactaaaactatcattttgataataattaaactatatgtaagggtcccaaaatttaatttatcttaggcccatataccttaggaccggtcttgttatttccttaacatgtttcagtatattttctatattcaagatagttttttagtatttaatacatcgtaattatgtacattataattgtttaagaatacttgtaaaattttaaaaaattttaaataatttacagtactaaaaaataaaatttaaataattattcacattgcgtataagaaaaaataatcatccatgcaataaaatatttaaattttattttagcattttaactatttagaaatttctaaaaatttataagtggtcataaataattacaatatatgcgatggtaaaaaaaaataaacaaaaaaactctcataaataccaaaataaataaagagtgtattgaaaggagtaactatagtctatagtagacttaacaattggtgctttgtatgttttgcatagcatttgttattagggtattttagtagtacccaagagttagtactctaatagctatttgataaaaattatttaattaaaatatataaaactcaatatttattttcaacaacattatattaatagtgagtagaatatttatatttcatttcatcttttagaataataatcatcatatcaaagaagtgtataatattttgttgaagaaaatattttttcttcaataattttttttagtctatttagtaaatatttactatttggtaaagtttttaatatattaattagaatcacataatcaatgttataatcacaaaaaaagttaaaacaaaattttgtaattttgaaaacttattcaaaataactatcagaaaagaaaagaaaaatagctaactcataaagttttattttttactactccgataaaagaaatatcattagattcgaaatgagcttattttcgagtttgtgtaatattgtgctctaatttaattggtattatttcacaagaaaaaaaaaacaaaaaattaaaaaataaagatctcttgaaccctaacggtttgaatattggaaagcattttttttttttttcaagtagagaataatatcatatatctttcaaaaaaaaaaaaagaataatatcatataaatgaatgtggtaccattagcatagatgtaagcattttatttttcactatacaagcctttcttacaactcagagtatagtacaattattaccaaaaaaatacaaatttgtcaaagattttattttattttatttttaattctgaaaaattacatgtcggtggaaaataatagccattgcaattatttattaaaatccacatattttataagaattctatttagaatgaatatttgtagaaaaaaatagtaatgactatgtcaaaattgtccttattgtatataatt

SEQ ID NO: 48988 - DNA, 622 bp, Cannabis sativa
tagtagccaaggtggtattaaatataaaattagtggtacaatatgggtggcacatgtgcatgtgttagtatcatcaaataaccttattcaaaatttgaattataatttagattaaaagataggtacacgtgcatgtagctctcaacaataatttgagcttgatatggtaagaaaattctcacctttgtcaaactagttgaccgaatcataaggtgaagttatagattttagttattcatttgaataattcaaaaaaaaaaaagccacggcatagggttagtaggaggggttgagttagtgttggactatataaattcaagttattactctcacatttattcactctcaaaaaccaaaactagatatcattctctctctctcactcaaacaacattctgccgaagtcacttctctctaaatcccttatttcaaaattctctttgtttcattaagggccaacaccattactgccaagatcatatatatattctctttcccttaatgctatcctatagtcatcttcttcaagtttactagttatttcaaggaccaaaagtattatctcatatatatagatatctttcatcttatcgacgtcaccacctctattttcacaatcaaa

SEQ ID NO: 48989 - DNA, 1419 bp, Cannabis sativa
agtgagtaggtgaattgaatacacccttgttaatccttgagttattagtcaactaacatcgaaagttagaagcactaatttttggggttaacagccacctttttggtagtggattgtccagcagcctacaatgtcgtgttaggaagaccgtcgcccaacaagttgaaagaaatcactttagtatatcatttacctatgaaattaccaactcccaaaggcatttccaccttgaagggagaatagaaaaaagccagagaatgctacaaatgtcactcaagattgccaccaaatcttaagagccaatgacgatgacgattcacgagggactcaaccaaattagggaaacttcatcgaaactagacccaagagtttacgaggaagtgcgagtaaagttgatggatgaattggaggaaatagtgatttcagagaactcgttcaagatcctcaagattggaaaagggctcctcgaaggccttaggagagaattgagaaagtttctagaaaagaatgtagatgtgttctcttgggggcatgaagacatggaagggatagacccaaccataatgtgttgccatctcaatatagacccaaatgcaaagtaaggtaaaagcagagggctttaaatgttgagaagtacgcaaccttgaaaggagaagtggaccgacttgacatgatcaagttcatttgagaagaattttacccattttgggtgtcgaaccccgtgttggttcccaaaactaatgggaaatgtagagtgtgcattgacttcactcatttaaataaggcttgcccaaaagatagctttccactatcgcacatagatcagctagtggacgcaatagtggggcatgaattgctttgcttcatggatacatacttagagtacaaccaaatacccatcaatattgcagatgaggaacacacctcattcattatgatcgaggtttatattgctatttggtcatgccttttggtcttaaaaagcgggggcaacgtaccaaagacttgtcaacaagatgttttccaaccaaattggttgcaacatggagctctacgttgatgacatgttggtaaaaaccaagaaagtagaagatttgatcaaagatttggacgagatgttcactactctctacaagtaccgaatgaagttaaattcattgaaatgtgtatttggtgtgtcatcttgcaagttcctaggcttcatggtcaatgagagaggcatagagatgaatcttgagaagatcaaagccttgatagatatggaatcacctaagaataggaaagaggtgcaatgtttgattgggtgagtggccgcattggacaggttcatttcgcagacacaaacaagtgtctcccattcttcaacaccctcaaaggaaataagaagtttacttgggatgaagaatgtgagaaagcttt

SEQ ID NO: 48990 - DNA, 995 bp, Cannabis sativa
ttcttacccttaaactctttactttacaagcttaaatatttgttctatatatttgatttccatattatttgtatttaattaattaattgtatagttttgtgtattaagttttaaattaccgaaattattttaaattttcaactcacctcctcttcgaaacatatcttgggttaacatttagttgacgagattctaccatcaatagtgaacattagacaaaaggtagtttgctttttgtgttgtgcgcctttcccaagtctaacacaggtgacaaacccctagttttgtgggatctggtgtcaaagggatgccacgtcagattagccccgaacggttgacgatttttaatatcccttttactactctttcaggatacccctgaggatatctgtctacacctcttctggtgttcaatgatttggttatgctacccttccagattcatctgtccggctttaaacgcagggcaatcttagttgaatatagaccttgatctagttctattcttagaccaagttattaacctacttgggccttatgaatggatctataagcggaaacaaaaagttgaaccttacacgtgtcacattccaaaaaatgctaatacaattactatattctatgtaaaaaattactaataattagtataacatcactaaaacattattatacaatgtttatgcacatacatataactaatatcttatatataataagaggcttaatcgcctcctgctttttttacttttatagcctctgttttagttactttataaggacataactgtatttggtattttaaaatgtaaattttcatcactctaataagagcttaaatttaattgcctcctgctttgttttgacttttatagcctcttttttagttacttcaaggacataattgtatttggcattttgaaatataaattctcatcactcaccagtatatcatgctactattgagtgtatcaatttaagttttgttaattgaatat

SEQ ID NO: 48991 - DNA, 1897 bp, Cannabis sativa
caattcaatataatacaatacgatttaatacgacgttccaaatgaacccttaaagtataatatagtgcgttttcttttctaatttcaaaaatcagagaacaaataaatataaactcaaatttgtataacgtgtgctaatgcaattttttcgtcaacttaatctaaaaaatttattaattaaaaaaaagacaaaaataataaatgaaaactatattttttacgtaattttgtagttaaatctacatgctatctcaatttctatacagggtgacgtgacgttatttttagtaaaacgtgaagaacattctgaggcctggatggaacatacttttcttgctattctgcctaggaggtttcgagctcaaaaattaatttgctcaaaggcagcaagaagcatccggatagaaccaaagtgtgactgttcgagcaagttctcaccattcagcaatgccaaatgctccgaacaagataacacggttgaaacagatcttcaagaatattttctataaatatgccctaatttacaattcaatcaaaaccttagtttagtgggattgacacacatcagaagaaagatcatgagaaaccaatttagtttttctttttattcctaattgttttgggaaacttaattgatatatttctccctataaatagtgaaatcatttcattatttagggatccaaaatcatatggtcttgagagctattatgctataaaaataattgtaagcttttcataaggattattgagaaatgcacgtagccagctctttgtgatcttgataattctttgaagtaatacaagtaaaggggagtaggctattaacactatcacgggtcgaacctctataaattttggtattcttattgcttaattatattaattattattcattatatcatcgctttaaatactcagcgtcgttagctaaaatcgaagtcaatactacatactctacgaatcaatattatttctgaattttggttgtatttaaaaatttgtaaagtttctatcaatcaatccctttcaccctttgagtggaccccttttataggaataggaaggtggttactcaatcttaactttgtgaaaagtaacaagtgatggatgcaatactacaaaaactggtttcagtgactcttgttgagtgactctaaaaccatttagtgacccttcaccgcgtgtcactaatgtgggtgactggaaaagcagtattaagtgacatattagatgggtcactaaacccttttagtttcactcctcgcgcgtcactataggattttaaagttaaacattgtcagactataaaagtaacagctactcccaagaagtgtcactatatgtattaatatatattattttttaattcaaattatttattacaaattcataataacaatttaattaataatacaatttaaaaaatagatacataaaaactaataatttgttacctaaatcagatcattttataaaaatataattaaaatagaaataaaaaataaatacagatacataattataattataatttataatttacaaaaaaaaaattaaaatagaaaacaaaagtacataaatttacacaaaatctttacacaaattattcaaatacagaaggaaaaaaaactgtaaaaaaatacaaaaaaaaaaaaaaatacacaaatgcataaaacattataaattaacaatatatttttgaattgaaatatagaattctatgattcaaacattaacaaatacaaatgatggaatagaaatgggtataaacacactttacaaccacaaaaaaaaaaacctaaaaagttaaaaataaattagatccagtacgaaactaacccctagaccaccatcgtcgtccataactttcaggccaccatcgtcggccacaaac

SEQ ID NO: 48992 - DNA, 1414 bp, Cannabis sativa
attgaagttcatgaagactcccttaacgaaggatggggttcgtttctccgaattcgtgctggaattgatgtatccaaaccaattctacgtgggcaaactgtaacttttccttggatgtcggatgaattatggcttgattatcggtacgaaagacttccagatttctgctacgaatgtggaattattggccatgtagttgacaaattccccactttcttggaaaaatttaatgacggcaaagaacctgaccttccttatggtccctagttagaaggctctcctctcccgaaatccaattatgaccgctacagacaagacttttctaaagcaggtccctgtcctttcattactcgccttgctcgcaacactatctcccccatcatccctcacccaaagccattccctgcgcttccccttcaggccacttcacgagaaaaaggaaaagttgtgatgattgacaatgacaatcctcctgctgctcttaaaatcatgtacacaccatccaattttgttggaagttcatccaatgcttgcatttgcacatctattaacttggaaaaacattccaatgacaaacagatcatatccccaacatctaaatcgactgctgcaacttcttctcctcgatcgactattgaaaaatctgaacttcactaccccttcggcttcgatctcagcaacaacatctgtaatgctttaaattgctacacctccagcatatgtgcatgtaccaccaatacatagcagccatcatccttcaattgttgctacattagtaaccataaactccaccacagtcacaactcttccacttgacttctcggctgttaccatctccactgctgcaattgactcaacaccaactccacataatgaaaatagaatgtcctctatttttaccaaaagacagtatgtttccacaagtggtaatgtgcgtaatgttttgaagcgatgtcgaacgagaatgactcccctagcagactccaccaacacttccactcaccaacaacatgatccttcctctgaaatcacagatatttcactgctggctgatggtaatggtgctcccttggcgaaggctgtggtacagcctcgccaatcgccatgaatatcatctcttggaatgctcggggtttgagcaatccaaaggcattctgacaactgcgtttgctcatctctcaaaataaacctgatgtaattttcattatggaaactaagcttagtttaggatctatttctaaattttgtaatgcttttaaatttcagaatggtatagaggtccctagagtaggtctaagtggtggtttgctatttctttagaattcgaatgtaaatgtaactattattaattatggaaggaactttgttgattgttacatggcccgctttgatggcccctcttgtcacttctctg

SEQ ID NO: 48993 - DNA, 1129 bp, Cannabis sativa
ctctctctctctctctctttgttcagccaaaccaaaaaccagggggtaattcatcaagtttcaacctttttctaaaaattcaacaagatctttgtgagtttgaagcaaagctaaaaccctagaacctttaactatgtgtttttttaaagcttttagttagtttcatgtagtgattttgagttataggggctgttagggttaggttatgttgtaattcgaattctaagcttaatttgagttgaatataacttcttgcagttgattttggtgtatttatgcaagtttgaatttagaaacctaagctttgatctttaatggcataatttgatttagtgtgtttttttgtgaattactggtgggaatttattgtgtataccctaattaggtactctgaaaggtttggttgcatttggtggagttttgagcaagaaatggaatttttggtggaaactggtataaccggttttccggttttacttgtacctgtaaaactggtaaatcggttttggcaaggttccccgaatgtcccgtattctcaattctcgtccatttcagtgccttagttgggtgttttcctattttagagttagagtaatccctgaagagtataacagaacctagagtggtgggttcgggtttcccggattagggttttgatcatgtaatttacctggtttcattatgtgattagggcatccatttagcacaaggcaatctattcaggtcggccagcacacttgaatctggaaagaaggtaagaactatgtataatgtgtaatatgaatatctaagtgtatatatatgttaagtgtatatgcatgattatatgttagttgcaccaccaacacttgtacggttatggtaccgagtgcactggtatagtgaatattgttaaagagtacattacagtgataccagcacaagtacgggatagtacagggtgtctacggtatatcactcagtggtactcggggtacgaaacaaaccctaccaacactcgtacaatgaggtacgtagtgtatgtggtatagtggatgtaccctggtatggaatgttcttgctcatatgttaagccttgtaaataggtgtatgggcgcctagatataagtcggtattatatgatatgtta

SEQ ID NO: 48994 - DNA, 544 bp, Cannabis sativa
ggtgacaaagagagagggggctgagtcgttggggttgcgtcgaaagaggaggagagaaagagagagagcgacttagtcattggggctacgccgagaggagggtgagagagagatggggggaggagggagagagagggagggagggagggatgtgtcgttcgttcgtaattgatagaaggaggcgagagagtgtgagatgtgaggggggctcggggctgtgtcgttcgaaataaaaagtgaagtaagagatgagtgaccaataataaatctaggtttttctttttacatttaaagtgttttttactttttaaaaataaaataataattaaaaataatataataatatatattatcttcaagtttacgggtgggtgcgggttcaactcgacctgtgggtgtttaaaatcactaacccatagccacccatttactagttacaggttcagcctaacccgtccgatctatatatgttttcttcaataacaggtttcaccgatcgagtttggatgggttgattggttgagtcaaatccaacccaaatatt

SEQ ID NO: 48995 - DNA, 1090 bp, Cannabis sativa
tttgtgttattctcactgagctcaggtacgatcttgttgatctgactagacaagctttagcaaaatatgcaaaccagctgtttttgaaagcaatagaagcatatcaatcaaataatgttcaaggagtgactcactatagccacaagtttttggatttggtggatgattttgatactcttttagcttgtcatgaaggatttcttctaggaccttggttagaaagtgcaaaacaactagcccaagatgaaaatcaggaaaagcaggtctgcatctccctgaactatatcaactacttaaaatctttatcaatacagaaagtaaaattgtattaactgtagcaatccaaaatgcagtttgagtggaatgcaagaactcaaataacaatgtggtttgacaactcagatgaagaaccaagcttgcttcgcgactatggtagcataatgagtattccctggagtttcttttgataaaatcaaaattgatccaaaactgagagtaataaatctattttgtgcaggaaacaagtactggagtgggcttttacgagattattatggtccccgagcaggcatatattttaaatttttaattaaaagcttagaagaaggtaatggtttctcattgaagggttggaggagggagtggataaagctcacaaacgattggcaaagcagtagaaatgttttccctgtaaaaggtgccggcgatgctgtcaacacatcgaggtggcttttcaacaagtacttgcaaactcctgataatatagaatcactcaatgatgctgctgccaagtatgttatttaaaaccattgaacaaagtaataataacgtgggatctgatgtttacatcgattcacttctcctttagtccctcattcctctcttatacgagccaaagcaaaagaactcggtcagttgcaaaatacaaatggatatgaaaacgtgtgtatgtatctcttttattaaatgtgattatttaacaaaaattgttgggttctttttccttaaatgttaaaagttaaaattaatacagttaaactaattaatcaattattttttttagaaaaaaaaattaaatatttaaatttaa

SEQ ID NO: 48996 - DNA, 1419 bp, Cannabis sativa
gggacgggcctattctgccttaggcaatgtggcaaggcgagcaatatgtgtgtcggttagtgaggatttccgtacaatctacttggtctgcaccatcattctatgcttgggcagaatcttgtcaaaagtgtgcttcacaacggtcacagcaaaattagcaataggcttgcctgcagaagcagggtttatatgaccctcgggcagggtgtcgacttcgtccagatgtactatgtatgtccagtcagttggaaggtagcacctccaccctttcctaagttcccagatgaaatggctgtatccctcaccttgaatttgatcgggatagaagtgatgttgcaccttgggttccacggaaggcgtatgttcactacttatttcccagtcttcaaagttagagtttgaaaggttatcactagacgaagatgggctagcacggagatgaggatgatctttgtacagaagttgaagcagatcttggtcgatatggtgtttgcctccccaaaacacaccagggttcatctataaaaggtaggagacaagaaagtgagagtaggttggagcaacgaatgaaaaataggttgaatgtaccgaccaggtttgattgaggaatcacaagcagaaatttcactcagaaatagaatcttcaacccaaaagttcaaaacttcgaattcgaatctaattttcactaaacccctaatggatgagtgaaaatcaatatcataaggttaaaatcaaagcgcagttattaagtacaataaagatttctaaactttaaacttaggattactatggttatcctagagcagttcaaataggcaatattcatagctggaaacccaaaaaattaagcatgcatttcattgcaaatgtataaaagaaagaaataaagaagttactcactggtttgaagctttttattctgctcggatggtattgtcaagagttttcctaggaatccttcgaagaatttgggagaaaaattcgcctaaaaaccttttgctttggtttttcaagagtgagaatggctaaaaggatcactgaaggttctcgatcctatttataagcagtttaaaaaagggaattaatcattttaaaaattcaaattcctcgaattctccccaaaagtatacattatgtactcattataggtagagtaatcgtcaacacgtgcagacattgagccgtgatttaaggcataattgtcaactagcattaaatgagccaaaattgaagagacccctagttagggtcacgtcagttcgtcattcgatgcctaggacacgcgccacccatctggacaagactccaggctaagtgaagtccatgtgcaaccaggaaggccccacacagacttgggcggaaaatgttatccagttttttgcccttgacgtggcaataggattaaatgacacgtatcc

SEQ ID NO: 48997 - DNA, 2246 bp, Cannabis sativa
  modified_base (1799)..(1815): a, c, t, g, unknown or other
aggcagttctcgggaagtttctgaccgtagcctgcaatggggatatgctagccatcatcacgatttcaatctcccaagcttcatcatcacaaatccagctcctggccgccatatttagggaaatcaaaggatttggaagctgattagagatttgatcatcagagtcattagagaggagaaataaattagaggccagataagacgacttgagaggatttcgaaggggcaagaagcaattaatggggttgaaaaacgcatctgggagtggatttggagcataattatcgtcagaacaataaatgctccaattaatgaaggaaaagaaaggttgacaaacaagaaagagggatcgatgcccaataccaccacacaacttatgtgggcagaccagaaacccatttcgggtaccaaacgaagacgggagaacatacctcctgaaggatctagagagagccatttaacattggtagcagatgaattaaagagagatagaaataaaggattctgatgtatactataaatagcatactattaattcaatcaaaagtataagtattggtgatattaaaataaagaacactatatttattttcattgttcaagatgtaaggaatttatttttgactttattttttgttgagttatgttttgttaaacgatctacaaataagttggctcattgcttaacaagagactcttgtttctctataaattgtgtgcttcagttggataattgttcttctaaagtgcgttctattattttaaacgagtttattaattaataaatctcctaatttattaataaaaaataaataaagaacactatatttgtcaataatttaaaattttggtcactaaacataaatttctcttattcgattgtggagtgagcccactctccctatatcttgcctccatccttaagtggtctgtggtgggcaaagaaatgagcaggctaagaaatctttttggtatattccacttattagtaatatatatgtatacatatttataaatttatataaaagtttaacggtgattttacactacacctattaaaagagatgtactgatgcatcatctacttatttcggtatttaaaaaaaaatttgtttaatttttgttcatattcatgtacgttatagttatttaagatattctactgagaaattcagaataattttacattatagaaaacaatattcaaacaatctattttacacatttatataataaaatagtcacgcatgcaatgcactagttgaacgtaattttcggcgtattaaattttttcaaattttttaaaattttacaaaatatcttaaatagctataatttacatgaccataaaacaaaaattgactaaaaagttattttggatactaaaacattaaacatccgttattttccaacaagtctaaaaaacaaacggagttgcaatatacatacattcatgtattataactggcccaccacaaatcgctattgctaataatgtacattggatacgaagatgaatcaagtatttatttttattaaaacgtttatatattacattgcataatttaagattcgaattaagaattttcaatacaatgcacttttctatagctacttcaggtagcctcaaatgattaaaatgaatcaagtattgtaaaaaagtaacagtacatataaattatacacaaatgtaatatacatatattaagtaagttacttctaataaataaaatttatcttaaataaaaataattaattaaagtaacttgatacataaatatatagggtaaatagcggcnnnnnnnnnnnnnnnnntaagtttgtaagcggcataaacctaatgtttgttttagcggcataagtacctaatgtttgtaaaactgtaatttttcttcagttttgtcagtacagattccgttttaaatttattaagggaacattttgaagtaactgtacctacatgtttttacgtagacccaatgatcaagaatctagaccttatattgggtctgtttaagaaaataacagagtttgtacggacgaaattagagaaaaattatagttttgcaaatattgggtacttatgccactaaaaataaacattgagattatgtcatttacaaacttaaaactttgagtaattatattgctatttatccaaatatatatcatataatttatatgtacatatattataagtgatcataaaataaaataagggtaggggacatttaggaaccgccaaa

SEQ ID NO: 48998 - DNA, 1528 bp, Cannabis sativa
gttgatgctgaaggtttccaacctgtcaccaaatgctggaaaataagaacagaaatggaacctattgctgcttcaactagctactctttcttagttttgggggcaaaagaaaaaaataataataatgcagcagtagtagagcaatctggtaaatagaataatgggaagaagggcaagcaagtggaagaagttgatacaggagagggggaggttcctctctcaataatggataagattttgagttggaatgtccgagggatcaatacccaacaaaagcaaagtctagtcaagtagggcttgttggtcttctcgagacaaggttaaggctccgaacttgggagccttataaattctaatgttttcaggttggtgttttacatcgaataatgcttggcataagggaggatagattacagttagttggaatcttaatagttttactgttaccattttaaagtgtacaagtcaactcatacatctcttcgttgaaactatggctaaaaaaacaaatttttttgtggcttttgtctatggttttaatgatgaggttgggagaagagacttatgggggtacttgagagatatagcaagagatgatgcttgaattgtccttggtgactttaatgatattctttgtagggatgaaagaataggcagcaatgtcaggtgtaaaaactcttcggaattttgggattatgttaatgagtgccaccttaaagatgtgaaatatcctggaaatttttatacatggtgtaataagcagattggagatgagaggatttattctaaaatagatagggttcttgcaaatccaacttggcttaacttgcatcatacagctgaagttatctttcaaaatgaaggcctatttgaccactccctagctgtgttaacaatcttcacatctcctcctggaggaaagaaaccttttcgatattccaggatgtggtcctctcatcctgtgtataggaggttggttcaaagcagatggcaggaaattgataatggcactaaaatgtatcaggtggtctccaaactgaaaggtctgaagccactattaaagcagttaaataagcaatttttttttttcgatttacctgctgctaatgctaaggctaaggaggatttggatgcttgtcaatctaagctgcatcaaaaccctttgaacaatgaactacagagcatcaaagttgctgcaagaaaggaatatgctactatccaagcagcatatatttcttttctacaacagaaagcaaagttactctagcttaaggatggggattctaattcagctttttaccacagtagtatccgtgctagaagaagtcaaaaccgaattctttctatcatggattctaatggggtaagaattgataatcctcaacaaatatcctctttgtttttagaatattacttccagctgcttggtagtaagatgaataataggagatatgtgatgaagagtattatcaaacaaggacctgttctctctaaggaccaagcaaggatgttagttcagtaattctca

SEQ ID NO: 48999 - DNA, 1289 bp, Cannabis sativa
ttttttttttttggctaactacttgtaaactggaaaagcaagatatttataatgagactagtatttggcaagttgtgtatacattatattttaattaattttagaggggtcctaattacaagagctcctccaaccattttcacagaaaattaactttcataaacctaatctgagtgaaaacaagaaaatagtttgttcaccataaaaagctagctatgaacaccctcattagaactaactaaacattgtacataaatggacattactaccaaccattgaaaaatttgatactaacaaagatcattcacataaaaattcaacattcaattggcgttgaccttggaatcctcttcttccttctcctaattcacctacaaccatttttatatgtggaaacaaatcaaaatcaaaatagtggaaatttttttaattaggtttataccatatttattcaaactatcatattcaataccaaaaatttatcattaattttacaaatacacattaaaaaaaagctcatttgcgtgatagtttacaaggtttgataagttagtctataactttaattttttaagcaaattgatctctcaacttcaatttcacaagagaatatacgtcaataagaattttattaaagtaaaaaacaaaatattttgacttaaataaaatagaaaaaatgttaatagttaatgttgccaaagacatatagtttgaggaccaattcgtaaacaaaagtttttacaaaaatactaaattttgaataaaaatttataattttactatcacacatatttttttttattaaagtactgtctttttataaaacaaccgtaaaacaagcaatcaaaataatagtggaacaactaaaaataattgtataataacagtgaaaacttaatatagtctacattataaatcttacatagtatttttaaaaaaagtttctttccaaatgtactgtaaaaactcaaaaaaaaaaaaaaaaaaaaactatgaaaccaacctaacccaatccaaaaaaatgggtcgagcaaccatccaatctaacccaattatccaaaaatatgagctgaacaacctaaccctaccaaatcatgggccaagtggtttatggtgtttatgggcctaccttaatgggttggaaatgagttagatccaaattaagccaacccaattcaaccaggcgcaacaaaagagtcaatactaaaatatttgtggataactgataattctaagtgaaaattacaccaaatatgggattctacaaaaaagtttgataaatatggctt

SEQ ID NO: 49000 - DNA, 881 bp, Cannabis sativa
aacgggctctgtatttgggattaaattatgtattcattcaactgtgaaatgtttcttcgaatcattaatcataatgcttgctcaaacattatttggctttaaaattattgtattggcctttagccaatgacgtcaagtttctgtaagtggaacagtttttaagatcaatatggtgggaagtgctgtcctatgattagaaatatttgaatgtaactgccaagattttatttttacttgaaatgatttttctaccactattatctaaataagaaaccaaaaagggggtcattttggtagttgatcttttcatcccaaatattttggataccttctagaaacttggccatcgtgtttagatgatatgacaatgcatagtggcctttctttgttgatgaagtcttcttagtctttaaagttattcagatgtccacctttgaattgtccacctttgaatcaatatcttttcatttgtgttccctttttaactcattacattgtcttcaaatcgactgcaggcatactacatacaattttgtttcatcgagctcttggtcttgtgaggcccaaagatgctgatttggaactttttgatattacatatgtaagtatctgtgttttcaacattaatagtgcttatattttgttgtagtagtcttactttgttatgattataagtaatcacatcacatatgtaatatcttacttattcaacacatgttccttggatgattactatctttttcttaaaactaaatgacttttacttgtatggctgctatttctatgtgctatcaaatgaagttctcatgtgtttatgtaagtcataggtattttatgtacttctcttcacacatctcttgtcttataggtccaatgtggag

SEQ ID NO: 49001 - DNA, 1402 bp, Cannabis sativa
cacatcacaagtaaattctattttaccagtgcaatactaacttttttttgtgctggccaaagtgacatttcttgtagtgagttcttgggtagatctttgcaagctaaaataggaagggagttcaggttttttgaagcttaatcgttagaaccgtgcatctcttacaaagtatgtgtgggcaatggcaacaaaataagatattttttgggtaaaataggtcaataatgtttacttgaagaatagtaattggtggagttacaaagctactatgcaaagttagttgatattggagatagattatcaaggtcaaagagaagattaaacaggttttgtcttaacaataattgtctagctagctgcatatatttgattagccaaggatattaaactttgaatcctgttagtgagaatgtgagatggtatggacaagtatagggaagacttaatattcctcaacataaacctatttttttggcttgcgatcattgatagattacaaattaaagaaaggcttcatcattttaatatatgccaagacattgtatgattttcggattaggtgttgagaaggtcaagcatttattttttgaatgtcattttagaaatatttatttgtaggttatcaagatttggctatggttgctagtgtagagcttgagtttgatctctacattgtatgatctgtacattgtgtttctcttcttttcgcaagcaagtcttttcaatggctcttgttgcgattgtttactatgtgtggagaagtggaaacacaacactttggttgaaaaaacttccatctatttctacttctttatgttgtttaaaaaaggacataaaagatagagtgtttctagttttaccaaaaattttgaagaatcaagacagaatgtagtttgatcgattgagataatgtatagacattagtatatagatggtttttaggtcactttgagtggtgctaggttataaagaatttttatttggattaatatcattacacttactattttaaattttataaaaatttatagggattatattataactataactaatactattatataaaaaattttaaaaaaactattccaacatgtggttacaaacgtaaaaattgactaagagcaattaattagcagagcaattaattagcactccccttcatctatagtccaacaatttgtgtaaattaatgatgtatttataagaatcttaggttagttttagaagggatggtaatgtatttttcttttacttcataaaataatatgaattttttcatttttacatttcaaattaattttttttttgcattttgcatttttgcatttttacaaaaattcacataacaatcaactgagtaatctaaaccgtaattaaattttacatagcgatccacata

SEQ ID NO: 49002 - DNA, 2843 bp, Cannabis sativa
agtgagcagttaattacaaagttgactgtaatctgtttacaataatcatcccctaaaatcatggggtttgattacatatcatgtagtgtaaatgcggtcattacttgaaaatcatacagttgtgattttcccgcttttactgggtcaaaacgatcgtgtattaaaacacgtctttaattgctgtatttggagatgtctcgacaaaagcttagctccagtgaccataatagcgagctggggccattccgagatcgacgatgcacgtcttgtgacgactgttgttcttatttacgaaggattcttcgaggcttgttttgactgttagcttctgacttatcaggattataagtctcattgagaaaatgtctgaagttaactggatgaagttacaggaagccttcccatagcgagataggcacttcgcttactaggtcttgagccaacctgactgccacacttagtttgtacattatgccctcagtgcttctgtagttgatacgtgtcgctttcgtcttcctagaagtaatgcacttgatgcctcgctattcacattcagcgacatatggtttctcgctaatatactaaggaacagtttgtatatcgactcctcgcataagaccttacagtcagcaggttacaaatatactctgatgcttacgtaattaatgagttattccataaaaagcaatttcatcgattcgtattccctttatcctgacacgtgtcttcaactgagatggcagccaaattttgggtatgataattgccccttaaaaagttttttttagtaaacattgctttttaataattatagagggaatttttgtcataatccctttttggaaagacgcgtcctttgattctggcggttgtacggcttcgacggtaattatgaatcgcctcttcatattttgccctattcccaaccgttagatttcccaatctttggctttcttgtctctagacattttgtataaaagggcggctcaaattcgccatatttcacaaacttctggtttttggtgagatccatcttgagaatggattgtctctttcttgctaaaatgtcccatctaagttcagaagtttacactcccaaactcataataccaggatgcaccaaccattttccatttgttcccaagaacttcaaacctcaattggaaccggaaatgatggaatccaaggttgaagagcttctgaccaatccaaactaggggaaccccgtagcccattatgggtaatcctcaaaagtgatcattgaggtaagtgttattccttgcgaatggtggtttgagttggattattattattatttttttgctccactgaccttttttctttgtctccacaggaatagacatagatcatgtgagcgatcttaaaggtcctcctcaggctgacaaggaatctcagcggaaagttggcgtgattttggacgagtctagaagggaagttggcgtggtttctatcaaagaatccagccaacccaagacccaaacctgcactagaaaacctttgcgccaacctctttctggtatcgaggaatttcatgaggctgggaataaggactcaactgcacgaaatgggatcttatgatgaggagaatgatatctgtccagaggccaaggctctctacatgtagacagtctttctcgagccacgtgtagccagtctttctccaagctatgtgtagacggtctttctcaagccatatgaagacagtctttcttgagttcatcgaccccccctctcattctttgtttaggaagatgacttaatggtttgctcctattgacatttttgttaagacaagtttgtaacccaacttgggttttcttatcttaaatgccttgtactcttttcatttgaacttaatacaattgtgtttgcttgcgtttttattcacaatataaacaactatattttgatcaaatatatagtacttttgggtttttccattgcttgcaatcttcctatttaagtagttggttatctaccaaacttttttttttattttcaagcagttgtcaattctgcctcgctatagcagttataatctgccttaagcaatcttaaatatactataatgattttatcactttgtatatttttaatttgctcgtatgaatagctagattatctatcaattttctaggttcaagtacttttttcaaggcgtcttgatgcttagtttagcactttcctagctcgcgagaaccattagtattcagttttatatgcgagttataacttttgattttcctttcccgtcagataggttatatatcaaaaattatagttgtttgatcccttcttcgtcaaaaaggtttgatcaagatgctataacaattcgacccctctctcgtcaaaaaagtttggtcagggagttataacagttcgactcctctttcgtcaaagaggtttagtcgagaacctttaattttttttaaaaaaaaaaaaattgaaatggtgggttcgcattatactatgtatttccagatgaatttcgattaatcatacataaatgcctctgaagtaattttaaagagtaaaactttgtaattacttaatataaatgattctctttattcataactggagtttaaattttacatctgtaattcgaattacattatatatttactggttgtagggtcacaaatattccacgttccagtagttctttattagcgagccgttgagtcgatccaatttataaactcctactccgactactacttcaatgacatatgaaccctcccagttcgggttgaacactcccacagatacatctctagtattttcaaatactcgccttagcaccaagtctccaacattga

SEQ ID NO: 49003 - DNA, 1588 bp, Cannabis sativa
aaaacataattcattgtatttaatttagttagaaaaactagtaatatttaaattgtagggtcgacaaattcataatgattgataaattaaagctgtaaaatcatttatttttgtaaggatttaagctgtaaaagcataaagatataactttaaattgaaaaattcatgtctaacaaaattcccatatattttctcaaaaaaaataaatgataataatatgatattataaatcctaacaatacactacgcgattttagacattgtttgttttgtttagctttgattagtttccttttatttctatatattgctcgatcgtagatgacttttacaatcagcaaaccttcttcataataatattacgtcacaatatatatgcaaagaaacattatttgtccatatatacaaatataataaagtattagtttttattttaggaaaaaataaagtactagtttacatgatgattagttcatacggaatcaagtttcgggggttaaatacttaataagtcatttaacataataattacttgtgctatacttctcataaaatacatatatattttcaaatttctagggtagatatatatgtgaatcatgcgctagctaacttcacttaatcattttgattatttttaatgtttaatttagttgccttacgtactctactgtgacttgattttgtttctttccttttatcaattcttagaagaggaaataacttgggccaacaagcgttaatccataaatcaatcaatgaaacttgactattcatttcatataaaatatactttcgaacaaatagagtacttgcaccgttgacagaaaaataaataaattattaattgagcaaaaataaattaatattttttcgacctgagtcactagttttggtggttacttgtggacccctttaattatttaattaatatagcaaagaattattcttaatctaatttattctatcatgtgaatgaggtgaacaaaaagaccaattttctcactgtaacaaggctcacattatcacgtacggtagtggtgacaactagaaacttcaaaagaatctgatcttttaagacaaaatctatataaataaataaaatataacagtgatgaagggattttacaagtacctaaatagtctaccctaaaaaaaagtacttaaattgtctccataattaattgaaagttccatttttgcccattacttattcaatcacaaaggtcaacattggtaatttggcaagtataccccatggaattatgaaactgttaggacaacttgtaggactagctagtacctatatataaaatataaatagagaaggagagacatcgatcataagtactcaaaagaaactaaaatcaagaaatttcatttcacatatcaacgaaagcaataattccctgttaagcttattcttctccttctccctagctagcttttgccttttattattttatctttcaattaaaagaaataatatatataagtaatattaatggatgaaattcatgaataccagaagctccagtcatatggttatggtgatcattattcaattgttgcaaagtctaacaataat

SEQ ID NO: 49004 - DNA, 853 bp, Cannabis sativa
tggggagacatgggctgtggatatgggcccagatagagtgacaggagcagcaataagccataaaagttagctgggccaggctgggcctaatgatgtcaatgtttactctaatgcaagttggcaattttttttttttaattttaattatttttttaataatgccatgtgaatgtgatattccacaaaagtagtagctgctgcatgaccaaatcatcgtcaccacacgaattggaaaatgggtggttgttgtaatgcaaacccttatagttcaaaataaggaaatatgggtactattagtactagatactatgcaaaatttgattttgattcttgatgatatgcactgtcttttatctaggtgtactttctaaaaatacataatcaaattcacactctttttattttagtttttagttaatgctattattgtattttagttccaaaaaaaacacttttactttatatgattcattactctttttttatatattatattatttaaaaagataaaaaaaaatttaatgaaagaaaggaggagagaaatattattaggtgataattttgaaatgtagagattattgagttaattgtaattcggtagtggtagttaagagtatctccaatgtaaataattttaaaattcgtcacaaaattttacattactttaaaatatgatttttattttctcccatctacattatttttatcacttactacttttaaatataatatttaattttctctttctagtactcatatcccctgacaaagatacatggacaacgataatagaaacaacattgaagttgctctaagaatgttttaagttgtataacatataattttcgagata

SEQ ID NO: 49005 - DNA, 806 bp, Cannabis sativa
aaaactatatgtaaacataaataatttctaatcttctattgataacaaatcagattacattgaaatgagtattatttagggcataaaatccaaacatgctcctccttaatcagctcttcatcttcgtcattttccattcgagccgagagttaagcaatcattctccattaagggattagcaggtaaaaattatctaatattattatttgattgttaatattcttggcaaagacaattagaaatggaaggtaataggataaatcttatattttttattttattgaactattttgcataggaaaggttgatattcgcttaaaattgggatttcagtcagtctttttttatcaaataccaatctagagccaagtgacttaaagagaaaataattcttgatattatcactatagtacgtgggtgacgttgtgatttggttttggctatttcaagttttttattgacgagagcttatcgcacgtatatttcatattttctcttataatgctagtggatttacgtttttgagtttgtagagaccacagtgttggggaaatgatgtggattgcttaggaaaacttcactaattggatgaacttaagtaatcatttattagttcttgtcttgcatgctttttactttctatatgctttctcttttgctataggccatattgctttagaccattctatatatgttgatattttattttacttttctttcatttttttatttattagtagctctagattttagttataattgaatgttatgcttaagtatataagctctacgattgagaactatta

SEQ ID NO: 49006 - DNA, 1191 bp, Cannabis sativa
tagtgtaaaaacgccaaaataaaatacatgatataaatacttgaattcaatttttggttgcataaatacttaagtttaattttaaagtattatatttttagaacttctgtaatacttaactgttaagtgtcaagttaattgtgataatttctaatttgttcagatcattaaattttttatttaaaaattaattttaatataataataagaaaataacatgtggataatgatttcacacttaaaggtcaagtacggaagttttaaaaatataatttaagtattataaacttaaatatttatctataatcgaaagttaaattaaatatttacactgtaaattattctttatatataaatattcattcaaaattaatgcttaattcggttgattaaacacttattagagctaaacttattgtttataccgcaaaatattttttatattcgaaatttatgcttaattcggttgattaaacactcattattatatatatttgtaataataatccaattcatgaatatatatgtctaacaatttttaattatgtagtataacaattaagtccactttttgaaggaccaataatatatgaatgtgtattctggacgatgaggtcaattaattaagggaataatccccaaagttgaggggcttgcttggcagatgtgggttagataagctcgtgcctaacttctgttcctgatttggtagttgaatcattttgcaatgacaaacttttaaatgttttatctatcaaattatagaaggttttattatgtgccaaaaaaataaaattggaagtttttatattattgtaaacttccctttttataatcatgagatgatgttgattatttgggtacgtataagatttttctttctttgatgtgaccatgtacttttagcattattaatttaataagacaagtatatttgttaattaagctgatcactaattaatactgtacatgtaaagccaattataccatgtatataaagaatcacaatgtggagcataagattgtgttaaaaatttagaatataataaataatgtttatcttgaaactaattaataatagtagtaacttatttattttatatattatattatctttttatatattaataatgtgatagaaattacatagagagtctgcccatgtttgtgctctgcggcagttgattgtcc

SEQ ID NO: 49007 - DNA, 1580 bp, Cannabis sativa
cctccaaagagagtaaactaaaccagcaacagaagcagccaacacttgcttcctaaattcactttttttggccctcccaatccacctaagcagtcggggtaaagctacagcagcagcatgccattgcagccatgttttcagagcctgcaagcaagattttgcaactggacagtcaaaaaatagatgtgcgcaagtttcagtaacttgaccgcaaagagtacaagtatcttcattgacaattcccatgcgcttcagcctatctcttgtttttaatctatcttgaacaacaatccaagagataaaactgtgttttggtgtgtttaagcgcccccaaacttgtttactccaattcaccttatcccgttgtgcgcgaagaattttataacctgcagcaacactgtaaggggatatatttttaacctcagcaagctctttaaactggtttttgagtgtgaccagtctcctccaataccagcttccttgagtaggcggctggtattgccaccaatcttcattttggatatagaaacaatgaatccatttcaaccaaagactatcttccttgtttgaaatggcccatatgtactttcccatagctgccttgttccattcatgaacccttttaaaaccaagtcctccattagctttaggatgacaaagtgaatcccacgcaattaaccccggaccagctgcaatagcatgccccttccacaagaaattcctgcatattgcctcaatatcattgactatcttttgtgggaggatcataacctgtgaccagtaggcatgaatagccaaaagaactgagttaatcaagacagttcgggcagcaaatgacagattcctcgagctccaagtacgtattcttgctgtcattttttcaacaagtgttgaacactcattcttcgaaatcttctttgcacatataggcagacctaaataatgaaaaggcaactcttgtaaagaaaaaccaaaggcatctaatattcttcttacttcagatttctccatgttgctgcaataaatggccgatttctgtgggttcggatggaggcctgaggtttgtgaaaaaagcttcaaaccttgcaaggtatagtatatgcttctaaattcccctttgcagaataaaagtacatcatcagcaaaagcaagatgattgagcttgatatcagagcacctctcatgaaaagagaaattttcttttttccccaccactttcagcacccttgaaagatactccattccgattacaaacaagagaggagacattggatcaccttgtctcagtcctctacttgttccaaagaatccatgtgtagatccattgaacatgatagagaaccgaggagttctcacacaattcataaccagtctcaccaggtcttgacatatcatgatgttgtggcctataaacctcccttgaatgaaacctccttggttttgagcaaccaaattaggaagaatgcatttgattctagaacacaatagctttgttgcaaccttataaataacattgcaacaagctattggcctaaagtctttaactgtagtagggcatttggttttaggaaccattgtca

SEQ ID NO: 49008 - DNA, 996 bp, Cannabis sativa
  modified_base (141)..(145): a, c, t, g, unknown or other
cctacctacagcaatgcgtcattttgtagccgacacaaaaagtaaaaaaaaagtgtaaaattatgtgtcgttgtaactgacacaataattaattagctttggttacaatttgaagctaagtttcttgcttcattcaagaannnnngctaatagagcatactttttgcttatgttctcaactgaagcaaaaaaagttgcgtcggtttagaaatgaagcaaataacttgactctttgtgtctgctgttattacgtcggtttgtacaaccgacacaaaatgtttttgtgtcattttacaactgaagcaaaaagttatttttgtagtagtgttagttagtattaccaaagcaagttgtcttatttgtcaacaaattcatcatatgtaagtttggagtgccatactggatcatcactaacaatggaacccagttcgagggggattttctaagttcgcattgtgaagagaaagaaattaagagaagattcttagctatggtgcacccctaggccaatggcaaagttgaagctacaaataagataataaaaaagaatattaaaatatatttggagaaactcaaaggtaggtggctggatgaactaccaaatgtgctctgggcctatagaactacatcccgctctatcctaggtgaaattcctttctccttgttgtatggttgtgaagcggtgctttctattgagatgcaacttaactcattcaggatgaagaatttcaatgaaatgacaaacgaaagggctatggcaaaaaaattggacctcttaaaggaaaagagagatgtatcccaaataagattgttagtataccaacagaggaaggcacgatactataactcaagagttcaagaacacacttttaggatcagagactaggttttgaggtaagtcctcccaaatactggggacccaggggaaggtgtgttgggagccaattgggaaggtccatactgttgggttttatgccgtaaataaaactcatttca

SEQ ID NO: 49009 - DNA, 633 bp, Cannabis sativa
actatgactatcaatccctttaagcactctttaactgtatagtctcatacatatacaatcatcacactagaccttcttcaaatagtatgaaattatacaatttactcaatatttctttttatgaattacgaaactactaactgttacaatatatatgtttcaaaaatatagtcttaccatgtatatttataaatatataacatatatgcatatatacaacaaatgacagtccctatagcatgctgtgctgccaccaatatttatgccaaattaatggtcaaatgcatacattataaataaatttatatcacatggtctgtgtgatgatcagataaaattaaccctagcctcatatatatataataatatttatatatatataaatatcatgtatatttattaattcttaacatgtacacagaattgatcagtgcatgcatatagattgcatgttcatgtgtctgtctgcaaatttcttaatataattgtttctatcgattggaatttttaatttctaaatatataaaaacaagttaattattttagcagtagttttttttttcttttctttacttttattaatttaaataattataaatatcttgaataagatttagaacttctctcaacaat

SEQ ID NO: 49010 - DNA, 1070 bp, Cannabis sativa
ggtgagtgcatccattgttgcgttttcttctctagggacttgccgaatggtgtaacctttgagctgacttaacaagtcttgtatctttctcaagtaggccatcattctttctcctccgtaagtgtactcacctaggacatggttgatgaccaattgagagttactatatatgttcaggaagtctggccgcacttcatgtgcaagctttagtccgaaaattagagcttcatattcctcctcattattggaggctttgaaactgaacttgattgcaccgtgcaactgttgccccccaagtgtaattaggtcaatacctgcactggacaagcggtctgtacagcttccattaatgtgcaacttccaggttgaattctcttgctctcgcttcttctctaactcttacttttctcctaaatattgagagattttaagagatatgtctgtacatttagccataaagttagcaagagtttggcgttttatcgccactcttggctggtaggtgatttcatatagaccaagttctattgcccacttgagtaaccatccagatgcttcaagtttttgaagtatgtgccgcaagggttggtcggtgtacactcttattggatgagcttagaagtaaggtcttagctttctcggagctaggaggaagtagtatgtcaactttttaataagtgggtatcgacttttagcatcaatacgtcttttgttgacatagtatattgggtgcccaatgccattttattctctaatgagaactgtagtacaaaaaactctgtgactgtcaggtatattcccaattctttattgtctagatgctttgataggataggaggttgagctagttgtttctttagctcttggaaggcagcttcacactcctctgtccattcaaattttttatttcctctaagtatgttgaagaaagggacacacttgtctgtggactttgacactaatttgcttagtgttgttatgcggccgattatgctttgcacttcttttatctttgtgggtaacttcatgtctgaaacagcttagatattctcgagatttgcttctatttc

SEQ ID NO: 49011 - DNA, 1167 bp, Cannabis sativa
  modified_base (1079)..(1080): a, c, t, g, unknown or other
tattattattattattttggtttgaaatgaatatcttcctacatcttaaaattcaatatttttttaagtaatttttggagtaaatatttaaatttaactcttagttgtagataaatatataagtttaatttttgatggtaatactactaaagttataaatctgaaactttcgtagggaggggtaaacccacacagaagcgaggtagggtcgtcgtcccctgggaaatataaaaaaaaatatatatgcaatttagttagttacgacatagatttgtagtaaaagatgatatttatagataactttggtgtaatgattaagctaaattacatatatgatagatgtcaaatgttcaaattccactaaggctactttttcttaagtacttttgcccctgccttataaaaaaactatgctccccattttaaatctcgggactgccactgtctttaaatacttgactgttagatgtcaagttaatttttaaataaaaaaaaaattttaatgacatgtaccaataaggaagggtcacgtgaccattaatttgacaattaacggttaagtacatacggaagttcaaaaaatataagttaagtactattaacgtaaaaaaaattaaacttattaaacatttataccataaatttaagcattttttcaataaaaattggattatttacactacatactgtaattttcaactttttactttttttactgtagggtgattttttttttcaaaattactgtataagttttatactatgtattgtgttcaattttcactgtttttttatggttgttttttagttgttccactgttatttttagttgttttgtttttgtgttttattgctgttttataaaaacacaatattttagaaaaaaaaaaaactgtgtggcagtattttagtaaaagtaatctgaaattctaatagggatattggcggctgaactacctgaactttaaatattttaacacttaaccacaaaaatcgatttttttggaggcaaaactacctaaactcccaaattgttttgctttgtacccctctatctaaaaatcatagttaagtgccanngtggactgtccacatgtacacacttgtacacgtggtaaatttttagtggtccacgtaattttagttttaaaataattataaatattt

SEQ ID NO: 49012 - DNA, 772 bp, Cannabis sativa
ttagtttaagtaggattataaacctactctaatacccacttaatcacatatttaataaaataagtctaattaaaatatcaatttatttttcgggatattacacagaatgtccattaggtaactccacagaagaaatggacatatcaacataggtatttttaaacaaggctaaattgttgtgacaaacatggtgagtagctccagtatctaagacccaagaatgtgaaaattttgaaagtgttttaccagataattgtgacatagatggttgtctgttttggatagaattggatggctcagaacttctatgagacaacatgttcatgagattttagcactgagcaaaggtagccataatgtcttgttgcacattctggttctcttttgttgttcctccatcttcttgcatacaagaaaaatttgtagtgggagattttgtaggtcctggagcatttctattaggaagttttccatgcaatttatgccatggagtttatccatgtaacctgtagcatttttccatgatgtgaccagtaactccacaatgtgactcactattttgggcttatgtggttgaacactaccaacaaataaccctgaattggatgaagattctgctggaagtttttcttcttaagtaactgaagtaattcctctttgcctttcttcttgaacaactgaagcaaaggcattattaatgttggggaagggatcttgcatcagaatatgggatcgtgcattactgtatgattcatttaatccaattaggagc

SEQ ID NO: 49013 - DNA, 2620 bp, Cannabis sativa
atctgcctgagttgcaagactccaagctaacttggataacagcgctttgttcatatcttcacacttccttaaacccaaacccccagagctcttcggttgacagactttatcccacgccttgagtgccataaaacggattttatcaacatttcccaaccaccaaaacttcctcattaaagcgtccaactcacgacaagtggacaggggaagcttagaagtagacatcgaatagataggcatagcagaagtcacagatttgattaaggttaggcgccctgcttgtgatagtaacttcactttccaaccttccaatttcttctgcatactttctttaagtcttatgtaatcctcctttttcctcctcttaaaaacaaaaggattacccagatgcctttcttcccctgtaacttggacaaaattcaaagtgtttaacaagttttctcttcttctgctgcagatgttactggaaaacaaaacactagactttggtttgctacaggattggcccgaccacttttcataaatggaaatgcattctagaagtttccttgcttcgttttcatttgcacgagcaaacaaaatcgtgtcatccgcgaacataaggtgagatattgggggggctgcttgagcaatcttaataccatgaacagaaccactctcttcagccctttggatgagtttagagaacacttcctgacagaggaggaataagaaaggggacatgggatctccttgacgcaagcctctctgaggaattatctttttaagcgggctgccattcaaaaggactgagtaagatacacttgtaacacatgacatcaataacttcctgcttctttcatcaaaaccgttagcatttaggactttatcaaggaaagcccattccattttatcatatgccttgtgcatatcgagtttcaccgccataagaccgcccttaccttgcttatgacgaattttatgaatgatctcctgggtaaggatagatgattctcctatccacctaccaggaatgaatgccgattgaagaggagaaatcaactcattcataagaggtctcaatctatttgataaaatttttgcaataaccttataggagaaattgcataaacttatcggtctaaattgatccatgctcatagggaagtccacttttgggatgaggcaaatgaatgtgttgttgagtttaggattcataatcccactgatgaagaattcttgaaccgtggcaatgagattaaccccaactacctcccagaacttgcgaaagaagcatcctgaaaagccgtctggtcccggggccttgagagggtgtaaaccaaacactgtttccttaatttctttatccgaaggaatctttgcaaagtttacatttgcatcaatgtcaatttttggtacaaacagatcttcaaaacttccatcaatactcggtctatctgtcgtgaaaaggttcatgaagtattggttgacaacattggcaatgtgcttccgatccttccacaccttaccatctctatccttgatcgcccaaatgttatttcttcgcttccgaatgactgttgcggcatgaaaaaatctggtgttacgatcccccaaagccagccatgtctccctagacttttgcctccatatactctcaagcttagaccaagagattgccagatttaagtgtatagccgcctcttcttctctgaacatatctagattaggttggttttgaatccaagccaatctattttccatttttttaatgtctccttctttaacttcactatggttcttcttccaactctgtaaggccgttctagtttgatgtatattgcgaatgaaggcagcagtagcattaacttccgagacagtccaggccatctcaacttccctctgacacgattcctcacgagaccagacttcaaagtaacggaagggaatgaatcccttggcagcaaataaatgagagtcgaaaactatgggagcatgatctgatattgaaataggcagattcctgaccccagctgaagcatattccaatatccaatccggcgaacaaagcgctctatcgagcctctctctaattaggcctcccgaaaatctattattttgccaagtgaacttgttaccaatgaattgcaaatcaatgcctcccgtcctatccatgaatgaactcaaccatttagtatctgccgaggagacctttcgacctccaaccttctcctcttgagagcaaatacagtttaagtcacctaacagcatccaaggaaattgacaagcagagaactcctcttccatacttttccaaaaaacttcttttgcacccatgtaaggagtaccatagatcgcaaagaatttccatcgaaaattgttttgaacatcacataccgtagcttcaaaaaaaccttcagagaaatagttaacatccaattttatgttattgttccacattaaacaagagcccccagtcaaaccaatagcacccacacactccatgttagaaaaacccaacttcctagccatctcttccattatcttaatactaactttagtctccatcaagaaaacacaatctaccttgtacctactgacccaagccaaaatagcttggggtgtcgggtctctcgcgagg

SEQ ID NO: 49014 - DNA, 1259 bp, Cannabis sativa
cccccccccctaaagaacaattgagatgtgcttcaattcattgcaagaccagtgctactgtagaaatcttcaaaggcatccttgatacaatgaacaaagactctttgaactttacagaagatgataagatcatctgcaaagcacaagttgatgatttttaaactcttgcacattgggtgttatttaaagcatttgtccctagccttgaaatgaagtaaccgaatggggtactccattattatgacaaaaagaaagggggatattgggtctccttcccttagacccttagcaccactggccaatgttggattcagtggaaactggttaagtggtgcttataagaggattcattccaagagataataccttcataacaaaagtatgctaattttaaagtcgattcaattgtaacaaccttgatcgctccatcatcacatgtgtctttagaattcttaaaattgaaactttttaagtgttggcttcggatttaaggtgctcaaaacttaatgcattgcagtagcttagagttaaatttcatattcattagaacaaaattggcaaatcatatgtatatagaacattcacatgtattaaaagaggtaaaaaaagtagtgaccaaaaataatttccttgcaataaccaataataagatattgtgctaattttaatcccacatcatctaagattagctaatgggagactaatttcttatataaatatagagatataatatctttatacattaaaagtgtttatataatagaattcttagttcaactaattttgttattttttaacgcttttaaaatatttcaaatcaaaccttcttattttcacgaaaacaattcagttgattgatcttacaactgagctattatttggtagtggtttattttatattatcattcaattggattcttgaaaaggaagattcctttgttttactccgtcttagtctccactccaaacaaccataataatgaatatggattcaagcaagctgtgattgattgttatggtgatagccaatctatcacgtctttggcttcaatagtgacaagggtagaggaaagttttaaagatgataataataacaataataataataagtttgttcgagccgataccattaatcttaggacgtttggtctagagttagagaagatgaagtacaatctatcttggtcgaatgagcttaaattgcacaagaaagaagagtggggatcgaatggcacaagatgaagtacaatctatcttgg

SEQ ID NO: 49015 - DNA, 1306 bp, Cannabis sativa
gattttatactattattttgggaagagaaaggcaatcacagtgcctaacactactatgaggtattatatcgctattggtacaatttaatattgaatctcacttattttactttaataataattatagaaactgctaaccatttacagttgccaactcatactacctaatgacattcataacctttctgttaagataaaaacataaattatgaatcaacttataaaattatatacataatttgaacaaaacctaatctttgttaacttgatgaaaatgcttctcgccccaatatgatcaaaaattttaccggattatgtctgcttttatttatttatttttttttttgagaaaattacattgtatacctactttattttacttgttttaattcttacctttatttttaaattctttaagatatactcacttttatagatgatgttcccattaaaccctttgaattaatataaattatctgcttagacttaagtagagagtgatagtacattggacaactcactcataaaagtaagtatattttaataaaatttaataagaaggtatttttaattagtggataaaaaaaagtattcatcaacttattctaagttttttgggggacaaatccataaacatcactaaaaaaattgtagcctcataaatgaacttgctaaatgttaaaatttagaagtgtggtagacaaaggtagatagagtgagtgtttggtaaggtgcatgggattccatctcaaaattaattggtaatgagaagagtagttcatgcatcttatgtatgatatttagtttctgcatattatcaatgtgggactctctaacatccccctcaagatgatagatatttttttgcttaccaatcttgtacggctcaatcacaagcgattcttttgactcgtctttttggacaagtttttgaatttagatcttatactcgttagagtttaacttgcctctaataccatgttaaaattgaggattgtatggttgagaaagttagaatagagtgtgcaggataagatgtgcgaatttctatttcaaaaccaattgacaatgagaggagtaacccatgcatcttatgcactttatttatttttcacgcattatcaatatgagactttttaacatcctccatcaagatggtggctattttaacaatcgaatattgtattacttttggtttgtaagtttgacacctataccactgacgcaaaatagaatggcatagacgtcgattttaaaccgacatacaaaaaaagatagaccaaccattaaatgtatcattctttgc

SEQ ID NO: 49016 - DNA, 782 bp, Cannabis sativa
agtagaaggaaaataaagacaagacaaagaaattaaagatcaggggattgattaatggagagttttgaccgagttggtaaggaaagacaacaacaataggtaagtggttcttaattattaattatttaatatatgtatgtatgtatgtatatgtgtgtttttttaatgtttattcaatgtaggtgtcctattccattttatatataatatttatatattttatatatatatgttatctacctactctctttctctaaacatgtgcttcttatttctttattaatatcactactactatatactaacccttctttaatttcttattaggtcctaaagtaaagtatccttttaagcaaaaatgtttcccattttcttttttcttttaaataaataataattaaatattgattaggtaggtagctctgcttttgatgtacttgatttaatctaatacttgtctccactccccacccaaacaaacattatgaggattgcttgatacttattttttaaaaggtattttaattttttgatatagtaatctacattatagttatttaacacattttttaaatttttaaaagatttaacatacaaaaaataaagttcaaacaatctattacactcgtacttctttgattttatataagacagttgaactctgtttttatattataaattatttttaatttttaaaattttgtaaaatattttaaataactataatattattatgtatatatatatgtataaattaaaattataatttcatatatatatat

SEQ ID NO: 49017 - DNA, 1287 bp, Cannabis sativa
tatatggggataccttggcattgagcgggtggtcaggatgaaccagggacttacgattgtgaaatttaaggatgaggcaactcgagatttggtctcgagtcagggactctgcaattcgacaagaaactgatgatagtcagaccatggccacaagatctcgatactgtgaggttagtttgatccgttcccctttggattacctaatttaggattgcaatattggggcataaactatttgagtgctctggttagcacgattgggaaactgattatggttgataaagtaacaagggagaaatctatgattaaatttgctagggtgctggtcgaaatggacataacagatgatcccccatttttttatacattttgaaaatgaaaaaggccagattcaagagcattttgttgagtacgaatggctccccattaagtgcaacaacggtaaaggatatggccataacatggcggagtgtaggaagactagtccaaaggtctgggccaagaaaaacctgcaacatgaaaagaaagttacaagaaaagagtagcctactggtgtggaaaaattagaggaggacaatttggattccattgggaatgatgacccaattggagaaatgaagtagtcagattctaaggaagagaaaacttgtgaaaagtctagaattactactccagatcgagaatgtattgaagggtggaagaccccaaacagaatagacaatttaaaggtgaaaaaaagatctcttggactggttgagcaagcttctgttcaaaatactttcaaggttttgcaggaacaagaaaaggatgttgaaaagtgtaacctatttgttgagtgtggagattgattgcaccaacatacttagttggaatgtgaggggtatgaataaaagggataagcaaggtgatatccttagtcttatgaagttaaataaagtaggggtaggtgctcttattcagaataagttgaagaataacaaagtggatgatggctaagatgtttcatgggtgggattatcattggggtgagcaatgtgaaagaagaattttagttttatggcttaagtcttttgttcaagtgaaagtgatgaaggatcacaagcaactagttcactgtctagttaagtttgttggttctccacttgaagtgtttgttacttttgtgtatggtctcaataccatagaagagagagttgatttatggaaggagctttctactatcaactgtcaaggggctccttggctgatagttggagatttcaatgcaattttttattatggtgatag

SEQ ID NO: 49018 - DNA, 4856 bp, Cannabis sativa
  modified_base (430)..(430): a, c, t, g, unknown or other
  modified_base (1531)..(1542): a, c, t, g, unknown or other
  modified_base (3758)..(3766): a, c, t, g, unknown or other
  modified_base (4405)..(4408): a, c, t, g, unknown or other
gccaagttggatgggagcatcaaataaactcaatgagtgcaaggatatatttgcccaaatcatggaccaaactcatcatcaaagctagttaatcatgtaattagctttggggtctagttttaagtatattagttataataatgttgtgcttttgtgtttaaatattttatatattaagtatttagtgttgttctgattattaattattatatatgttgtgtaatgctaagtactctcttaagttattttgcattatttaatattattattagaaaagtattatgttatgggtttgtgtcctatagttctttaagggatcgtttggtacgttgtattatattgtattgtgttggattgtattgtattagtattatttaatacaatgctatgtttggtattgacttatattaatagattgtgtaaagttatnatatattttcaatacactcgacccaaacaccaactacgggtcaggtacgggcccgagtgtggattttggtcttgggtcgtgagtctcgggtcttaggtccgggtccggttccttgtcccagtctgagtcccaattcgaatttgggtctgggtctcgagtctaggtcggggtcagggttagggtctgggtctggggtcgggcccggagccgaggttggagctggggccgggttcgagtcccctatctcgctaggtctgggtcccggtctcggtcggagtcttggtgcggggtcggggcccaggtccgggtccaggtctgggtccgggtccaagtctgagtctgggtctggatctgggtctgggttcgggtttaagtcctggtctgggtccgggtccaggtctgggtcctaggtcgagtctgggtccgagtttgggtgccagtcccgatccgggtttaggtcctgggttcaggtttgggttcgggtctgagttcgggtcaaagattggagttgatcccgaatcttttataaatattataatccaagctaatacaaataatttgttatgtattaaataatacaatatacattgtattaaaaaattatgagaactaatataaacataaataactttatatacagtacttaagtagattctgaaccctaaatatcactgaaaatatctgctacttttatttttaccattaaatattttattttattttgttacaaaaaatctaaccattttcaggactagggtagagttttaatagcttagattaaataagtttttttttttttctcacgcaatttctatgggttcgacctcattcttcacaatctctacactacaataaagatttgtgcgtttgcgagttgattaatgataaacgtactattttttgtcataacaaatttttgacaccgttgtcgtgaaactgcaagaggaaaaactactttaatccaggttagtacaattcttctactagtaatattacatattatagtaattattttctatattataaaaaagtaactaatgctacttttttttaaaaaaaaatatattattatatacgtagtttattattattattattatnnnnnnnnnnnntattattattatatataataaactttatatattattaattataagtaatattatatttatatatctgttaaatatattaatacccaattttaaatttttgtatttataatatggcagataccgcttcttaattttgttaatttatttatatttctatctttaaattttgcacttatatcaatattaatatttatacttctattatatatataattatttaattttatatgtgtatggtaggcaccgcctcttaattttttttattattttaatttttgtgatacttgatgtattattcactgggaacgaaattttaaaaattgtttggttaaaagaaaattatcgtgggttgaaattaaaagtgaaaatttattttgacatcgtggaaccaaatcaactaaatgaggaagaaaaaactctcattgatcatttttatctcatttttgctaatcttccatcatgcattattttttctgaaacaagtactataaattttgagctaaaaccttttataattcaactttttccatcttttatgggttagatagagaggatccatacatgcatgtgaaagattttttgaaaaattgttctacttttagattttaaaatttttcttatgaatatgttaggcttagacttttttcattctcattaaaagataagacatttccattctcattaaaagataagtctaaagcctgattaaaaatttactcccagcccgatccacttctagttgggatgaattagttaataaaattttggccaaattttttcccatgactaaaataaataatattaggagagaaatctccgaattttatcaacatgatcacaaagaattttatgaatgttgggaaagatttaaagatttattgctaaaatatccacaccatggttttgaaaaatagaaatttgtgagaaaattatgcaaaaaaaataaaagataataagcgtgaaaatgctccaaacatgattaaaacgcaattaaaaatatactaaacttaaatctaaaattaatactaaaaataacctaacagtatacaatcaatacacactggaaaatttttgcaatttaaagggaaagaggcttcggagtctctttaagacctataatacatatatttatatgagtattgctattgagcactagttgtgtccatcatcttctataaatggtatcttacaattagttagcgatattttctaaaaactatttatttaagttattataagatctcatacttaattacatcaataacagtatgacactgagagtgctagacaccaataatatctttttaacatttctctatttatatatataactccatctcatcttctgtctccacacttaacctcattaactagtacttgttagtgaccatacctaattcttaattgataacgaatcagtaaataaatagagaatttttaaaaggtattatatattggtatctagcattctccttggtgtcatattagtattggtgtaattaagtatcgactttcatataacttaagaaaacagtatttaagaaaaataactaatcaatcatatcatgccacgtagaaggtgctaggcactactaatgtccaataacgcaatgttcaaataaataatatgacatattatatatatcttaattaatatattaattaaaattctgaagttatttttttagcaacataaatatattaattatattatatttgtaaaatttaagtatttaaattataagtaaataaatttttatgtgtgtacttaattttctttttatatttaagtttaattataatttgggtgcttgctcttcatacttaactaataatctctattttatcgctatttaactgaactgtatacactttttttgttccaaaaagttatatacacttccctctttaatttggaatgtttaaaactattaatcctattaatatattcataaaattttaaataaatctaaattataatcagaagaaaatcacctaaaattatatatatatatatatagtacaataagagataagatatggctattaatgggggctcatctttcttgaatataaaatctcccatcattaatcaataacaattatctatgtattaattataatgagaaatgctaaagcgcactagtggtgcctaacactttcatatatgttaatatcgctattggtccaactaagtattgggtcccatataattnnnnnnnnnagcttttagggagtatcgctaaccaatcgcaaggcgacatatcgaaaaggtggtaagcaccactggtgcctcatagcaatactcttaattaatatatagttgaggaaaaagagatcaaaactcataaatgtcatgataaaataattaatatgatcaacatattgaattgaagtagttgtagtatactactatataatagaatgataatatgtagaaatgatatacaaacatataaaaatagggagctcatcaatcaagaaatcaaatcatatataattcaaaatatatatcatatcaatatgcagaagagaggtatgatgatgatgaacggttaagatagaaagatggtgactattatagatcgtgattctctattagacgtactattgatgggaaggttgtcatcacaagataactaatgtgggggttattgtatgcgatgaaatccttgcaaacctagatgcatgtcattgtattaataataataggtatatggggacaagataataagaccaatataatattccatatatatgagacttgaataatgtcttgattaaaaaaataatcatcaccacctcgtgtatattataatattcattaatatataattaattattcactacaaaaaatcttacnnnnagtcacaataaaatttgtgattaattataaattatgattcttatgttgtgactaaaagattcgtgactaaaagtactgtattagtcacaaaaagtacaatttgttgtgactaaatgtattttttgtcacaatacttgttgtgactaaaactaaattagtgacaacatgtaactaaatactatgttttagtcacaagtaatattttgttgtgactaaaaatcagatttagtcacaaaaaaattatgttgcgatacgatttttttgttgcaatttaggttgtagcgctagttgcaataagagtttttatgtaaaatttcgtaaaaatgcaaacaaaatgtaaaaaaaaattgtttttaagtataaaaatgaataaaccacttattatattattattattattattattattattattattatcgtttttggatgcctatgacacatttca

SEQ ID NO: 49019 - DNA, 1196 bp, Cannabis sativa
gtcaagttcagaagccttggaaatatctaaaacagaatcccgaaggctcggtttaaagggcccaacgcccaagtcaacaaatgacttggtttgttgggttctgcttatttgaatctgatgctgttttgactgcccgtcttgtttttcacaattacaatgatccatgaagtcagaacaatcaaattcacaatttcaattttttagcaaattgactcactttgaaattagaagtttcgagtattccgttttttgcaaaacagcaatatgtccgagaattagtgaccagcttcgccaaaacctataaatggactaagtgttgtcaaactatcacttaggcatctcaaaggacaccccttggacgtttctacacttatacatcctgtgatgtcaacctcagcgctgtgatgttaacttgggtaatgggacttgaattgccttgagtaaaacagtcatgactcattcaatttttatccgatcgacacaattcaacttgtgttttgaagctatttaaatactttatcaagtcgtatctcacaccccagatgtaattttgaagctattttcgtcaaaattcaccccaagggagttacgaaaataagttctaggtaactcgcagcgggacccgtcggacaccaaaaatcggccatcaccatcagaagctacttttaaacgttagattatcatcaacagtggaaaacaacttattagtatttttctcttatttttgtgggtctccttcacctataaaaggagagttcctttagctcatttttcacatttagaaaattatccacaaagtcagagcttctctctctagactttttctctctacagtttggagcatctgatacttagtctattgttgtaactgccatctcgtgagaaataaaactcgaagtaaacgtagccccattactatcgcaatataggggtgatctactataaattgctgtgtctctcttattaatgacttaacaaattattcatttatggcaatctagcgagcgagtgtagtttagaagtctagtcgagatttctaaatcaacatttccattcaatttttgtctccctttggaacactttcactttttctatggaggagaatatggttgcaactgtagtaaatgcataaaaaaaaaaaatagaaattactcatgaagttattttgaaaattgatcaacagtgatatatttatt

SEQ ID NO: 49020 - DNA, 1469 bp, Cannabis sativa
tgaagcaacgattgattacaactcgtgtattagctctactgtcaaatcaagaaaagttcatggtttattgtgatgcatccagacagggtctagggtacgtgctgatgcaagttgatagggttattgcttatgcttatcgtcaattgaaggagtgcaaacatcgatacccaactcatgacttagaacttgccccaatggtctttgctttgaaaatttggcgacactatggagaaatgtgagaaatctataccgatcacaagagcctcgaatatttctttacttagaaagatttgaatatgagacagaggcagtggttggagttagttaaagactacgattgtaaaattctctatcatcctgagaagatcaatgtagcaacaaatgccctaagcaggaaaggactcgggcatgttttcaacacaactatgatttcccctcaattagcagtagatatggtcaaagaaggtattgagtttgtagtcagcagacttaataatttgacacttcaatcaaacttgttaaaaataattagaaagtctcagttggtggatctagaattaatgaagattcgagaaaaagtcttagctacccaagctaaagatttctcagtatcaactaatgggatgttactttataaatcccgagtttgtgtaccaactagtgttgaacttaggaataaaattcttgatgaagctcacaccactccctattcactacatcccggtaccaccaagacgtaccaagatatgaaacactattattggtggtgcagtatgatatgtgaccaaatgcttgatttgtcaccagtgtcaaataggttagactatgttagttgtttaggttgaatttttaattgacgtattaaaatttgatggggtgaaacaccaattgggacaaggtttggggacagaaaatttgactccgtccaattctctctccactatatgcagtaatgctacctgtcctcagattaatactaattcaaatttttgtttggttagtttatcctgaacactttttctttctctgttttggaactaaaatattttttttgtcaaaaattgaaaattgaagtaaaatagtaatattactaaagaatacacaataatttattgatatatataaataatgcatagataaaagctttttttttatgtatatttactctttttttaaataataatattaatttgtattatcatttaatatttttttgacaaatcatttactttatttttataaaatatatttttttaatgtatttttataaaataattttaatttacttagatgaataataattaaatatgtaggtttttttctttttttttttttttctctttaagatcttataaatataatcttaaaaatgtgtgcatgaaaattattgtgtttgccaaaattattaaaacattatacacaaattatgggtgactattgaatggttatatttttattataaccatatg

SEQ ID NO: 49021 - DNA, 763 bp, Cannabis sativa
tgaagtctgttacgtttaaatcttaaaattggattcataaatactagagaatattgtggaataatgcattagttgattattttctactaataaagaataattctaaggcacaagcacaacaccaagcacctaacaatattctataacaattattaaattaaattatattatattaaatttaatacttaattatgcgggtactttttagcattttatacgaaaaaagttggacataaagttccaataatatgtttatgtttagtttagtgtaatgataatttaattgaaattatcattatttaattttgcaattcctttacgatataattattattactaattataaatataaataaaacttattcatctacttatgtaatcaccaatatactatttataaaaaaacaaaatagctcttccctgagtggcagagccaacacaataacatgttagggggcacaaaatttcttttctgtaaaaatagactatttagaaacttatgatttgacaaaacatgatttgagaaggtcatgggctgattgcagatttatgtattttaaatttatgagtaattttaattattatgtcaaacatcaaacataaataaataaaaaatatatatttttatagaaaagaaaaatataaattttttgggaacataaataaatatacgagaataaaaataaattttttatagaataaatatgaaaatatgtgaactaaaaatataaattataattttacaaatacaaaaataaaaata

SEQ ID NO: 49022 - DNA, 1380 bp, Cannabis sativa
  modified_base (1323)..(1325): a, c, t, g, unknown or other
actacaaacatacaaattaattattcaaaaactaattatcttattcttttaactttaatattaataaaataatacataaaaaaaaaattatatattgttatatattattaaaaactacaatataaagcaaaaaaaagttaataaattaatatatatgtataatggtcggtttcgattttttcggtcggtttattataaaaaaaactgaccgtttaatggcgattttaagcgttagcggttttttcagttttcggttccatcgatttcgattccaacggtgttcggttggtcggtttgaatggtttttttaattttttagattttatgctcaaccctacttctacacgatttgaataagatgtttttctaaaaaaacatgaaacttacgatctttgaagaagatgtttctctgaaaaacatgaaacccacgatcttcaactgttgtcctatccacatttttgttaagttttttttttctacaattatctattttaatggcgataattcgttcttccttttctccatctccctctgtagaaaaagttacatttacacactctcaagcataaaaaatgaggttgaaatctgtttccaaaaaaaagaaaggaagaaagaagttagataatgattttgttgagctccttcaaaaagaaatttaaaatcattaatggagataaatgttgaaaatattttaccagaatttaaatttattaacatgtatgttggattataattcaataatctaacattctaaatgtgaatttctcaaaaacaatgaattgaacacataaagttatagaaaactttacattaatggcagtagaataatatgactcatttcgttcataactataattcttgatcttttttgttgtagagtataatcaagatgtgaacttggtttgtcctttaggtgacaaaagactacacaattgtccacactatcttgagtattgccttgaattgtgtaggcaataactcattcactataaggctcgaatttttcaagaggaagaagaaaagaattcaaaaatattaagagctttgtttattttctatttgtctgacaaaaagagtcaattaatgttatgaaaatgagagctataatattctatttatatggtagcttttaggattaggttttgaattaaatggaataaaaaaagataaaaatagctttatttaatccctctttggccaatttttctcataagcttaatgggtttcaatttcgccattttattgaaacttatctttcttttcacaaatattatcttttaattctaactctatagatgtaaatttatctatttaataattatnnntaattattaaataaaattaccatttaactctataaatggttttccttatagtgtg

SEQ ID NO: 49023 - DNA, 1776 bp, Cannabis sativa
gaggtccagcaaaagttcctctcccataatcttgttgctgctgggagtgttgaagataacttagcaaattcggtggacaaagcttatttgcaacccaccttgccttcactgggaagttataaactgaatgtcaatgcagctctagacaaaaagaagaaaaagtctcatattgggacagtagtgagggaatgtcacaacaatgttattactgtccattctacctcaagaatttgagcagcttctcccttgtatgctgaagcgtagacacaatacaatgcattgatgatttggtggttagtagaaaagttaccactctccctcattgagatagattagcctcagcttgttaagaaaatcaaacataagtgaaaagtttactcatcagtttcagatttaatttcaaaaaattttgattcattgtctttttttctaatgtgtcttttttgcatgtatttgctcataatataagtagagatttttaaagtttagataaggagttgggttgagagagtagtttccgatagttagtctttgttttgtaacttgctcattttaatggaagttgcaaacactttttaagaaaataaaaaataaaaatagttcattgatcacattatcatttcttgatgggttacaattaaaactttggagcatatataggcaccgactactttgattagtaaaaatatataaatatattatctgtgatgaataaataaaaaaaaatatttgaatcactaatattatgggttaaactcattgttaacataaaaaataatgtgcgtatttatatataaattcatataagcagatcgatatatatacattgcagagagagttaactacatacaaagctttcatagctcagttggttagagcacccgtttagtaagcgggaggtcttgagttcaactctcaatgaaagcatatttttataatatatctttttaacaaataaaataaaatgatttctcaagcaacgttttggtattttggacaaataatacaagaaataattatgtacacaactaacgtccattataattgttattggtacagaagaatttagaatgagctgttggccgtcttaccataaacaacttgaacatccgtcttttgtgttgtccatgattgacatatttttaagtttacaattcatcactaatcaccatatatttaaaatatatatgttcatcaaatgtatttagccaaacaaaaaatgtataacatcattaagcccatcttaattaacatgccaggtggacaatagtaagtccataatagtatattcaaaacaatattgtataactaaatttaagtataattaatgtgcagtaatatccagttttatttggtattatattgtacctaaggaatatattcacttaattatgcatagccggccaaaaacaaagaaaatattgaatataatatatcaactcagtgtgttaattaatttgacttagactagactacttcaattgatatcttaatctccatattatgtctctcatgttgtctctataaaaaccacctcgttgtgcttctcaaagcccaactcaaaattaaacaatttacaaacatacatagctagttctctcgtctatactctctattaagtacttcttataaattacaaagattaattaaggcacaacaaatgggctctcgagtgttgctattattggtggcattgtttgccattgtttcttccattgccttggcatctgatcctagttctcttcaggatttttgtgttgcagcctccaactctcc

SEQ ID NO: 49024 - DNA, 1006 bp, Cannabis sativa
gcgtatttataaagtaataaaggttatacttagtttgttcaaaaaaaaaaaaggttatacttagttacccttttccctctaatggggtatttacaaatcatactgtactttgagcctatcgtgtgaagcctagcccatgaggcggtgactgtacggtgatagctgttcatgtaatgtcctttgattgtggataattaattgtgcattaataatttgatcttcaattatatagtttctcttttaagtttgatattattctttgtccgagatccgtgaaaggtaaatttcttattctgtgcagatcgataaatgaaaaactattgttggcttcaagatacacactgatgggtctttctggctacgtaaaactttaagttctccaaatacagattatgcttgggagaggtatgtttggtcatgcaatgcaattgccctcctaaaaggccaacttgatattgttctggcccaatttttatcgtttagagcccactgatagacttttttaacttgtcttatgtccacatgtcccttgtcgaaaacacgaataacaactaaaatatagttcttcttgtaaaaaaatgtattcatggtgtgccataagtttatatgaatttgtcacatataaaaaattgatttaaaattggatcacaatatgtcactatgtaaaatttgcatcaatgaatgtattatttttatatttattatgatgttatttttaatatttaattattatattaattataaacgttttacatttattctttattattttatatattaaaattaataatagagttattattttattatattttataaaaatattgaaatacaatgctaaaactattttataaaaatattacatcaaattttttaattgtgcaaaatacaatactaaaattgatacaaagagattacaaagtcatttttttttgtgtcaaatataacattttttacgtcttaggtattgtaaagagtattgttatttgacacattaacgtgtcga

SEQ ID NO: 49025 - DNA, 1579 bp, Cannabis sativa
acgctaataaaaaactatttgcgtctacggtatatacgtcggttttttaaaccgacgtaaattctttaaatgacacttgaaaaccgacgggaatgatactttttgtagtagtgaaaggaaactcagtgcccaagggatcatggacagacctgaaggccaggagggccaattgtgtcttgaataaggccatcttaccagcctaataatggccaggtcttgccggaaagatcatatggcagggctggccaatttcaaggcctgcctagaggcaaaatagaagtggaggacatcccaccaatgcaaggctagagcaggtcttatactggagagtcttacctcattcctaatgatgatagtaccactagtcacccaaggggtaagcgcactaattggagagctcaaagttctgggcataaaaatgatgtttttccctagaatggtcagacacattctgacccgaggcctagagtatttttatttgccagaatgggccctcatgtcagggtagatctttgggttggcttgaaccgaagaaggagtgatcaagatgggtacatcccacccctgaacactcgaccaacatggaagaacagacaaaacccaaccaacccagcagggggccgaccaacttcttgtccatccattggccagcgtggctagccgtgtgctgccaggtcaaaaattgattgggtaaacacaagctgaagttgatcttttagtgcaagcacatctatatcaactcaagaacatgatacaaggcacgtttggcccaaagttgtctgacttagagttgaataggacctgagggtcacctttctctgcgtgcattaatacactacctttgcctaccaagtctaagatgcctacttggaggatgtacacagggaaacaagatcccttagctcacattaaatattatgaaatccaaatggatttgaaaaattttgaggttgatacccgttgctaaatcttcctcaaaaccttgtttgaaatcgcacagcagtattttttcaaacttgctgccggaaggttcgattcatagaactctttcccaagagaattctacaaacaatttttgttttcccaataattaccttataggctggaatagttaattgaggtcaaacagaggccatgggaacctatgaaagacaatctctaaagactcatgattgaggctacgaaggtcaaaaatctgacagaagaaggaaggtacacaataatcatgagtggcatactacctttgagtgagttgtggatggtcatccgccgacactcaactcaaaacatggctgatttccttgattaggcagaaggctttgtcaagcttgaagaagttgacggacagcccaaagtaggagacatgcaggtgctagatagaccttgagtggtggattgccctcagttctgcccagcacacctatcagcataggcggccagccccctaaaggccgaaataatgaaggcaagcgtgacaacaacaactctagccaattaaaaggcaaaaatgggaaatttaataattcccccacgccataagactcaaaggacaagaaaaggagctttacatgctttaccc

SEQ ID NO: 49026 - DNA, 1472 bp, Cannabis sativa
agttttctaaaagttaagaaaaaatcagaaataattgtgttagtgaattcaaaataaggagacttttgtgaatgttattagctaggagttcaaagtcatcaagaaaaactgttctataatgattttcttacctaaaaaagtcagcagtgtgggacataataatctgctgaatcttgttgatctcagaagatgaaactgaaaaaagactattgtcaaaattcaaataataatagtgtatcacattcacactttcacatcacatgcaataatattatgtattggaatggtattgttggtattgctttttattttgttaattcatttaatctaagattttgatattgctagaatgcccatatcaacttcagttattacacctaaatataataataatggctattccatttcgacctatccatgtcaacatttggtcgccactataatagagagcacccaatttcgatttcataatttaatttttctaattttcttactcaaattccgaattagagaaatattgatataaaaagataattgagattagaatatgtgtgtgcatggaaattaataaatttagtgacttaattttaattatatatatatatatatatatatattgtataaaaaaattctacaatgcactattttctattttctaaaaaaaattgcaccaaggcacttttatctgttttggtatctaaaaaaaattaatttaactttttatagtcgtgtacattgtagttatttgagatattcgacaaatattagattaaaattttatttgtgagcacatatgtataatgtatatatgctattataaagtgtgatacaaaattaagtgatcaattatattatgggtatcaaaatggtattaaattatcatataaataaagagtagatactataagttaatttataatttgttaaggaatcaaattataaatattcaaaactcattctacaatgagcctataaatatgtagtgttcctcaaaaaatactatggttaatgtattctctctttccccatcataaaaaataacaatgacttcagaatagtgttttcgctcattttattattatcatcattttattttttgatttaataaaggttctataaaatatgatttaggattttttatattatttttaaaaatatgattagatcactaataatatatatttcttgagtgttttaaaaattttaacaataaaatttttaaaaattcatgaaaaatttaatagtcaaagacatggttcaaatagtaacacgtataacttttttattttatatacttgtaaaataaattatttgaacactattttttaaattttaaattattttaaatttttcaaaattttacacatcctatcaaaaaaaattaattaaaaaattatcctaaaattcgaaaaagatgaaaaatgaatcggtacattccttttattataaagtgcattgtagaagcgcttgta

SEQ ID NO: 49027 - DNA, 977 bp, Cannabis sativa
tttctcggaaactgacattttcctatctaacaaacagaaagttatttccatataaaactaatgtagtggggctagagctagtggcccaacaatgtgaacaaaatagatagttcatgaacttaatgccaataatttcaatatcaactcaaacttactttcaaactttaattacctttgacagcttcaaatatgtacttgaccatgcattgaattaatttatttataattttatagttggagggcgaaaaatattaaactagttaaatgggttttggtagtgtatataaaaagtgagattttggttatattgtatgggtaaatattattttacaccctgtatttgtaaataacttagcatgttttgttctacagactaacacgagtgtttctaggaggttactcatgttgaagtcaaacacgtttaactgtggagttctttcctgatgggctaccaaaaacaatatgcaccttggtgacataagtagtatcaatcaatccatttaagatatcttcaactttgtagtctcatacctacacagtctcaaaatcattacacatgactatccccaggcaacaagggattgaacagctcccgatcttttttcttacgaatcacgagactactgattgtcacaattttgttaaaaaaacaacccaaaccctatattttccaaattagtgcataatagtagaccgaactcaatttagattaatttatttttttaatataaccaacctacacacaatttctagcataaaaaaagtgcaaaccaagttttcatttaacaaaagaaagagtcgatctaatcatagcttttgctaaatatatatggtccaaaataatatttagttttagaaaaaaaaattaaaatggtgtactatatttcattctttcaataaaaaagaagccaatcttcgtaacaaagttgtatatatctaaataaatatttcaaatgatgttattcagaataaaagtt

SEQ ID NO: 49028 - DNA, 2084 bp, Cannabis sativa
attaaaaattgaaataaatatgggctactccactcattataattgttttgagatagaacctcatgattctcaacatctaaaattacaaaacttgtgttcttatcttttagaacacaattttaaaaacctacaaatacataattttagtgggtcataagaaaaaaaatatgtgatattttcaaaatcaataaaaaacaaatgtgtatttttgaaagagaaattttctttttcgcccctaagctaggtgggccttaggcacaagtttagtccacctatgcccagggctaagcttgaatacatgtatattagttaatgattagagttcacatgtatccaatgacatcacctgttttggtgggtggtctgcctgttcttcctctccgagggtaaggaaactcgctattccctccaagaattttacgagcaaagtcctcacctttgtcaggttcacccaaatcattgtacacatcgtagtcatagactctgtcccactctttacgctctccttttccatctcctctcaagttctgaagctcttcctttctgtacttaagcaatggtgctggtgttgcacttggaagatatgactataccacaaaaaaaaaaaaaaaattcattgatgacttgtatgaaatggagcatatttcttaaaaaacgcatatatactcagtgacagatttaaaatttttattttatcaagaggttaattattattaaaaaaacatacctagttaaattattataactatatttacaggagcttctacactacatttttgtgtttaattatcaaataaaataaaacatatatattaaaaaaaaaataatacaatttttttgtctagtggattcgtctctgtatataccttgtttctgaaaaatacacgatcgtagtcgtatttgttggctgagtaaacccaagaatagcaaatgaattgaacaacaccttcaccaggaacatcatcaagggtaatggtcttgaggaagagctcttcaacgtgattgttcttgaagatcacagcttcagggactccgatagattcgtcccactcgaaactcactttaaatactgagtctcctggtattatggttggtgcagaagtaacccaatcttccaactttgtttctttaccaactttgttcgctgcaacaaaatttataacatgtgaaaaaggctatcaagaatttcttttcaaaagaatttaatatcatattttatatattttaatttaataataattataaaaaatcgttaaacaatcgtaaatctcttcgagtatcattggagatcatggaacttttcgcccccctagctagctagcttcatgatgctatgagatactcatggtacctagcaccactatgaagtgtagagatattttataaaagttattatattaaattatataggactcgatacttaattgtactataataataatataacatgttagagattgcaagacccactagtgtttttaacatttctggttggttaggtggggtccattttaattatgtgtgatcaccaaagttttaactttttaatctacttaatcaatttgaggtacttgaagaaaaataaaactatagatgattcaaaacgtgcactatctaacaatcttttcatatcaaaatgtcaagtgcttaacacttgaaagacaatttttagtatttcttttagcttaagagaaatgttaaggagcactataaaatgtgacatactgctattagtgtattaacaatacattagtataatattagtactctttctcttattataaatgtattataaatatatatatatatatatatatattgatatacataccattgtgaccactaacaagctgtagagaaactccaccacctaagaactcgacgactcgatccaatatagcagagcctgcattaactgaagcagccaatggattgaactccaacacattctttttcgacaaaacaactttcccatttatcatcttcttatcatcatttccaccactcaatgcatccaccactttcccaataaacatatttatcaactcttcaaggaccaataagcaattaactgaaaatatata

SEQ ID NO: 49029 - DNA, 1354 bp, Cannabis sativa
tcatttaaacaactcaaatcagccccattattaagaacattcaagcacaccgcaatgacctcatccttgagtttagaccagaacttttgatagaaaagcgcaggcaacccatccgcccccggtgctttagtaggattcatcccctttactgcttgcacaacctcttccacagaaaaatcaaccattaattcctcattcatagacatagaaactttcggctgcaccacttctaaaacctcctgcattacgccctgatcaatgtccgaacccataaacaaacctttgtaatagtcctccacaatttggcaaaccaacagtttatcatcttgccaaactcccatttgatcttgcaaccccttaatttcattcttcttcctgcgcgaagacgctttgtgatgaaaatacttcgtgtttctatccccccattgcaaccataaggctctacttctttgtcgccaatactgctcatccttctcaagcaacccatttaacttatcttccatgtgttgtatcgcctcccaaacacccggttgttgctgcattgtcaactcgtgcaacatctttttagtcttagctatctcgttattcaaccgagccttcttcttcttgttccaatcttgtagtgctttcccacatttattaattttgcacctaaaggacactggccgacccctcccctgcctttccttccacatattatcaataatctcagtacactcctcttcttgacaccaggcttcttcaaaatgaaagcgatttttacgtttagtcttgccacacttgtccccatccactctcaccggaatatcaattactagcgccctatgatcagattcccaccaatcaagcaactgaacatccgcaccctcaaattgtctcaaccactcctcagtacacaatcctctatcaagcctctccataatctgagatgaattatgttcattacaccaagtcaattcatgctttgaagacccaaaatcaataaaccgacaatcatcaattacctccttaaatccatccatagctcccggaggtcgatccctaccaccaatcttctccgctaagctcacaatttcattaaaatcccccacacatagccacggtccctgaacttctcttttcaaatttctcaacaattgccatgaaaatttcctcaagctagcttcaggattaccatagaagcctgtcaaataccatggcgagaacccattccctgctaccgtagccaaaatatgccctatagaactatccaaaacttgcaattttacctcttttttccacattaacaacagccccccactcaatcccactctatctactgtccataacaaatcaaacttaagaacactacaaa

SEQ ID NO: 49030 - DNA, 887 bp, Cannabis sativa
tacctacacagtctcgaaatcatcacacttgatcttttccaggcaatgtgggattgcacagcttaggtatttctccttacgaatcacggaactactggactgtcacattaataccttataacaatgctccatttttataaaataaatgttaaaagatgctaatagtaccaccaatagtgtctaatattctctaacatgttatatcgatattagtataactaagtattgagtcccacacaatttaatttaataactattatgaaatgagaaatgataaaaaagatatccatagtgtctaatacttttgtgatgtataatattactataggtacaatttattatattaagtcttacttattttattttaataaaaattattgaaagcgactaactaattatcataatgtctatctttttactagtattatcatttttcatattagtgcataaatcaatcattgctcaattttttttccaaaattaaattggagaatcaaagttattgtggacaaacatttggataacaatctatgaaaagaagcacaataataacaaaattgatagatacaaaaattcatagaccaaaataatgttggaatttgtcttttttgctatacaaaaactataaatctttgttctctcttagaaatttacaattatgagagcttcaacaattagcccaataggaatttaaattttcttatagtctagggccatttcattttggtttataaacttctattgtttttttatttattttttctaatttttttaaatagaaaaaataatgaaaattcaccactatataattaaaagaattaatattgatatattgatgtaaaaaaatatatatatgcaattgtccctatagaattatgcatgggctt

SEQ ID NO: 49031 - DNA, 1926 bp, Cannabis sativa
  modified_base (719)..(722): a, c, t, g, unknown or other
  modified_base (1324)..(1333): a, c, t, g, unknown or other
  modified_base (1727)..(1728): a, c, t, g, unknown or other
ctctctctctctctctctcctcgatgggcaaagagaattggcccctttctcattagcaattaaagcccacaccttccgagtccatcacccaccatttttcttctttcttgctctaaagttcaattttttttattttggtactttaaccttgtttgagaaacacccagttgctaaaacaagtagatatgaattgggtatgtgctgaatttttttagtgttttttctccatttttttgttttttgagtgagacccatttggtgaaaaatgttgttacatggtttcgatcgagttgttttgctcgttatattggaaaatccaagaatcagaaacggcaacaattgcaatagttttgagctttagagtagaggcagaggttggatctactcttcatcgcattcaactgtcacaatgccaaacggataggtaggcatcttgttcacttttgctgcaaaaactttgttttcgagcatgagaaaagtccaccatttttgtttttctcatgctcttgttctgtgctgctttctttggttttttctcggaattcaatcagtttttgctgcaactaagaaagagattctgcttcaattcaaagggaatgtcacaaatgatccttacaatagcttgagctcatgggttaagataccctctagtccctgaaggggttaagatgccctctagtctactcaacattttaaggagttgttcgagttgttttgtnnnntttcatggaaatcttgaaaaattggctgtttagttttttgttgaatattcttaataaatgtttctctcttatttagtttctcataattttcattgtagggtgtgcttttgctcaatgttgttttaactggtaagagtaagacttattattaatattgttgtatatgaaggtgttcaccaactaactttactgtttaaattatgtctatcaatgttgtctttcttatccatgtttagtatagtctttcgacctttttttttttttttttttggtcttttccataaaaagaaaacataagtaagaaaggagataaagcttcacggttcactatttttcaatgagatgaaaattccaatattctttagaatatcaataagggatgtagtgcttgtaaagatataatctccgtcaatcatatgaaggttaaaatgagtatgtgttcaaattacttaaaacaacaattataaattaatattttttttaattataatatattcacttgagaatgaatgagaaggaaaaaaaaggagaatttgataaataagatgaccgccatgtcatcaggtaacaagtcaaaataaaaaatattaattttaaaaaannnnnnnnnnactttaaatatcatccatttgattaaatctaacggtccataattaaatacccattcatgggtaatacccattaagagcacacccatatatgttatatgtatatgagatatataacatatatgtttatataattaatattatgtatgttacatacatattatattagttgtcatataattattatttgagagttataattcatggatgggttatatataattttgtacattaatatacaaattatataatgtatatgataatgtatacaaattatataattttattactattgatgtgtagattattatcatatatattgtgaataaagaggatttgaaattctttttcaatagtgattttgaaaaaaaaaaaattgtaacttgtgagaagttannttctttgagaatttaaagtgataattatctcattttatgagataaaaaaaagtgaactatgagagttacacttttattggacttgcattgtcatagcaagaacaaatggtggatcaaaagtggatccaaaaataaagtgaatcaaagataacaaaatggggaaagtaattttaaaatcttaaataattaaagttgtga

SEQ ID NO: 49032 - DNA, 2840 bp, Cannabis sativa
agtcatgaatactgtctcttctagtgtcccatttaggaatgcattggaaacatccaattgcttgacatcccacttgtatgaaactgctatagttaagatgattcggactgtagcaggtcgaacaacagggctaaaggtctcttgaaaatcgatgccaggagtttgatgataaccctttgccactagccgtgatttgcatctgtcaaggctgccatctgcattaagtttcactctatggacccatttatttcctactaagttcatgtaggactgatatggaacaagtgtccatgttccatttctttttaaggccaaaaattcatctgtcattgatgcattccagtgaggatcagcaagtgcttgtttcaggcttttgggttcagtgggaagaagggattctggtagtggatactttgttgcagtataagcttttggtttgtgagttccgactttggatcgagtggtcatgggatgttggttagaagtggggggaaggggtggattggtgacagtaggaactctgggagtcgggttaagagaggcagggggaagggaagtggatgttgggatgatttctgaagtaggaggtgggtcagtaggtgctggtgtactggtgggaacattggaggttaatggaatggatatagcagtaggcacagcacttgcctggttaatatgagggccagctggtgtagacaaactggaagtggaatgtccagtagatggtccatgataatgttcctcagagacaggaaatggcataggattagtatgtgaaggtaaagaatttgtatagaaagttgtggagggaaatgagagaggttcagaggacaatacctgctgagttggtttgggcaaaagtgctggaaactcctcctcattaaacaccacattccttgtaatatatacacggccagaagtactttcacataggtatcctttgtgttgcatagagtagccaataaatgtgcacttttcagatctcactgtcatcttgtgaatgtgatatggccttaagtatgggaaacatgaacacccaaaagttttcaagaaatcatagtcaggaagcttatgaaacaaggtctgatatggagaaagctgatctaacacaggtgtaggtaatcgattgattacaaaggtggcatgttgaaaggcataccaccagtaagagagatcaagacccgactgtgctagaagggtcatgcctatatcatttatatgcctgtgttttcgttcagcccgtccattttgctgatggtcatgagggcaagaatgttgaaattgaatgccattgtgagccaaaaatgcagcaagagatctatactctcctccccaatcagattggacagatttgatggggaggttaaattgtttttcaaccaatttcttgaactgtaggaatgtaggatatgcttgggactttaaagtaagagggaatatccatgtatacctactgaaatcgtctagaaaatgaatgtaatatcggaaaccttctttggagggaatatgagaaggtccccatacatcagtatgtatgagttcaagaggaatagaggccctactggtggacaagggatatggtaatttgtgactcttgccaattttacatgcatcacagaattttaaagtgtttaaagtgcctgtatggttgatgttggacaggacttttgagagagttgcagggcctgggtggcctaatttggcatgccaaatattaatatcttgtgcaacatttatatgaaaaatctcatgaacagatggtatagaagaactagaagtaggattttcattaatatgaggttgagtacaatgagtaggagctgttgaaacagctgctgtattacatggaatattacaaactgaattacaatcagcagtagacaaaggctgagatgctttagtggcaagatgacactgaagttgaataggggtgttggagacagatggttgagttaacatgtacaagccattcttaactctccctttgagtaaaactttcccggtgctcttgtccttcacaaaacaacaggtagtgtgaaattcaagaaagacatgattatctttggttaatttagacacactaactaagtttttggtgatgtggggaacttttaaaactgaattaagttttaatggacgagagtgtgaagggagagaagagttaccaatatgggagatgggtagttgtttgccattgcctatagcaagagaatcatgtccatgatagggtgcttcaaagtcaaggtgttccatgccttttgccacatgactgttggcacctgtatcagcataccaatcttggtcacaagaaaaatcaggaactgtgttgggtgagtaattgaggtgatcatcatcctccatttctgtcaagaatgcctgagagtctccgatcttgggcggaatgaaagatttgtcaaatctgtagtgacacacagctgctgtgtgtccatttttgtggcagacttgacaaattgtgcgaatgttactgcctcgaccgcctgagccatttccacgattgtaaggacgatttggatagccagaactatatccacgcccattattgccagaagaacgactgtgtgacccaaatcttgatgatccaatagacaaatttgcagttagccctgaagagggggctccagtcgtgtagtgacgttctaaacgactctcatgagtaagaagcaatgactgaatggagtcgaatgagagattatcaaccaagcttgtaacatgaaccacgactggatcatattcgggtcccaagccattcaagagatgcattatgagatcactgttaggttatttttagtattaattttagattaagtttagtatatttt

SEQ ID NO: 49033 - DNA, 1836 bp, Cannabis sativa
acatccaaattaaaagttacatgtattaacttttaaaacattgacattcatttaaagtaaaacttaattacagtttttttaacaacttaattactgttaaaagttaaataacgagcattgatattggggttctgttgaaaaatactattttttttttgtatccaataattaaaaatactttcatattatattttgttaaaatatacaatttttttttttttgaatggattttttttgaatggattgcctatcttaccctcactctctacttaagtctagcatataatttatgttaacctaaggagtctaatagggacatcatctataaaagtggatatatcttaaaggatataaaaatggaggtacaaattaaaacaagtaaaataaagtggatataccatgtaattttctctttatattgggcactagtagtgtctaacaccatttaaaggtgtcaacctatgatacttaatcacacaaatagcaatatgacacttaagaaagtgctaaacaacaccaatgtcttttaagatttttagagagcatctctaatggtagcatcctttaagtaataatttacacaatcatatctaataaaaaaagtataatattttattttatttctttttcatatcatttttggtaattttatttctaaaaatactctaatgtataacactctttaaaaatactaatactaattataatctcacacattattatttaatacatattctaatttttaattacaatttaactttaattttttattaaaaaaaataatagcatcaatgctataataatatagcatctcaatattttaccactaaatgtccacctcaccaatcacccttctataattttactattggagatgtgaccgctagccaatactattgtggaaaagctaaaaaaaagaacagcacaataaataaataaattaatagtagtactaatagtacatatctcatttattgtatgattaattggggagtatataataccctgttattaacttccccacgaagttaccaaaccttctgcaataaattacgaatgagacctaactaaccataccataccttcttgtcgtctatttcttaatatattcatgtttttctaaaaatattacaatagtaaaaatattcattattattattattattattaataatatttacctgttaatggttgcttgcaagttggaaaccagtaaacaaagattaagagagagatagagagggcctatagttaggtacccgtttgagagagggccccatattctgcatttcaaaatattgtgtttctgtatttgaaatttatatagagggacgataaagttcattttcatagtcctttgactatagaaattagaaacaaacaacaactacttcactctctctctctcaccatgttaaataaataataaatcttttttatttcttttcttgaaaccagaagagaagaggggtcttttctgtctcagcttaaattcttgggcctttggcttatattgtatactatctcttctgttctccctccaccttacatagttttcttcttacaccacgtccacaacaccctctttttctttttctcttccttcttttcccaaactttttctttcttttatgcccaactttaaagattcaaacatatacgttgatatatagaagtgtacttaaataaagagttactgtttaagcaagttgtgtgagtagagatgatgagtgcttcgaagtttattaaatgtgtgaccgttggagatggagctgttggcaagacctgtatgctcatttgttacacaagcaacaagttccccactgtaagtctttc

SEQ ID NO: 49034 - DNA, 798 bp, Cannabis sativa
  modified_base (740)..(772): a, c, t, g, unknown or other
ggcctactattgaggaggaacacataattggggatgctaaagtccaagaaatggaggatcaaggcaaggtttgtcctaatggtccttctaaggctgaggaggaaggcgcaactcgggggctgcccttcgacagttataacgaggaagggttacccatgtcggaaattggggaacccctagtagactgcaaagactatgtcaccgaagaatatactgaacccatccccctcagaagacaaggtgtggtaggagcttggtgggtttctcctccatccatagtaacccaggaaaaaataaagaacttggagaagcacgactacttgggggatgtcgaattcttccttccctcttcaaatcaccaggcaaccagtccaagggaggggtactatgcttggtcgggtgctcatactaagaagggtgcaatgctgcccttgcttccgtacttcaagaggattttggattactatcatctttgcccaacccagttcactccgaagggcatcaaatatatatccgccctgtccattctttatgcctcacaaggatggggcatgcgatcgtcgcacgacaccaactggctcttcgacctgaagtcaattcccaagcagagcaggtcggggtatttttatttctgtcaactcgaggagaagtggctaacgggcaccacagactccaaggtgagcaaaatagggaacttcgtggatgagtactacgtcgttcatgttgggttttatgccctnnnnnnnnnnnnnnnnnnnnnnnnnnnnnnnnnttattaatatagatcagaaattacat

SEQ ID NO: 49035 - DNA, 783 bp, Cannabis sativa
tcactatatcaatgttaaaactttaaaacaaattacagagctgaaactgtatcaatgctgtctttgtgataatgtgtatgaacttaataccatatataagaagcatagactactcctctcattgtcaattctcttttgagatggaacccatgccccttttttctatattactaagtaatgaacttaatggctatatctaggctactgcaaaacacatttttatatagtacttttaataccaaacttagtactatatagaaaaaaatgttatcctaatcacaatgtaatactatagaatacaatacctcataataacacatcctgagatagattcaattgagttattgaacaactactcattcttatatatctgtttataagttgattgttgctcagtaaaccagttccagaaatcatgatgttgaggggacaatgtattatttatatgctgtttgtttcaatattgttgtagctaagtagtaaggattgttcatttgtgccaagttggttctgtggtggcatgttaaatttgtgtagcatttttttgatttcctgaagttgaattacttaccgtgaagtatttttggagcaggcagatcttagcaaaccagagacaattcctgcaacattggttggcattcacactgttattgattgtgccacagggcgcccagaagagcctataaagacggtaggatacaacaaataattttctctacagtagtttcatattgattggtttctgcattctttttatagatgctatatttcttttttcctaaa

SEQ ID NO: 49036 - DNA, 1096 bp, Cannabis sativa
cctacttaatggtgttcctttgtttccagaggtatgtatctttgttcacttttttcttgattatatattggaaaacttataatttgtcgtgattaaaaatacatttaatcacaacaaaaattaaattagtgacattttgtatctgaatactactttttagtggcaaaaagttttcggtatgactaaaagtgacatggaatcacaaaaaatctatgttgtcactaaagtgtagtttttctttttttcttttttttagtgacaatcgagtttttcgatttttcaggtgtcaagtcgatggttccttcctttcgcttacgttttcatagcgaagagcgtttacagtttatcggaagcaataatccacggaagtactctaaaagcttggtggaacacacagaagatgtggttgattcgaaggactagtgcttacttcattgctttagtagacattattaagagaaaacttggtctatccgaaaccacatttgttcttacagacaaagttgtgactgaagatatctcaaataggtatgatgaagaggtaatggagtttggaagctcaaacttaatgttcaacatattatcaacattggcattgcttaacttgttctgtttagttggttgggtcaaaaagctcgtgttcgatttcgattccaaggctatagaacagatgattatgcaggttttgctttgtgggataatcattgttgttaatttgccaatttacaatgctcttttcattagaagagataagggttccataccaacttttgttatggtcaaatcttttgttttagcttcaattttatgcctaattcctctgtattagaacattaagatttgataaaacagcttcaattgattgaggcctatatgtaaaataaaaacttacacttgatattcaatgagaatgatcatatgctttctttatttgtgaccatgttttcggtcctgatttaaggtagaaaatcaagtcaaacacaataacacgactcgaaatccacatgaaattagaaggagaataagggttgcataccaatttcggttatgctcaaatgttttgttttggcttcaattttatagtaggatatagttt

SEQ ID NO: 49037 - DNA, 1150 bp, Cannabis sativa
ttttgtgaggcgaggtgttagcctcaaatatttaattgaagaaaaaatagagcacctaaaattatcaagaataaatgaaatgtctcataaaactcaaacataacataaatttctcaaaaaactcaaacttaaataaagataactttgttttcatgaactagaatcgtagattctactattccagaaatttcagcatcatttttttttttgtttttatcctattcgtgaagaagtcaactgaggatgagggagaataaggagaaacgaaatgtctcataaaactcaaacataacatacatgtctaataaaactcaaacttaaacaaggataatttttatttcattaattagaatagtagattctactattctagaaatttcagcatccattttattttgtttttgttctatctgtgaagaagtcgactgagagatgagggggaataggggagaacggttggattactaaaacaccctaaatgatatattatgtgtattgtgtttttattggactttatttgtttgagttttatttgacttttttaaacttaagttttcttgggcttttttaaactaaataagaactttactggtctattttaagttagtaacatcattttaattaaaaagccccaaaaaattgtgttttctgaggccctcaccaaattttcacacctcaggccacttcgagccacatcacacggctgaggcgtacacctttcttccccctactgaggggtgggcaatagggagaattttttccgcctcaaagcatggggcgcctcaaggcgcgcaatagccccgcaattttaaacattgctataagggacaaacacagagacaaagaaaaatctaaatctaatgcagccttctctgatagaacaaatacaaatctaattcccaatagttaatagagccgcaaaaattggaggattttgtggctggatcagaatgaaggtgatgaaccatcataaaattcataacaaacacaaggaactactgtgaagtgtgaaccgagaacaatgagctgagtcaaataaataactctgttggcaaattaggaatgacttgcaaagtgcctatctacaagtacgactaccacatgcatagacaacaatctaaataatacaataatgctattttaatatcca

SEQ ID NO: 49038 - DNA, 868 bp, Cannabis sativa
  modified_base (578)..(584): a, c, t, g, unknown or other
  modified_base (707)..(715): a, c, t, g, unknown or other
  modified_base (803)..(825): a, c, t, g, unknown or other
tagggcctcctccaacatcatctttaagactgtgtacgaaaagatgggacttcatctaaaagacctaacaccctgtacataacacatgtacgagttcttaggccgaggattacaagattcacaatataattgtgcgcctactctaccctcttcgtcactttacttcaattagtttctaaaactgttgtaatttaaaacctgttgttgctacgatttcatggcaaaaaaatatttgcctatgtatttgggtgagttcagagcagttattactaattgtgggtgatttgagatccatttcccataatctcattcaaaactacaggtcttgaattttacttgttgtatttgtaattagttttagtttttttttactaaaactgaaaatcatagtgtatttctttttctgatgttgctattgtcgttgtttttttctctgatttgaaagttaatttcttactatttattgaatgaattagatctattgaactttattgaccgaggttttcggcaaccaataaaatattataagattagagaactgtaagaaattaagagaatgatttttacgtggttggggnnnnnnngagccttagtccacgagtctatgtatttataaatgtattaaatacatagaatgttcttggtgagtatttactcttcttacacttatgcaacccaagatttttcgaccccatttaatgagcttnnnnnnnnnatttatagtgtttttggtggggtagttcccaagattattgtacatgtgtattcgtaaaatccataaagatgggtattcccaatgaatnnnnnnnnnnnnnnnnnnnnnnnaatccctaggtgttgtagggcttttatgtggaatgtccttatt

SEQ ID NO: 49039 - DNA, 990 bp, Cannabis sativa
aattccgtaaaaaaacaaaaaaaaaaaaaaaaaaaaaattgatttgaagtgtaaaaatgaaaaagcccttaaaaaatactagaacacatccacgtagttcaattctaaaataaataaacaaaataaaacggtaaagttataatggagcgctgataataacgctaagattataaccccaaaaaaaatgaaaaatcgaagacttaataagatgaactcaaattgcaatgctaattctggtgcagaaaagaaaaacattgaataaagatgtaaactatacatcctatgactctgctgatgaaacccaaaactcaacatataatttggccacaatggagcttcccaaattgttttccgaatgtctatggatgaataatcagcattataatagtcaatttttccaagattaagaaaaaaaaaacaacaattaaagagagcagtataaattagaattaaaattgtagcaagtgatagaagtattactggactgttcgggactccaagcatggcaagtgatgctctgagcgaactggtggaccgcgatcgccgccatgttcttgtcttatcgagggagcttttgctccaaaacacagatgttttgataaaaaaaaaaaaaagagagagagatctgagagaaagaaacctaaaattagatccaacagaggaatggccgtgctgtttaattgcttgattatcattagtataactatcgttccattttcattatgctttgcttgctttacgaattactaatcttcttgtgattcatttattttaatttccggtgttacggttagaaattggggataaaatgaataggtttccatcttatttttatacattagtaatgtaagactaactccaatacactctcttcatatttgggcctcacaaacggttttttggaccggtagcactttgggctcacaacagatcacaagtggctctgataccatgttaaaatttagggataaaatgaatggagtttcatct

SEQ ID NO: 49040 - DNA, 706 bp, Cannabis sativa
ctaaaaatgtttgaaaaacgtattaatgaaaacacccctagcagatataagattattataaatttatcttttccaccgactaaggctcccaagccaggccattattggctttgggtgtggctctggtcaagaaattttatgagtggtttggctttctccttttcctctgatggtgatcctggttcttaaggtcattttctagggtcgatgggttgtggagttggggttggtcggcgttggtctgttatgggtggtggccatctattgtgagtggtccgactttgtgagtttagatttggtgacctctggtagtggctggtggtttgatcttcttctttcgggtctgaatccagtgttttgggggttcgactatttcatttggggcttgggacttccccaatcattttgggggtttgggtctgcgacgacatattggttagtggtggtcgacgattggggttctattatgggcagggtggaggttgttggcttaagtggggatttggatctagaaattcttaaagagaaaatgagtgtattaggggtgttcatcaaaccgcttaaactgcctgtaccgcatcgtaccgcaaaaaaatgcggtttgaaattttttacgttgcagtcgtagtttctaaatcgcgcggtgcggttttgaattgttaatatgcggttcaaaccgcaccacacattataaaaataccaattt

SEQ ID NO: 49041 - DNA, 2141 bp, Cannabis sativa
aaattagtaacaatttgtatctaaataatatgttttaaatataaataattttttgttgtgattaaaaatcatattaattagttataaaaattttatgttgtgattgaaaatagtttttttttttttgttagttaatagccgacaagccattggaggggatgcatgatcatgaaagtaactacacaaaggttttagattggttcagtttagttttaaatttaaaaaattcttaaatactaactaatttaaatcagaaaaaaaaaataaaaaaattgggatgaaatcatgaacagtcttaattaatttgtatattttaacttcgttttttctcaccccaataatttaccacatggaatattggactggtatccttacgtacatggttgtcgatctgttgttgaaaagaatatgttttcacgtgattcattttatgaaactccttacgtcatcatatacgtaatctaaaaactccttagtgatcacctgagtgacataagatacattcattaattactacatcataattaacctatatacataattaatccattcctattactattaaccacctatatatagaaggattatgatgctttttcgaagttaatttacacctatacattgcttttcaaagtaagtttctcaattaattgttagatttttaggattaaaattctagtttaaataatggattaaagttttataggcggcaacatcagtttggttatttgaaggcttggttaattgtgtgttagtttgtgcatgtgtcttatagtttttagtcttattcgagagcgagaagaatttagtttgagggaatttattatgctatttttaacttatatttcgggtcactttttataattatttttcatctttattattatttttggaatagaattatgcttattttttttagtttcaggtttcacacttgaaatgtataaattggtcaaatatcgaaaaatgatctataaaataaagaaattttacaagaaaataaagtggaaacttcaagcttaaattcgactatattttgttcagattttagaaaaactcaaaacataaaagtttagatctcgttttcatctttccaacgtattttgaatcaactcatttggagtttgtatgtaaaagttatgcatattttactaaaagagatcgaagcaagaaatggaatcctggtcgcgacgagcccgtatatcataactgacgcaatgggtaaaaaaaaatttacaatttttccatatctatatttatgcttcattttataaccgacgcaataggtgaaaaaaagttatttcaacaatttatgtgtcattttagaaccaacggtataagtttttagtgactgtttggaaatgcaacgaataattttgcgtcattttcaaactgacgcagaagataaaaaagaagagtgtatattttgtgtcggtttttaaatgaagataattttttttcgcgttatttcaaaaacgacgctaataagaaactatttgcgattatggcaggaaattgacgcaaattctttaatgacactcaaaagctgatgggtattatactttttgtagtagtgatggcttaaagtcattcagccacgtgagaaagaatgtcactcgaccatatgaagaccaaagtcacttggccaaacatggcttgaagtcactcggccatgtgaagaactatggtcactcaaccatggtttaaataggtcactcgaccatgtcttcaactaggtcactcggccatggtttcaacctaggtcactcaaccatggacaatgcaaatcactcgaccatgtgtcaagtttgcgtacatcacttgtccatgcaacatgaaagtcacttgatcatggacaatgaaagtcactcggccctgtgccaagtttgcatgtcactcgacttgctcaagaccatgtcactcgacatgcacaaggataactcactcggcaagcatccaagtttcttgggcaagacttgcatgcaaatcacttggcaatgctcttctcaatataacaaaaaaattcttagtgaagttttcccaagtgttgaagacgaatgcagtggaggtacaatcacaaagaagagagtgttaggttatttttagtattaattttagattaagtttagtatatttttaat

SEQ ID NO: 49042 - DNA, 1218 bp, Cannabis sativa
  modified_base (1175)..(1178): a, c, t, g, unknown or other
gagccaagagaaagggaagcttggtaacacgcttacgatggtgaacaacactcaaagaattcaagagcttgagaaacgcgtaggggaattggatggactagacgagagggtcagggatctatcctctgaaggtcgtaattcgggacaaacagcggcacaacaacaacttaccatgttggctcaagattttgctaacttgttggccagggtagctgtgatcgagaggagagatgtcgttaccagaacatcagatgtgccttagatcgcatcagggtattagaacaaacaacaatagacatgcagactgctatcactggcgacaaaatgggtaggtcgcattacaagactccctcaatgatacaataaaagattgtcatacatttgtcgcagcactttaggaagagttagcgggaatgtcaacgaagttaaatcttttcatgatagtggcaaagcgggcaaataccagagggcatagaggtatggagcatggtcgcccgagagcacccgagcccaaatgctatggaggggcgagggatgagaagaagctccaaaaatttctatttgatagtaaaggtagcaatagctaccatgtatttatttggggacaccaagttgtggtggaagacgaagtacgaagacattcaaagtggcaagtgcactattgaaacatgggatgaccttaagaaagaattgaatgcccgattccttccaaaaaatctcgcttacttggctcgacgccagctgagagagttatagcaagttagaaaatctgataatatgtaaagaagttctctggattgatgctcaccattaacgacatgaacgaagtcgacatacttttctttttcctcgaaggactcaagacattagctaaataagagctgtagaggaagcttgtgtcagacctagccaccgctcaagctccaaccaagcggctgactgattacacctcaaggaattcacaggcaaagaagatgaatccgcaaaccaactcaaataatgtgaggagtaagaagtcagggaagcagtggcaaggtaaaagtgggggaggggacaagaggactcccgaatctagctcctcctctaagagtggtgctgctactgggaagaatccccttaagtgttggctttgtcaaggccaacacaaggcggctgcttgcccccaccagtccaannnnagtgccataaaggcatccattgctcaagaggagcaaggat

SEQ ID NO: 49043 - DNA, 1380 bp, Cannabis sativa
aaaaaaaaataataaatatttttacttttactccctctatcttttcgtcttctctttcttctagccatatgaacatttttcaaccatctatggcttatggtcatggtgactcgaatggagctgtgttatttcagcaacaattaaaaaaaatcagaataaagaatagccaaattgaagctctaaaattaagtttgattctcttttgggtattcttttttaagataattgttttgtaaatttttttggttgatcatgctttaattaaataaaataaaaacacttgttgctaactatcccataaataatgatgaccaaactaaatcatatataaaataaaattatttgcagaaaattacttcgaccttgtaaaagattttgtgaaacaaaaatttgttaaaacaataaataaaatcatttgtaggttccttttcaaatctaaaatgttcattatttcttcggttgaatctgacaacatagacaaagtgaagaagaggattgttgggattcatcgaaataatgaagggatacagaattagtttttttttggtattattttttattttttttatgtaaaaaacattttctttttattttttaatctttaaatgattgtttaaaataaaaaataaaaatgaatccacctggatcaatcataacgttctattgacctgacacttaacaattaggtacttacggaagttctaagaccctaaccgaaagtatttttatcgtaaaaaaaaatgagttagatatttaactacaactaagagttaaacttaaatattcatatcgtaaattactcttaaattcttatatgcattttattatgtctatcttcgaataaataagtttgttggatcaaaatctacgtcaaaaatatcactttatagattagttttcaatctccaaaaataacggtagtcttttcttttgtaaatgcgttagtacctaatttaacagttctattaagtgctgacaagaatatcacgtgtcaaaggtttattagtccacatcgtgatcttcggcccttgtctgtagtagccacatcgtcgaagcctcaccctcccactcttttcataagatcattccaatgcattctaatcaacccatgaatggtttgttaatttacagagttgcttaaggtgggagtggtgtaaagtaatggaatggagtcaaagagaaaaataggagttggttacttcactcatcgatgatcagcaaaggtgttagggctttaatttaatgggttcgaaagaaggagatgaaattaggaagacaattgtggaaattagtgttgtagtgaaacgatctatctttgaaggaggagattgtcgtttggagatgatgagatgatgtaaaactataaaatcaactacaaat

SEQ ID NO: 49044 - DNA, 1565 bp, Cannabis sativa
atttgcatcggaccatacgattgcaaacttagtttaaataaccatgcatcgactactcaataacttgcgcgaagttggtgctaatacaaattaaaaggggtatacaattatgaggagtgttggtatggttgcgttctcactaatgtcaattcattatgatttaattagactataacaaattaacaatactatttagtttggaaaaatggaaacgttcaccagaccaatgtgaaatgctaataactttggtttgaaatatgcatccttcctcacatggaatacctatcatttcatataaataaaagaagtagaatgatgacaacatacataactcccaagaatattaatattgaagtcaaaaataaaaatcgcaagaatgatagggttgtgctattattgtatatatatttccaatttcatgaataataataaagtttaattgaaaatgtacttgaggagattgcggggtctctaaagatatgaattattggcatgtacatgtatatgcgtggtgggccacattttgtctacgcttatctttccactacagtggaccagcggcaaggtagaccctagaccacccaacactttcatctataaatatattattattacaaatccacaaactggctacatattcagattttaggatagctttttccacagaagattttattggctattatcccactaacttacaatttagttgatttataccaattacagtttcgttcatgaactggaattaatgtaaatttatttcttgttacagttcgtttgtttccatggaaagtgatggtgtggaatggattcagtgggagtgatccaatgaacacaacacaccaatttcaggggagagggaaacaaaaagatgctgctaattacataattataggcgaaggacatccttaccagtttttccaaagttttgttgtctccaccatatatttaacttatttaacatgtccttccccaaaaaaacaaaccgtattgaacatgtgatttaatagtatgttttaactatttttttattaaaatattgaaattaaattttatttccaaccaaaaaggtttatttggtgttgtactaacactaaatatataattaatttataataattttaattaaatatatttataaatttagataattgtcttttaaatattaataaatattacataatgagtatgtattatcaataataatcaactacttatcatgttcatattattttttgatagttttgatgctttttacggtttttgtgcattttatgatttttgtgtcatttattatggtttgtctctatttattcagggtaattttatgtaaggtcattgggtaagagaattaatctattatatgctcataatttctacttcaaccattttttttttttacttttaacagataagtatttcaaatctttttaagtccttttctttaatattgattgatttaccatcatttttcactttatatttgtttttcattatattgtgttgtaattgagttttattttattattttgtaggttgttttgtggagggcctacaattacata

SEQ ID NO: 49045 - DNA, 948 bp, Cannabis sativa
  modified_base (307)..(308): a, c, t, g, unknown or other
tatatatctgatgcatgcattgcatgccttactgctaggtagctccatgcatataatatattaaagaaattgtaaaatcatttgtgtgtgtatataaaaatatgtatatccaaaataacattaggtgagatgtatagcatcatcaaatatgatatatcttactctaaactaattaaaaggaaaatatatatacataattgctacaaagaaaccgatgtgttatgttatatatgttatgatgtgatgtgatgggtatagctatttgacaatgatgacatatatgaatatttatttatatatatatatnnatatatatatatatttatagaaatcttggttgcaagtgatttgtacaggttttttatttttatttatttttttgatgtatatatagtttccttagcttggaaaaaaagcgaagtttcacccatcaaaccaccacccaaaaagaggtgaagtgagaacaagtacttaaggatatgattgttggtggtgtattcacatacacatacacatttatatatttatatataatcaaaattcaaaaggttttcttggtctttacttttctcaaacataaagttaataatgattttttgattttttgtgcatccaattactacttaagaaaatcatccattaatttattaaggaccttaatgatacatccatacgcttggggaagttgttgggaccatagaaagttcatttgagtattaacatttcttccttttttaaaatttatgtctttgaatttgatctttatggcgtattataatgagcttagactactaactaaaaaactttgacatgttagtgattaggtgtggtttgacggagctagatattgctagtgcaaatatcactcattacatgcctttgaactctctcatgcctcattcctatttcattcactacaaataaaaagaagacaaaaaaaaaaaaaaa

SEQ ID NO: 49046 - DNA, 1560 bp, Cannabis sativa
ttcggattcgatcatccaatgggagctctaacaattccctgcactgaagatgcttttatcaatcttgtttctagcttaaatgtctgatgatgagtatagattgatgataactactaacacaaatgattgttacaattttgtaaatggtaaagaatgtcaataccattaccatgtaaatatttttccttgaggactgaaatgaaaatgtccttgagaatgatacaaatgaaaatactaaagcttttcttcaatatattgttttatttgtgttaatttctttaaattaagatctagaatctctggccttcttattgatctgcaaaatagtatttagaatgtatatttttggattagttttaaaacaaacaattgatatacagataacattgactgaatagcaactggtataatgaaaaaatgtgtaaaaaaacaagtgaagaaaacttaccttgaatccattgaagcgtgtatcaatgtgtttaaatcttaggccactcttctccttctttatcataccattttttaacaaaggacattgatagagtaatctttcagctatttcccaaaataaacacaatttatcaaatgatctttattctgaaaaacaatcgtgaagttacaatatggagctttcaagaggttcgtctctccaaattcccaatcttttgagaggattagtctctccacaaagagtctgctcttatctaattccaggctaatctaaatgaggttgttccctctctatatataaacattggtcttaaaaagacttaggccaactagaattacaattggactaataaaattaaaacactaagacaactcggtctatgtacataaaagactataagtatttcatttaatcattttgtgctgcacaagataagccttaggaaacgagaaaacgaagtaggcagccctttttctggcaaggacctcggtcttttacagaaaactaaaaacaagggatgtatgggaaataagttgttgtaaggccttacataaacagagaagcttcctatttgagtgtcatccctcccagtctaaaagcgactcaaatactggacagttaacaaaactgttgtgttcttgggagtagagggaatatttgaccttcttgcatagcttcattactacatgaccaattgttcaataccaacatatttctaatctttaaccattgtgataaaactcatcacctatagagatcacactatcacatccatcaataatgaatgaaagctttgagaaaggctaggttgagacttgagtattaacaaagtgatgatactttattcatctcagttataaatttacatttatgagtaatgtgaaagtgatgtttctgattctaagttattcaaaaataaagggcagatagctatgaaattggcaaagacaaaaatattgattagaaaaagaaaaatggaattcaaccatagagacaacaagagtgttaatcaaatgaccagtaatttctcaactagtcaaaaaaaatccctttcttttccaagaaaaagggtgaaattgtatataatctacaaatttgttatatgtgaa

SEQ ID NO: 49047 - DNA, 2055 bp, Cannabis sativa
tatcgtgtttacaacttgagagcttaaactaatatggaatcaactaatgtggttgttgatgaatttaaagattttttagaatttttcacagaagccaagatagataaatttctggatgcaccaccagatgcagcaaatgtagattctaatgtagcagacttaaattctaaagaaacaaatgttgaatctgctgctgtacctgaaataggttaactaaaacattctgtctcgcttcatccaaacatcattattgattctactcagaaggaacccagcaccagagtaaaactcagtcatccaaaagatctcattcttggaaatcttaaagaaagcatgataacgagaaaaaggtatgtaaatttgattagttttctttgttttgtctcacaatttgtaccgaaaatgtgaaggaagccatgacttatgaagaatgggttaatgcaatgcaagaagaaattaatcagtttgttcaccacaaggtttggactttagtttgatgaccaaaaggtgttaatgagattggaacaaagtagatttttaaaaataaaagtaatgaattttgtacaattgtgaggaacaaggctcgattggtggcacaaggctatacacaggtagatggtattgactttgatgaaacctttgcttcatagaaataatagagtccattcgtttgctattgtgtattgcttgtgtacttgatatcaaattgtaccaaatggatgtgaagtcagcctttttaaatgggattttgagtgaggaattatatgttgagaaaccaaaattgaagattctcattttccagaccacgtatacaaattttaaaaaaaaaatttgtatggtctgaaataggctcctcgtgcctggtatgaaaggtttaactcaattttaatttctcatgattatcaaagaggtagtgtagacaagtctcttttcatcaaacacataaaattagattttatcattgctcaaacatatgttggtgatatagtatttgtatctacatctaaccatgaagtccaggtgtttgttaatcaaatgaaaaatgagtgtggtttgtgaacttacattctttttggggcttcaagtgagacaaatggaaggagaaacattcgtgtctcaaagtatgccaagaatgttgtcaaaaagtttggccttcaaacggttaaacaggtatgcactccaatgagcaccactttaaaattgacaaaagatgaacatggagtaaaggtagacactactctttatcgtagtatgattggtagtttattatatttaactgcttgtcgtcctgatattagttataatatgggtgtctgtgctcgatatcaaagtaatccaatggaatctcatgtttttgttgctaaaagtattattagatatgttaatagtactcatgactttggaatctggtattctaaagacactaattctagtctcgcttgctttagtgatgcagattggacaggtaatgtagatgatcataagagtactaatggaggttgtttctttcttggaaacaatttggtttcttggcatagtaagaaataaaattctatttcgttatatactgctgaggctgagtacatagctgttggtacctattatactcaattgttatggttgaaacaaatgttgattgattatggatttaaattgagtattttaacaattttttgtgataatactagtgccataaatatttctaaaaatcatattcaatattctcgaacaaaacacattgatataaggcatcatttattagagaacttgttgacattattacagttagaatacattgatactgaaaaacagttggctattattttcaccaaggccctaaactcatgtcgttttgactccttcaaaaaactttgggagtttgcattgtctatttttttttttttgttctcgagtttgtacaaaaagtttgagtagttcttttcttgcatcaatctttgtttcattcttggttgacaaaacatatttatgcttttggttaatttttagcttagtgtcttgtactcctcatacttttgaggttgtgttagaagattc

SEQ ID NO: 49048 - DNA, 2577 bp, Cannabis sativa
caattgagagtagtggaaggaaggggtttcgtaaaggcatctgcaagttgaaggttgctgctgacacgtatgagtcggatggtggagttggcaattttctcacgaatgaagtggcagtcgagctcaatgtgcttagttcgttcgtgaaaagtggggttgttagctatatggattgctgattggttgtcacagtaaataaaatctggttgttggttgtgcaatgtgaagatcggtgaggagatattggatccaagtcatctcactagtggttacagctaatgcacgatattcggccttagcagagcttttggacactgtggcttgcttctttgttttccaggaaatgaggcaatcgcctatgaagatgcagaagccggtggttgatcgacgagttgtgggacaggtggcccagtcaaaatctgagaagccgcgtagatgaagtgaagaatctgtggagtagaaaattcctttgccaggtgaaccttttaagtaacgaaggagatgatgaagggctgtcaaatgtggtgtccgagggcatgacatgaactgactaagggtgttgacagcaaacgtaatatctggccgtgagagagttaagtagagaaggcgaccgataagttgttgataattggaaggattatcgaggatgtctccttcagtgtcatctaatcgttgtcttggatccataggagctttagcaggcttgctgctagtgtacccggtgtcatgaagaagttgtagggtgtactttcattgggacaaaaagagacctgtcttggctcgggcaatttcaaacccaaggaaatacttgaggggacccaaagttttgagtctaaatctggcctgtagggagtcttgtagagcttgaagaatgtcaatgttggggccagctatgatgatatcgtctacatagacgagaagagcaataaaggtattctgcgatccttttgtgaaaagtgtgtagtcagcttgggattgagtgaatccttcttgcaagagggcgtcagtgagcttgttataccattgccgtgaggattggcgaaggccataaattgatttgtgtagcttgcaaacaaggttgttccctgtgacagaggatggaattttaagaccttgtgggatttgcatataaaccttctcttctaaatctccatttagaaaccgttgttgatgtcgagttgtaatgcgtgccattattttttggtgacaatggcaaggagaagcttaaaggtaaccattttagctacgggggagaaggtgtcgaagaagtccaatccctcttgttgagtgtaaccttgagcgactaatcaggctttgagacgttccacactaccatcgctgttgtactttattttatatacccaacggcaccctatagcgcgtttgttaggtggaaggggcaccactgtccaagtgttgttggtaatgagagctaagagttcatcatccatagcttgtagtcatcgtttgaattggaacgcttgcttgtaattctgaggttcaaatcggctgtaactgcaaggatgaatactttataagttttggagagtttagaatatgaaataaactttgaaatgggataagtagtattagatttatcctgtagtaaattatagcattcaaaatcttgtaaataactaggtggttttgaaactctagtagatcttcttagtaaggcagcaggtggagatggtgaattctgctggtgctgagttgcaggggggtctgcaatatgttcctggtggtttggagttgtagaatgttctgcagtgggtgtttcttgagtgcgatcgagttcgtcctgcaaaaaagagttaggagaaacaacacaagtatctggtgcgttataatcagtgatgtgtgtgtgtgagtaacatgtgtattaggaaggacaagaggtgtgaacgggtcaacagtatgaggattagtattaagtttgtgaaaagggtagacactttcgtaaaataccacatttcttgaaacaaagatctgtttattgtttaagtcatacaatttatatcctttgatacctcttggatagccaagaaaaacacatgtcattgctcttggttcgaatttagttctgtgtgaagtgatagttgaagcaaaagccagacatccaaaacattttagatcactgtaattgggtttcttaccaaataaaatttcataaggcgtccgtttttgtaggtttggtgtaggagtgcgattaattaagaaaaaatccattaataggcactcagtccagtatttgataggaactcttgactggaaaaacaatgatttagcaacattaaggaggtgctaatgttttctctcagcaatagcgttttgttcgggagtttcaatgcaagtaaaatcatgcaatatcccatgtttagcgaacaagtctttgaatgtaagctcaggagcattgtcagacctgaaccgtttaaaaatgcaattgtattgagtttgcaaataagaaataaactcatgtattattgaaagtacatcagatttttggttgaggagataaacccaagtgaatctcgagtggtcatcaaataagtcaaaaatatctgtggttagagtgag

SEQ ID NO: 49049 - DNA, 1189 bp, Cannabis sativa
agtttgctccttttaaaaatgacaagtgttaaaatattattgatataaattataattttaattataaataattttaaaaataaaaaattattgaaaaataaaaaataaattaaaaagttatttttttttacacttttctctttcccatcgtttcttcgtcttcttcttagtttttttttttttttttcattccattatgaacagaatacaatatatagttgaagatggaaatgcctaatacaattaagcttagtatcatttatccaagaaaatgtggacaatcaatgaaaatttacataaagtttcttttatcagttaatctttgggctcaggtagaactttggatccctgaaaaacctaaaaatcacacctgccttttcagtcaatagattagtgtctggaaatatcttcgatcaaaccaatagcttgattaagcgcatttgtgtcatggctagagaaatcaatcctcttattgtttggaatttcaacccctccaacacgagcacatttcaagcttagaccaccggagatccaccgcgcctagtgcccatctaatggagagacacgaagaaaccaacaatgagatctagaagatctttatgtgtagatcccgtttctgaaagttattttactcaacaggtcgtagacgcgactagatcggaggcaaaagtttcggctttgacgagatctgaacaatgacagaacagcgaggggagcttcaagaacctcaaggctcggggtttggaaactcgacaaaggccatggcggccttgactcaagaggacgacgactaaatacgattcctcgtggtggtgcgatggagactcacgacggagagaggcgagaaaagtggacaacggctagatacggctcgtcgtggtggtgcgatggaccctcatatttgggtttcaacaaacgggaaggcctctattttctacgacaaggcttcgtcagtaactgaagatgaagaagacgtgaggttccatggttggagatgaagaagacagggaagaaaattaaaagaaacgaagagaagaaaaaaaaaaacaaaatattttttttttttattttttaatgacttttttatttttaaaattatttttaattaaaattataatttagaccaataatattttaacacctgtcatttttaaaatgagcaaactgatccgttaacttagggactaac

SEQ ID NO: 49050 - DNA, 4090 bp, Cannabis sativa
ccagactcgaaccctggacccgaattcggatcccgaacccagtcctagagctaggccaggacccccgaacctcgaccctgaactcgtccccagacttggacctagactaaggcctgatttaaataaaataaaaaaaaataaaaatttaactaacaaactggctcagatgggcaacaggcaaaggataggactgaatgggcggtagaggaacgaacttagacggctaggatgggtccttcgcgcggttgggacgcgattggcttcgcatagttaaaaagagaaaatggatgctcctttaatgactgatttattaatactctcaacaattacaaaggaagaaatgaatgttgctatttattcacagattaaagtagggatgtaaaaggaataaatgggattctatagcagaatatacaatcatacaaaaaggggaaaatatcccacaaaattgggaaaagttgtaacccgaattagagctgttaaagtagtacgaatattctattccaatgctagctgtcgtgatagtgaccctcattaaattctattatgtctatcctctcatccaattctgttatggtgattttctcatcttcaacaggcccctcaagctgggctgtggagagtgagaaacaacaagattgtttttaagataatgaaattgtgcgatgctaagaggttttgtgagtatgtctgtgatttgctcttatgttggcacataccttactttgacttccttgttcaattccttttttctaatgaagtgcacatctattaaaatatgttttgttctagaatggaacatggggttggatgcaagttgccgtgcaccagtattatcgcactagagaacagctggttcagagccttttatgccaattttagtgagtaacgattgtaatcagaccacatcagtataggcttgggctaaagctctattctttccttcgatactcgaatgaacaacagactttcgcttgccagagctccaactgactagattattgccaaagtaaatacaaaaccctatagtggattttctattgtctaattagcttgcgcagtctgagtcacagtaaccttcaatgactagtttggaagctctattgaatgtaattccctctccaattgagccagcaagatatcttaagattttcttgcaagcactctaatgattttgagtaggggcttgtagaaattgacttagtttattaactgaataagcaatgttaggccggctgagagtgagatattggagcgctcccatgacactcccaaagatggctggatgttcaaatttaacgatgtcttgtaatctcagtttgttgctttggttcattggaatgggacatggtttagcattgatcatattggttttcttgagaaggtcaaggggtatttggtttgagataagtgcaatgtatcatgccccatactgatctcaaaacctagaaagtaatggatggaaccgagagacttgagggcaaaaaggctttgaagtttggcaataatggcagtgacttgagatgcattgtttcctattaagtgtatatcatctacgtatattatgacaaaaaggaaggcatcaccgtggtggtaaaataatagagaactgtcaaaggaggagttgcaaaaactaagagcaagaagagagcttttcaatttatcgaacaaagcacgtggggcctgcttgaggccatacagagttttgttgagtttgtagatagctgtgagattggtagggtcaacgtaccctgcaagctgttccataaatacttcctcatgaagattgccattgaggaatgcattatttatgtcgatttgttgaatgtcccagttgttagtgataacaagtgagaggataacacgaatggtgaagggcttaacaacaggactaaatgtttcaaagaaataaattcttggctattgttaaaatcctttggccacaagacgagctttgaggcgactgacgaacccatcagcattgtatttgatacgatacacccatttatttgagatgatatgcatgtgaggttggcatcgaacaagaatccatgtctttttctttttaaggtgaatgtttttatcatccatggcagcaaaccattgagggaaacgaagtgcttgataaaggcaatcgggtgtagtgtcaaccagtagtatagatgtagtggtgagaaaaagtttgggtttgtagatatcagctttggagcgggtgatcatgaggtggtgagtgatgttggagggtgtaggaattggcgaagaagatagagaaggtgagctatgttgaggaattggtgaggtagaaataggtaggaaatctcatgtgggagaatggagtatcagtgtgctgagtttggagttttaccttgattagtggaggatgttgagccaaaggatgatgatggagaagatagcaagggagtgctgaatcatggtttgtggctgctaaggaggattaacttcaacatggtcctgcaaagatggagaaaaacaaggaaaccaatggctatatgggattgggttagagcatgtattaatttcagaatttttaaaattagaggtgcaaaatctattggaaaaagggaagtcaatttcattgaaggtgacactttggagagtgtatatatagccacaggggtgtaaacatttgtaccctttgtggtctggactatagccgagaaagacacgcttagtggatcgaaaatcaaatttgtgttaattgtagtcacaaaggtgaggaaaagtggcacaaccaaagactctaagaaagtttaattgaggcttgagtttgaataagacttcaataggagatttattatccaatgtgagagttaagaggtggttgataagaaaggtggcagtgctaaaggcttcccaccagtaatgcaatggtatagatgcttgatgaaggagtgtaaggcccatttcgactatgtggtggtgtttttgttcgaattatccattttgaggatgtgtgtggggacatgggtgactgaagtaaattcctagagagttcaagaatggcacaagacttcgatactctcctccccagtctgagtggagagtcttgatttttgaatcaaaccttcgttcagcaaagttttgaaactaaataaaagtttctttgacatctgacttgagtttaagggggtaaattcatgtaaagttattgtattcatctataaaatgtagataatatcttaagccatatctagaaaggattggtgatgcaccccacacatcagagtaaatggtttcaagtggtttactggctgattttgcaaattaaagagtgatagtatttatgtttagacttgcccacatgataggcatcacaaaattttggagaaactttaaacaaaactttttcattgattaacatatttttcattacatttaagcttggatgattaagcatcatatgccatacatttacattagtaatgttggtagactggacaaacaaggattgagcaggatgaaagtgctcatttgattgactcttacaaaaagacactaagttaggactctgcttggaaacgactgagttaagactcttcttggaaactataaaacattgagatggattttttggtggattgaggtggtttgatgaagacttggacagctgaagttggtaaagaccatgattaagcactcctcgagctagctccctcctcgtgaccagatccttaatgacacaatcaaaacaaaattttacaaaaacaacattatcatgggttcgttgagatatagacggtaggtttttagttatttgaggcacacaaaagatattatttaacaaaagattggaggcattattaattgtcaaaatatgctgaccaatttcagttattgtaaggggttccccattaccaataatgagtttagtagtacctttgtgtttagacttgttctgcaggttttggccatcagaggtaatctgattggttgcctcactgtctatataccatgagttgtcttgatgagcatcaccagtggaagagtaaaatgcatgttaattttggccagatgaaggttggctgccagagaagttagagttagtttgattggagcatggtgtaggggc

SEQ ID NO: 49051 - DNA, 1600 bp, Cannabis sativa
tataaatgttaattctgccgtgtggcagtaaaattgaaaacaattaccccaaatgcagtatttttgtaaaatgcccaaaaaaatccctatgtactcatttatttcagagataaatgttgcttcaaatgtgtaaccattttgttgccaaagatgaactacataagaatttttaccactaaaaaattatataagaatttaagtgcaataaaagaaactacataagaatttttaccactaaaaaaattatataaagatttaagtataactaagtggattacataaaaaaatttgcagaaatttcctacatatatatacaccaatattataagtaatgaaatttacttatacatgtataataataaaaattaaaaataaaaaaaaaaactgcgatgatttagaagaaaaattcttgcaaaattattgtggaaaacagttttacttagaaaatgtctttttaattggaagattacttataacacaagttacaagttaatttcctatttaattaataccaataggatggagaatatatttggattgcatgcaaaggaaatatatagtataacttattaggaggaaatttatttaacgtaggacaccattattctcagtatattattttttcattgagtgatgttagaggcatattttgacatctaaaatttaaacaattattatatgtattccaaactgtatatttcgagaaatttactaattaagaaaattatatgtaaatattatatcacaaccattcatgtatatttgtatttttcttaatagaggatgaggtgttctcccaaaataattgtattgtatagggttcatttggtacactgtgttgtattttattgtattatattatattggattgtattattttgtattagtattatttaatatacaatactatgtttggtattgacttgtattgataggttataattataatattatatttaccataaactcgactccaacctcgatcctgaccttggacccaagttcagggtccacgtctgagtccaagtttggatccggagctaggtctgggttccgagtctaaggtcagagttcgagttcaagtttggatttggtgtctaatatcagggtccagggttcgggtttagggtttggatctaatgtctgggtccaaagtccaaggttgggaccttggatttgggtcttgggttcggggctaaaattctgggtttgggtcttgggtttggggtcggatgctgggtctggtactcggggtcagggtacaggtctaggtctgcatccaaggtcccaagccaggtctaggtctgaggtccagggtccaggtctaaggctcggggtcggcaccaggtccaaatttagggctagggccaggtccaggtctaggttcaaggcgaaggccaggtccaggtttggggttggggtcggtgccaggtccaagttcggggccagtgtctggggctagggtccgaatctgaggccagagttgggtctagagttgggtccgagtttagggcccataaaaaacaatttttcatggaattatttaggaaatgacaagcactactcaatcttttctttttattccagcaaaaaaaaaaaa

SEQ ID NO: 49052 - DNA, 2113 bp, Cannabis sativa
agatattaaagtagttgagagattccctcataactatctatatctaaagttggttatagatatttatttaatcaattaaatatgatttaaagagatttaactactttaaatagaagcccgatttagaaatcaaaacacacttctcacttcctagaacactgtaattttcaaaattgtagagaaaaaataaaattgatttttctctcaatttttttcttgctcatgtgttgagaactcaagaacaaagttatacactttatcctaataactcacactatttcttgtgtgtggtgaaatgatttggaagatactggtgtgagtctaattgcatcatcctcatcatccaaattaagggatataacatacgagaagttttgagaataccgtgataagcttcaagaggtatattctaaacttactatttattattttgatttaatgtacacacatctggagatccattgggatatgatacaatgataataagataatatgaaactcttccgctatgtatctgatttagtaccataaatcaacacaaatgagattctttgggagccaaaacatggccctaaggccccagtgcccaagttgacatgggtgctgggccctgcacccaggttggcgtacaacgtggtttgcatgtttttgctcctcaaacacaaattcttctccagaaattcttcttatttttgtcaaaaacggggtaggagacatcattcacaatctcgaatgccatagaagtatcaaaatgaacctcgagaagtcctccatagagcacccaatgcctaggttgagatatggcctagtgcactgggttctgcttatctgatttcagtttcatctcgagcatctaattattttttcatagtaaatgagagctacgttttatgacaggtcaaattcacactttagtattttaccttttcggcaatgtgaaatatcagtaaattagctgcaaattggaagtttcgagtctacccaattaggtgaaagcgatctaacgtatgtgattcaagctctaaaaattgactttcatcaacaatcaattttagccattagatcaatgatcgatggtcaagatcagcccagagtgatttttttatatttttttgtattattttaatggacctccttccttatgaaaggagaggtccactagcttatttttcacattcaactaagtccccataaggttagactatctctctctactttctcactctagaaatcttacctctttcctttgtcaatttcttgtaattctcatgagaaataaaaactcaaagtagacgtagctctattattatttcgattttggagtgaactactataaattttatgtatctttctttaatatttacttaactcattattcattttatcaatctagcgacttaattttagtcctttttcagcatcaaggtaagattgtggaataaatatatctactcatactttctaactgttgtcaagccttacccatacatattatataccaaatatatatgtacaagtaatcatgatgatcttcctaaattatttgagttagaaagactaccaactctcttttgtattacttcctcgtgcatcacaagacaagattaaaaaaatgtggagagacaagaaagtcgttcaattttgtcaaaaagatacatgaaaatctttgcacatggtatgttttaattttaagaaattaatcctaactattaataccataaaattagatgaatctaattacaccaattgtttgtttattttcctttttaggtcacatctaattttatgtattttgtattattaataatatttttctttctattgagagccttgtaacagcaatttttattgtcaatgagtaaaatatttagttatcgtttggtgcaatttttaacaaagttaaaaattatttttaaaagaaattgtgataaaaaagtatatgttaagcaattaaaaaataacttattgaggaatttatagagaaactacacctaaaaactaaagtaggtacaacctgacttttagaaaaaaaaaaaattgttttaattaaaaactctataataaattattttatattaaaaatgtatttaattatttattatatattacaaaa

SEQ ID NO: 49053 - DNA, 1365 bp, Cannabis sativa
catagaacaataaagacaaaaagaagttgacagatttatgacacgagatgaatgcaaatttagtttatttgtcactattggaattgcataaatctaagaccaaaatttcaaaaaataatgttaatgcaacaattagaaaaaaaaaatgaattatacatgatttggattgatcgggaactcgagatctgtttcttaaaaatctacatcttattgatctgtaaattgaattgggaggattagttgtatagaatttgaaagacttttcagggttgagtttaatttcaaattagttttttatgcaaaaacttccatcaatcggtaatggttgattcttggttcgatactttattcttatcatgtgaatttaccagaattaacagtgtatcttaatctaccagtgtcgattcatcattgcgatcctccttcaatcgcaggttgtctctggttctctagtgcgtggaatgtgcagcttcaaaattagagtaagaggtatttttgttaacttttgtttggttgggatgtataaatgttgattaagacagcccataatatatttgtaatattatctcttttttgggttataatagaaaaaaaactttacaattaataccacattatactagttttaaagattgacattatatatttatatatatgttgacctcagattgatcaactgatagtaaagctttatttataattgacaatcaccacatgtaaatgataaaaaaaaaataaagagattgacacaacgatttacagaggttcaacccccttattttacgagtaatgacttactcccccctttagttgtattgattctagagataacactacgcagattataggtttttaccttgtaatttctaactatgactctttttgaatgtcacaatggtaagaactgagtgcatgacagattctgaacaagtgagatgagaaaacaaactaagtgtctagtgcttaggagatcatgtgagagagagagaatgagagtgctctagggtttctaggacttagcattcaggttccttttcacttagcataatgctttttatatagtttaaacttacaaaaaaatctatattcaaataagctaatatcactcaaaaataggagatattactcttttatcatatatttaagttacaaaaataactaactaatattcctaaaagatagatagatagtttgagactgaatccctattttcgtaggttgttggagttttctcgtagctgaaaccgagttgtaacctatccaggatgatggtcgtggaccccatgttggaacttattttactaggatcttagatatactcacaagtatgttgtttaacaccctagatatgaactttctaaaacg

SEQ ID NO: 49054 - DNA, 1010 bp, Cannabis sativa
tagttcattagcttgataaaataatttttgttcattcttttggtttgatttttttattaggaacaaagacaaagcaagcatggtgttctctttgttggaaataaaatcaaggtttatttttattttgcacatgtttattatataaaaaaaggtgaccgattgtaatgagttttcttaaaaataactatatttttttgtttagttttattattttcatagtcatttttttgctcaaaaaagtgttgtttgatgttatatgtgtttgtaagttatttttcttctcatttttttattcgatttttttaaaaaaggggcatccattgaaaaattcaagaaaaaaggaggcatatttttgtggattttgttatttttgagaagttttttttcttttattatttcatttgttttatggaaacatatttttattacatattttctgtttctttttatctttttttttgtttcgtctttggatggtaagatttctttctttaatttatgattttgtggagatttacatttattctccttgtgtgggtttaggaatcatgtgcttttaattaaattattattgttgatttcctttttcatgacattttttgtataaggcaaagtttttgggtaagtgcatttttctttttttaattttgtggggttgagtttttatttctttttttatttttggtaacctttgaaaaaaatttgaaaaatctttgtgtttccttttttaaggcacaggtggtgctcaaggtaagatggtaaagtttccattatttcttattttaatttttgagtctttatttcctattgctatatatatatatatatatatctaatctcttcaccccacattaccataatctcctctatctagccacttctctctttcttttcgttctaaaaattgatcttttttagtcaagagagattttttttagggttttaaatatcaatggctaaaaccaagaatgctcaaccatccaagaagcttcttcatgcttcttcctcta

SEQ ID NO: 49055 - DNA, 1166 bp, Cannabis sativa
attttgtagcagtggctctctcttgatctgatagaataatctcagtcctgtaaaagtgagatattttttttaattagatagtaaaattaattataaaaactctaatttttctaataatacttggataatatctattaaaagtaatatataaatataaataatattatatcactaagctatatattgattttttttttaaagaagctatatattgattactattagataagtctctcatgtataaaaataatcacaacaatatctttcatgaaatttgagaatgagctctttgaaaagagacttgcgagaaaagctagcgaatacaatatactctatgagagaacgagttgcatttttttcaaaaagaaaaaatacattactttcattattttaggaaaagaaaaagaaattgtaaaaagacaagaaagaaacggccatagattgaatcaccacaaccgcataacgccctgtattaaaacgaaatccatataatgaagacgatgagataaaattggcaaatataaagttaattaggatcacccaacaaaaaaagcgtgaccataaaaaatttagttcaaaccaaattgtatgataaagtttgatctcgagaaggtcaatgattctaattctatagaatgggtctttggggaagaaatgatggttaccttgaattttctctcaaagttcattcaactaacatggtatgcatccgaactcttaaatttaacttattactatggtttatttgaagctaagagaggtgtcccctttaatttttgtcctatgcatggaatatctgtctcgaattctagctaaagtggagaggaaaataaattttaaatttcatgacaggtgctcagaaatgaaactcaatcatctatgctttgttgacgatgtaatactgttttgtcatggagattttaaatctatttactatcttttacaaggacttaaatcgttttcaaaatcacgtggattatttccaaataaattgaaatcgaccttgtattgatgtatatgaaagaaagggagattcaaagaattgttgaggctttggagtttgttagaagtgaactttcctttatataccggggaataccgatttgtgcaagaagattatcggctctagaatgtgaaataatagtggaaaagatggttcagagata

SEQ ID NO: 49056 - DNA, 856 bp, Cannabis sativa
agagagagagagagagagcgagctcgagagatctaggacaagagggagaatcaggctttggcatccggttggacaactgctgtcggagatgttaagtcagcgccgcacacgacaaggtagagagagagtgcgacaaatagtgtttcagctggtaaagttagggctttttaattttaattttttattttaactttttttaaaaaaaaaaattaaaattggttggtttttggttgccaattgacaacatcggggctggggtaggggtggctagggttggctggcagtcgagatatggttggggtcggcttggtacactgggaaattggaggaggtttagaagaagaagaagcaaaaaagaaaaaaaaaatatttatgattttaaaatatatttttcagttttttattttattttaaattattaattaaaattattatttggaccaataaaaaattgacatgtggttttttatttgtgtttaacggattagttagaaagaggaactaacagacttatagaaaacgtgaccttgaagactattaccgccaatttttaaagttggagacaaatctgtatcaaccataagtttttggagattttttctccagatatccctaaataatattataacattgttatcattaatcacaatcttaataattcacaatattttaaaatttataatttactaaacacttaccgcaagttttttctacagctcatttgcagcaatttttccttccagcacaactatagttaattttttccacaacataattgtgccaaactcgatctacactaaaaaaaattatttttaaaagtgaaaaaattgtgaccaattataaattattattctta

SEQ ID NO: 49057 - DNA, 1158 bp, Cannabis sativa
agtggatcgatttgcggcaaaagtgttggcaaatctttctttttgcccaaaatccttctagttttgggtttgatgttaatttctgtcatctctcttcctgcgttgttcccgacttccaatctaaaacaagtaccttttgagagttctcgtatttagatagttagtctagtggggacttctccaatcagtttatggaggaggacccccaactccctttctatgctaggtagtttgggtggctaactgcttggattttcttctttttgtacagaaactatgcctaagcctccctatcgaaaagaggttgactcagaggaggaagcaatggagcaccaagaggctcccaagttggtcctgaacgacagtctatgggaattagaccagtacgccaatctattcaggaactacaagaatttgaggaagtacgagaccctacgtagactcaaaagtgttctaggactgttctgaaatagactctccatactcggtaagaggcccaacaggtacgcagaaggaggcttcggcatttggagctgagctcacattgaaatggggcacatctacccttaatgtgtaattttgctgagttctgtgctgtagccagaatagcacttttctagcttattccacaggtgtacaacttattatctgagtggtacgtcttttgtgtttaacatggaaaattcatgccgacactggaataaaccttgtacttctataagattaagtcccaaccagtgagaggtcacaaggagaatgtgggcttctacaggttggaacgatacagcatgagtattccctaccccaccagttccatgaaatacacgcatgacttcaatgactactatttcttcacttccagcttcccgttgaagagagtttctacccttagtctggattttaatcttgcaaataagtctcatcctttcctttggatcttaaagttctatttttcctcatgtctactgtaatatgatcccttactttttatatttgctagacttccttccccatttacctctgactccggagttggaagataggatagatttttacaagtccttctcatacaaggagctacaagtagagaaacttgtgaccacagagaacctctgggaggtgggtcttatcgccccacatatggatgtggctcatctt

SEQ ID NO: 49058 - DNA, 1047 bp, Cannabis sativa
  modified_base (49)..(50): a, c, t, g, unknown or other
tcaaatctcttaaattgataactcatcagattgtaatgggttttatttnnggcataaaacccaacaaatacaatagtagcaagttctaaaccatgtgtcgggtagtgcatctcatactccttcaactgacaagaatcataagcaatgaccctatcagcttgcactagaatacatcccataacttgtatggatgcatcatagtacaccataagtttctcttgatctgatgacaaagctaacactagagacgaaatcaatcgatgctttaattcttgaacacttgtttcgcacttgtcagaccataaaaattgttgattcttcttagtcaattcttttaacgcatggaaatctaagaagacccttccaaaaaacgtcgctaatatctcgccaatccaagaacacttcaaacctcaataattgtcttttgccttgactaattcttaattgattcaatttttctcggatcaaccataattctatcctgtctgacaatatgtccttggaaggacacttgtggtaaccaaaaattacatttcttaaaccttgcatacaacttgtgatctctaagtcgtagaaaaaccattgaaagatgttgctcgttatttgcttctaactgagactatacaaggatatcattcataaggactataacacaattattgagaaaatccttgaagaccctattgataaggtccataaaggctgccagataatttttcaacccaaatgacatcaccaagaactcataataaccataccttgtgcagaatacagttttcagaatgtctttctcctgaattctcaactgataataccctgagcgcaaatcaatcttgaagaaaacttttttttccttgaagctgatcgaacaagtcatcgattctcggcaaaggatacttattcttaactgtcagctttttcaattcccagtaatcaatgcacatccaaaaggatccattcttctttttcacaaataaaaccaaagctccctagggcgacacactgggttggtaaaccctagatagagcatcccctgaaaaatgtatt

SEQ ID NO: 49059 - DNA, 2018 bp, Cannabis sativa
ttcaattattaattgtattacttttaaataaagtaaaaaatacctaacataaaatttaatatacgtgtctcgcacataactttttactagtaaaaatatatatctatatctactgatttgtatattgaagtataagtgtttttttagtttagatttgtaattgtgtatatcattcattcaaaattaacatattcaataaataaataaaatttcagttttttctaattttgacatttaatttcttccaatttttttaatattgattatttgaatggagcttgattatttatataggagagtataagtagaaggatttactttttcctttatgtgggacacaaatatttagtattaattaattaatttgattgtatgtagcttatgattaaaatgggattgtttaggtaattgctattatgtttttttttttttattgttaattaagtcattttattaaaaaaaccaaacaaactagtacaaacccattgccacagagggggcaatatcccattgtgtaaaagcttaagaactgtagctttgatctcagaatactatgacattgtgtaaaaattgatgatgtatccacagatactgatgtactatcaccaataaacaaagcttcatcttctaaactgtttatttcaacccacttggatcgatcaaatttaagtttgaaaagtttaaaagcttttgtcatccattttgcttgttttttttaacaaggcaatactaattgtggttgcaaagttattaaggaattgtctaaatcccatctggtgagttctagtgtaggttatttgtagctcttcggtacagagtatttgactatatagtcaaattttaaagattgttggcctaatagaccgatatttttgtcacccttttctagctttcgtttgagtcactttcttggagtgggacgtcgtgaggactcatcatcatctagacaatttttgcagttacaaacatcccagtatttatgcttgtttgaggatttaaaaacatatattagctttcattgggaatcgaaatccttgatctctgcatttgttggctggatgggtgtgatgacatattgggtgcaaaaacagttacgtaattttgtttggcttctttcaaaaataatttcaacagaatcatcttcttttggagccttaaaagatagtttaataagtgttttaatagatctagtataagagaaaagagtcttaataaagtaaagtattatcattattattatttaatttaatgaaacacatatttttctttttgtctaatttattttttctctccataccataatattagtattttaacaattttcatagcagtaggcttgaatggaagctatgaaatctaatcaaatattattaatcgtcaatcatgtatattaaaagcagtgttaaaatctaggacacatcacaatattcaaatcagaaaaactaaaatcttatccaatacataaaatgtttcaaaaaaatgtaaagtaaaataaaaattaagggaatggacactagtccattagctatagtgaagggtttaagctcaactttaatttgggaaaacattttgttaagagacaacaattcttgttggccatgatccgagcttcactactctctttattgaatatagttgagactagaaatagaatagtatatgtatttctgaatatgcagaataggtgtcatatatgcaagaattgagtgttgatataaatatatatatatatacatatatatatatataaaactctttgaattatcatctttcaactaatgtttattgaattttactcttttaattatcatactcgagcaagaaagtaaaaaaaatcagcaatatacaatataaagaggcataccaaagctctaagtgtctagaagctatgaaaaaagagataagcacgctaaaaagaatcagacttgagagatggtgcaaaagtcgaaagaagtgaaacccattttgtacaaatgggcctacaaggtaaaaacttatcatgatggttcaattgagag

SEQ ID NO: 49060 - DNA, 1763 bp, Cannabis sativa
aaaggcttttccacttacccattactggttaaataattcttttcaatatacatgcaccattctctccaatattaacattaattgacctttcatgctcgtaatggtgggtctcttcaattaatttttaagctagtaaggattttttcttttaaactttgatatttattaaattatgtcatttgaacattttaagcgattaaaaatttctccaaaattattgagattgttagattcaaggacctttatctaactttactaatggaagtctgacattgatgaaaattcaagagacataatttggtgcatgtcaaagttcgcaaaacacaatttagtacatataaaaatttgagaagtacgatttggtacaaagaatattattatattagtaaaattaaacgaaattagacagaagttcttaaatatatctatcaatttcaacaattcaagagaattgcctgaaaaattcaaagacatgtcaaagttcgaagacaaaaattttaattatatatgatggtgataattcacgtaaaaaccacctttattatatagttgctataagtactattgatgttgtgtaaattcctttataggcttaagtttaattacattaggacataaaattacaagcttgcctaatggccgaaaccaatacaaactctcaaactgtttttcaattacaacaaactaacagaaatggattacaagaagaagaagaaaatacagctcaacaactaaactccctaactactgcaactacttctacaacctataaatacacaaatcatgttgagaagaactacttgaagccattttatctcctgcgagttgagttagaaagaagctccttgaagctcagttgtaaccacatacaaagaaagaaaagaaacaagagattagtaagaaattgagaaagaaaaacaaagagaagatcgaaaaaaatttcaaccaaaagaaattgtggtttgaaatttaaaaagcaaacacttgtatttacatgttgaatagtgaagatcaagttactctaaggagagcttgacggagacgtagcccatttctagagtgacctttgagatcaactttgtgtcttcattttttctctatttgtttctctctaaccttaaatatttttgtgttgttgtgcgtgtatgatggtgttcttgattttatgtgtgatttgatttttggattgtgagtgtgtgcgatgtgttagtttttttttttttttttttttgtgcttgaaaccctagggtttcctcttggaaaagaagaagaagcttctagattgaatctcaaggagtccgagtacattagattttttgttagttttgcaattgggttggaccgagtgtattggacttttcttgttttgatgtttaccaatgtttcatggacgcttgatatatttgcaaaaataccataatatgtcaattgtgtagtaatttttatttttagtgttgggagctattgattctaagagtagtatcggagctggtttttccgcaagaatcaaaatacaaactaatatagtttacaagcaagactggaagaaattaacaatgaagaataggagtaaattgatcctcaagaacaagagagattgaatccacaagaagatattttgacattggagatttagtggatgtgccattgaaagatcaacctagaattcgtaatcttatctctaatttaaattttaatagaattaatatgaggaaagcaaaggattgttgggctttgtgcccttaataaaactcatttcaata

SEQ ID NO: 49061 - DNA, 1108 bp, Cannabis sativa
acaactttcaatcataaacctaataaaccgcattgtaaaaaccgaaaaccctacaacaaatcccctctcagattaccctcaattcccatacgaacaaaacaaaaacagatcataaacaacaagaaccctaaaaaacacatcgaagaaactaaaagcaaacaactttaaacatatataaagagagaaaagagagttacatgatgggaacgctggtagagatctcaggccagaaattatcgaccaaattgttgagattagatagggcgtggagcttgagtagaggatggctttcgttgagcatagccaaaaggccacccgccgagctcaccgtagtcgccataaccaccaccgaaggtgtaatcggatcgattggtgaggagctagggtttcgattgaaagctctctggtaatttctagggttggggtttttgcagagagcggaattcgaaaaatgagagtgaagagagagaagagaaagtaaaagagaaaatgactcaaaaaattggggatatacttgtttcttagtattgggtttcctttgctttccttacttacccaacaagttaaaaccaaaaccaaaaccaaaaaaaatatagatataatttgcggcttaaatacttaagtttaaatttcgattaattgtgatgttgcaattttttttaattgattttattttagtttgttttgtcaaatgatttggaaattaaatgggtgattatttggctcgtttttctaattgatcgtgttttcaataagtgtgatgtattaaatctattgattgaattgtaaattattattttagatgatttttattaataaaatttcataatttatttaaaaaaaatagttgctgataagtacataagtttaacttttttacaataaagttatatttctagaatttttgtaagtatcggatcgttaagtaagttattatttacgtgttatttttttattagtatgtttaaattaatttttaaataaaatttaatgatcggaccgatcaagtactatcatgtggtcattgacttaacacttaacgactaggtacttgtagaagttctaaatattattatcgttaacgattaaatgtagatatttatgtgcg

SEQ ID NO: 49062 - DNA, 2459 bp, Cannabis sativa
aaaagagcaactaagaagccagcagttcgattgatttcaccagatcctgtttcgaactctgatgtgagggaggaacaagatgcagatactgagatgaaggaattaggcaagaaaatgacaagtgcgatcaatgaaggagaagggaaggtggatcacgatatgatgcacgaagggaattgctctgaaattcaagatgaaggttatggtgatgctcgtgctactcagtcttgggcagaggaagtgtagcaggatttgtaagaatctgctcagagtcattggaggaaattctcagcaagtaagtttctaatttctgatgctatactgaaatatgaggagccgataatcaaggaaggcaagaaagttgctcaggttgatgtggatgaggttaatgctcaagctacgaattgggactcagctgttatatgtatagtgttaggagcaaattctcctatggctgtgtttgagggatttatcaaacatatctggtgtaaactggggatagaccgaattgttagaatgacagtgggcttatgatggttaagttctttgaaacttcaactcgtgattaggttcttgaaaatggagtcttccaatttgatagaaagccagtgattgtgcaaccttggtccaaagatctaaactcaatctgtctgattcgatctgtcccctagtggatacgtcttggtggccttggacttcagtattggggcaacaattgcctaagtactcttgttagtaaaactgggaaaccattgatgatggataaatttactaaggaaataacccgaatttaatttgctagagttcttgtagagatggacatagctgacaatcatcctctacagattattcaataccttaatgagtatgagcaattagttgagcaagaagttgactatgagaggctcccaatcaaatgtaaaacatgttcgggttatagcaatttaatggcgaattgtcggaaagtagagaagaaacaagaggttaaggagatgaagcaacctgtcgtttttcaggcagctccccatttcgatgattttctcatgtttattcaatgcctaggacttgttttgctagagatcaatagggaaacctatagttttgagtttaaagtcccctaaaagtgatttagcatatcatttatcaattttacaaattttgtgatttaggggcctgtaaaccgtcgagcagcagttccactcaggttgaccggcatacctgaatttgaaattaaggtaagattagtatattgatatgcatatgtatttttatatttagcgtacatgtttgttaagcctgttagattacagtgaaatagcggtggctgtatatatagaattatattggataccgacaaatgtatttggcttaagtactgattgatgctatcatattggtacgactagagtacggagtgtaggtcgatattatggtcaatgtacattgtacgaatattctagactcagtatcgtgcgggacacgggtttagggttatgattaggtgtatgggcacgtaattataatctggtgtacactgatgttatgattatacttttctaactcagcctgtcgactcacagatattattttcatgcgtaggtaagggcaaggctaaggttgagtaaccgtgagagcgagcggatgaagattgtacatgttagggcggttagacctagagtgtttggtcttcgggacaacatgtttcattttgattagtcgctaggcgacaagctttgtattattatattgtattttggttataacttttgaaacacaagatcttgcacaattaatataaaatcacggtaacacgcctatgctagtagggtgttacaatttggtatcaaagccattaggttttctttcgaagatcatcataacatgtacaatcatcatcaacgataagctcgactcacgattaaataagcctttattgcttttgtagtttattttattagtatgttataagaaaagcatgttagtagcatgatagctgaatatgcatatgtttcattttctaaaataagcaataattagtaattattcttgatcacgatctgaccaagctagctcttggtttcataggctgttctattataatagacgccaagcggaacatgagaagtcaggataactcggtcagatctagtggcggtgagggagtccaatttcccctgaatatgcgtggccgaggtagaggcccaagaggtagggcacgcggttggggagatgtcaacccgccgcaggctgcccaagattgagaaaacaggtttgcaacaatgcaagccagaatcaatgaacaagacaaagaaatcagatgcctgaggcagaattaatttaagtataatggctaatcataaaattaatttagctttcacaaaaataaatatttcatttaaattaaatttttgaatttataataggttttaaacaggaaaataaattaattattaagaatt

SEQ ID NO: 49063 - DNA, 1525 bp, Cannabis sativa
ttttaggtgcggcggctaaatttttttatattttaattgaataatttaaagtataaatacttaagtttaacttcaagttataaataatagataaatttgatttttaacagtaataataattaagttataattttgaaacttctgtaagtagctggttaaataaatctatgattagtccaaatcattaaatttttattatttaaaaaaaaatagttcaaatataccaataagaaaatgaaacgtaacatttaagtacttacatagttccataaatgtaaattagatattattaccgtcaaaaattaaacttaagtatttatttaaactaagaattaaacttaagtatttatgccgcaaattactctattttatttttaagtaatttttagctgaactctctgtattttgaagtttggtacagtcgggtctaactcttatactgaaaaaattatgttaaatttcataatctttacaatcgttttggtcagcactctatctattagtatataactattaactgcttatacataaatatatatatgtgataaaattttaatggactacctaatattaataattaaaagaataaattaaatatttaaaaaaatttaaaaatgagacaaaaaatttaaaagaaaaactagctagtgtatcttatttgaccgattggatttgaccatatttgtccatgcttctctcattgacattatcatgtggagatttcgacagaatgtccctaaaaacaactatataactatgatatggtaaaaagatcgatcttctctaaattgttttgcatattgtatcttattatgagagttttaactttaagtacgtaatttaaattccatttttgaaagaaaaataaaagaaagatgtacgatatttaagttcaaacaattttgctcactcatttaaccaagattttaaataaatacgtatgtgtacaaattctattaaatgaacataatttaaacaaataatttttattattggccaaagccatcatcattattgagcttttgatacaataaataatgtttataagaatatagactttgactcacttttaaaattaaattatattgaataatattaataattttttgacatttgaatagttaataacaaactatgatatacgataatttaacttcttacaagaaaaaagatgtcctatgttcaaatttcctttctcttaattaatgtcaatattttactcaaataattaaaaacaaatgatgatctttttttttttcaaataaataaacaaaaagaagtaaaataattttcaaaatttcaattttttgtatacatattttatacataacatttgttgttataatatttccaaatttttaaaaagaatgattaatttagaattcttccttatattctagcttatgtgggaataatttgcatgcattgcacttcctttatgtttatctttggaatataaactttaattggactttatacattaacaaaatacacactcactctctccttctatataaatctaata

SEQ ID NO: 49064 - DNA, 832 bp, Cannabis sativa
ctctaatcttggtggaatataattggcattagtctggaaaatgtattaacatacctttaatcttgattacaaaagtgggctgttgatttttaaatttgtgcagttttgttttgcctaacattttaacaattagtgtattttatccttaaaattttaaaaagtcttacatctaagactttattttttgggtctactcgtgtggctcccttctctcttttggtgtaaccatgagagcttcaaccccgctcacgaatgttcgtcaagactttttggggcgagtcacccttctacaattaggtatattacatgagccccaacatagcattaggtgcatgaatgcccttgagatggatgtcaatggctagggtggcagtccaagacaatgtcctcacatttagggctcccaaaaaaactacttagattcgaactcaagatctctatctcagaaaaaccattagggggtaagcactttgtcactagattactcactcagtaagactctttcgaaataccgcaataggctaattgagctttagaagtaattacaagttaagagagtttaatatcttctcccattaagctaactaacagctggtttataggtaacggcaccttacaaacaatttgtttctgaataatatatgagtaatactatgtaaacatacacattaactttgattcaattttctaaccgaaattctggtacaaaatgggatctctattcatatttttatccaattttatcattatttcatccaataatagcccaagatggtcgaatggtactttctcaactattttttaactatgctttatgcctaatgcagagatg

SEQ ID NO: 49065 - DNA, 1309 bp, Cannabis sativa
ttttaaactacaagctattaattaatggttaaaatactgcttacatcaaaaaaaaaaaaattaatagtctcttagcgagaaaaaaaaatatgtgctactgtataaataaacagaaacaattaataaagtggtgtagttaacggtaacgttaaaaacaaaatcgagagttaagatgacaacagtttagttaacggtgacggcagctcttgaagagagagtgaactatatgtatatattattaaagttcactaaaatttggaatagagatttagaaaacgtgttacggttaacagattcttggatggacatagacaaatgggaatttgtgctaaccctagatgccgtctttgctcctctttttatttatttattaattaatttgctttaaatattattgcctctctactatttttgtgcaaaaatatatacaaaataacaatatcagtcaaccccatgtaaatagtttgtaggtcgaattgtcaatttgcacatgggtttttaactatttacgaaattgccattagctaagagtagagcctgtctcatctccattatttcctaaaagtaagtaattaaagaaaatcttaagcagccattcaattttttttatgttgtcaggcaaagcagccattcaattatattatcgttgaaatcactcttttgagattcttcaataattgaaactagtagtttttcatttacaaagtttagtaatattataaatagcgatttgtatattatatatatatatataaaattgcattcaaacaactactaactccactcatccatggacaaaatagattaattaaaaagaaaaaaaaatccaaaataaaagttgtagcaagcaaggtgttgagcaccaccaacaactctatgactaaataacacctctcaagtttttcaagtttcaactatcatacatcaaagcaatcacattcacaattggtcaaacaatattattctaaaattccccacaaaaaaaaaaaaaaataatcaccccgttacagaattagctggttacatttatgtttcacatgattcatgactaaatcaaagtcatttgaatattaacataagctttaaagtaatataacaatttttataaaagaattaactcaataagttagtggttgcccatattgatttttttaaatgtcaaagtaaaccccatcaagagtagtagtggcaatcacgtaaataagttgcaaaacccatgtcattttgttagcccataccacttataagtcctcaaaccatagctgtttgtcttagttgtcttgtccagtaagagaaagaggagagagag

SEQ ID NO: 49066 - DNA, 1174 bp, Cannabis sativa
agcgatgttggctatgcttattttctacttcgaggctggtcaagggaagacccctcttggtgcccttggcttgtaaattattttattgtgtaccaaatgtgtttatagaattgattttgagttttgaaaataattttaatttatggcagggacgagctcgatcgagtactttgtttttggaaaaagaaatttgtagtagtaattattattatgtatttaacttaatccaaattaactagtaatcaagttaagcctcatgtccataacaaccaatgttacctacaagttacattttgattaaaaggccacttagagcacgtacattaaatgagctataatgctcttttctttcaaataaagaagagtgatgaaaaaatatcaagaatttgactgtgagctattttagcaattttttaaaaaatacttctgactattcattctttgtttcttcttctttaagctagaaaaaccctagatagaaaaagatagcaaggaactaggatcttgagcttgtaagatcccattgtaatacattaaatccattcgtctaatacattgatttgtagattaggattaattaacacctgaaccacgttaaaatctctatctctattacttatttacttatttaatttcttaagttcttatgtaattaatttttaaaattctcgttaaacaaataatattttataaatgtggagcatgaatagtgaatttaaaaaaaatttaaaatagagaatgagtttagaacatctgatgaagtgtgtttttagtttagtttttttaaatattttaaagattctctattttaaagcatttgatgtaagtgctctaagatcaaatgatcctaaaaacaaaatgagaaaaaataaggggaatttttaattatatacttaattattaagtaattaacaaatataccatcaataatttaaatgatgcaataagcggtaactgtaccacatatataaacaaatatatgctatcattttctgacgttagtgttagattcaagaggcacatttatttatttttttaatcattttctcttttatgtacggtgattattttttttttttgtttttttattattttcttttgcatttatatctatatctatttttattttttataatttaaaaaataaataacaattacactgttaattattttg

SEQ ID NO: 49067 - DNA, 2037 bp, Cannabis sativa
tctgccattaatgacagaaaaatcggttttttttctctttttttttttacattcccgacggtttaaaactgtcgcttatgatagggtataggcgacggttttaaactgtcgtgaagtccaaattagcgacgattttaaactgtcgtctattttatctgttttacgacggtcgtataggcaacggttataaaaaccgacgagaatactttaaacgactatttaaaaacatcgagagaaattatttttgtagtagtgacaacctcaattatacatagtgtatactaaatatccagcgcctcaactgattgatctcatttgataataatgaaatctcaggataaataatggattgctattaatttattaatttagtgagaattaagataaggaggtgttttcatcacgtcatagtttagttagtaagataaaattgaaaaagaaaagaaaaaggttcattcattgcatgtgtggactaggacctttacctttgacctcgaaaagggtcacatccagggttactattctctgcttcggtattctgttacctaagccaaaggcattcaaacattcacagtaataataatcttttgacctttctcaattatatatcgaacaataataataatcttttgatcagcatgagtatatattattaccctaaagaaaggtagtgtgaactggttaatatttttcaatgttatttcattgatttttatgcaagaaaagtttaaagtaaatggggcctgaacttgatcctcaagtaggtttttgtcctaagccaaagttaaatattatatttaattagtatttgagagagaccctacccgattggtagtgtctttgactgagtcaaacacgtgattacttataaaacaatcatgttagatcatgagcaacagaggcaacatttgtttgttgtagcatgtttggatacacttttatttttttcatatcactttacccagtcagaaaagagaaaaaggaaaacaaaaaaaaaaaataaataatatgacaagcattggtgctttttaacttttgacataaagtattggttctcttatttagccacaaaaattgttttttttttggctacaaaattagctggggatctacatggattcacttattctcacaagtaacctttaaattttgaatactatttatattttttgtcccttaaattatgatttatatattattgtagtctatgtactttttagtttttaccctgttaaaaatagtacttaaactatttaaattgttataaattagttttttttttttgtcaaattttatcaaacaaaatgatgatatagttgtttggttaattgtcacgtcagtaccatgtcaatatcttgtgtgtaattaagttgaaaaaaataatttaattttttttaatttacttttacataattttcttattttttaatattaaatacatatgtgatgctgatgtgacaattgaataaatagtcatctcattattttatttgccacgtgtgacaaaatttgatagaataaataatttacaatattgtgaataatttaggaactagttttaactaggtgaaaaatctcaaagacacaataatatatatgtcatagttcgagaaacaaaaatcctaaataactaatttttaatattaaagatactcttatatacttcttcataataataaactataattgggaatatataataattgtactatatgaatatgaggatacactaatatcaaacaatataataagttgctattattaaatcttttattattagtgtgagtagatttattaataaatactattttggagtttgaattttttaaaagttattctttagatcattttttttattaaataataattcagactttgtatttttaaaacggtctaaaataaatattgagcttaatttttatcaaattaaacctgaataataacttaacatgaaagtttataacaaaactaattaaatttatttttacatgtgttccaactgttagaaaattaataatatacccaagatctatttgt

SEQ ID NO: 49068 - DNA, 1048 bp, Cannabis sativa
aaaaagagaatgattgcaactttatatgatcctttgaaaacttaggaggaagcagtttgctaacgggaatttattccttaatgcccttaaacatacactagtcgatcacacctataaaccttaagtgagatgtaattgactcgtctttacatggccaccggcccaccgagtccttcatttcactcttgtttctcttaaatttatctttcgaagcaagtatatacaccagtcttatagagtttggctatactcttatttatagtccctagctagtttcatttatatccaattaaaatatttgaaacttttaaaaaataaatatcatccaccgacccacttatctcaaatctcactatcccactatactcatagattattaactaatatatttattaaattaaatcacatcccacatgttaattggaataatacaactatatattcttaaccttctcatcctttagagtgactacactaactttcaaatttgaatttaaaacttaactgattctaaaattattattaatttaaatatcaacttatttcttatttctctctccttcctaaccaatatataaaacataataaatatgattactatcattaaaccaataaatgtcacgtacctattgatatgtataacaaattttgacttctattttatcttacatatagtagcataaaaaaaattttactcctttacacactcaaaactcggtacacgcctaacacttatttcataacaatatttagtgtattcctagaagaattaaagggactaaaatttagtacattattaattatcttttatatattccatatagttcctttgcatcaagaaaataaatatatatctcgagtcttagctaaataatatccttaacttgtaacaataccaaaatattgtattttgtaactaaagcaacttttaacttattttagagaaatagccactatactttaataattatcactactcacactttataaaaaaataaataagataattattttaacacgatcgttacctcaataaattttgaatacc

SEQ ID NO: 49069 - DNA, 2478 bp, Cannabis sativa
caagctcgcatgggtgagtactttattaattttatttgtacaacgttcactcatttctcccctaattataccctctaatctttgtgtttattttagatttggtgagttatttattggacatttgattgattttgatcttgatctgtttatttttagattttatttgtgccttgtgcttgtgttgtgtcatgccattgccaggtacagcttcacagtaagcacatttcccactataattgtgcttatgcccaataagtcttttcttttctttttgtcataatagtaataggcattttacacctgtcaccatttttttaaaatatatattatatatttttacaaattatgaattatttttttgacgaatttgtgtaatggtatttttacgaagcaccatgaaaattatgtgtaaacaataaattgtaaatataaaaatacaaaattgaaattacaaatttttactttgaggccttaataaatgccttgatctttcttcctagttttaccttttctttgtttaggccttaataaatttttactttgaggccttaattttcattttattcacccatagctcatattcaatgcatatatgatatattcccatctatctaattcacttagaccttccaaaataccccatttcatcattcattaatcacttttgttcttttatttatttctcttttttacttttcttttcaaatagtttcctcaataaccaaaccaaaaaaataactcggacagctttttctaaaaaagccagacccttctcttgatgttttcttaaatggaagagattatggaaaaaataaaacaagagaaaacaggaccaaaactcctaaataaataaggtaatcatcaaaatactaagttagtaactttacacaaaatcagataagcaacttcacaaaatctagagaaaaataaaatggtctcttacctccttcaagaccaaatcaaccaacttaacaggatagagagagctagctaatcaaatctgatatcaaaaggatcttcaacttgagttcttacaattcatcaaagaaatatcaaatagagatacatgatataaacatgttgtgcatacactcagttatcaatttggcataaccctaaattcaatattcccagataagttcataacaatacaagttcaatcacatataaagtaaacatctttattaaacctcaacaaaacgcatgcaacccaaaaatctctaagaaaacatatacaaaaatcaatatatagaactttaacaaagatttattttttaaagaaaacctagctcaatcggtgtttagccagcagaaaaattgaaacttggatattgacaattgattatgtaattaaaaacaataagaattaaggatcattgaaaggataattggattaaagatgatagctttctgggttgttgatcgtacctgaaaaaaatatcggcgaaaatatctaattaagcgatgatcacttcgactggtaattctaaattttggggtagcggtaatgttcttttttttttgctaattgacagcccatcaagaatatgtctacatatgaatgctttatgtaataggtccaccatatgaaaagccaagcatgcaatagacagatgttatctcactaaacaatatgggttatgaaaaggctaacatgcaacataacttatcacacctgtcattagatagttgacagttgttattttagttataggtaaataaataattacgaaaggttatttttgtaaatagactatgaaaagcccaaagagctatcctcttttttataaaggtttatagatttacattagcctacaaagtacccaaaaaattattgctaaaaaaacagtttaaaattttattttatttcttaaataatatctatttttaaaattttgctctaagtcccataaaaattagagatgaccctcttataacattgggacttcatggcttgtaacatagggtggtgagtttgaacaaaacctatgtaaaaaaaaaaagcatcgtagttgtagttatacataattaacttgtatctcattttaaatagtgatattggtttttggactttatcataaagatgtttgatactcttttttttattgactaaaatggacatgtactttggtataaatattctccttttcatttatcactacattttttttttaataattgataaaaaaaaaataggcaacaaattttattattatttaattgcataataatacaccttcttaacaaaaattggaatttaaaaccccactcccatacttgtgagttctgaaagtattggctcttaaactataaaaaattactaaaagataccattaatacttaatacaatttaatatgtaatattattattggtgcaattaagtatcgagttttatataatttatcgtaatataatgacttttaaaaaatatggctaaccaatcgcaaaacactactaatacccaatatcaatactct

SEQ ID NO: 49070 - DNA, 846 bp, Cannabis sativa
  modified_base (26)..(36): a, c, t, g, unknown or other
tccacaattaaattaattcacaaatnnnnnnnnnnnaataaaaattagtgctaatttcctttactaattcaatttactaaagcagtcattacaattagtctaccattgtcgacgatcatcacaccactgctcctaaagccactcgtcttgtcaatgacgatctctccaatcccttctttcttagcactggtgatcaccctagactcgtggttgtatccaccgttcttaatggtcgcaactatcaatcatggaaaagaggaatcacaatggctctcattgccaagaataagatttccttcatcgacggctcctttcctcagccagaaattgccaggaataacatggttatgtcatggttagtccactctgtttcacaagaaattgctcaaagcattatgtatattgacttggccatcgacatgtggcatgaccttgttgagagatttaatgaaggcaatggcccttgaattttccagttacaaactcaactcacccgattataacaagttaaccaatttgtttcttcctacttcactaaaatgaaattcctttggaatgagttgaaggaatttcaaccaatcaccacatgcacctgtggtgcaataaaaatctttttagattactataaccagaatcaagtgcttcaattcttggctggtcttaatgaatcttttgcttctattcaagctcaaatattgctcaatgaaccaatccccaatctatctcgtgtctttgccatgatcatagaagaaaagcgtcaatgctcttttggctctactgacataattcccttggctgttgctactagctcactacctactaaccctccacgagccaagaaacctc

SEQ ID NO: 49071 - DNA, 918 bp, Cannabis sativa
ttaatgataacaataatacataatataataacatcattttggctttggatgatactaatctagctatttatgaaatcaatattgattttcatgatttacttgatataatcacttgttcatcaatggccacataatacgtggtaattaatgattgtcattttcttttaaattttatttttagagaaactattttagttaataatattaacaacttaatggaattttatttgctatttttgttggataaattttagattaaaagtgatttttaggtatgaaataatttttcactcgaaaattataatcaagaactttaaacattttttctgagagttaaatgttttttctagaacaacttttacattttttttaagaactactttaacgttttttgtttataaaaaaacaacaacaacaactttaacgtttttctttaagagcatgttacatgttttttttttcttcacagaacaactttaatgggttttaatccttaagactcattttaaaaaacaaaaacaaaacatatttattaaaggagcgtttggtttggtaattttttttactttttaattacaaaaataaaagtaaaatttgtattttaatttttgtttttaaaaaacaaaaatatgtatgttctataaccacttttattttttaattttaaaaacagaaaacaaaagtgtgttctataaattttatttaagtagtttgtgatataaatacctaagttttactctctatatcattttcttattggtatatttaaattaactttttttttaaaaaaaaaaaaaaaatcatgacttagactaattagggattgtcacgtgacaatttacttaacatttaacgggtactatagagttccaaaaatataacttaggtcttattaccgctaagatttaaattcagcgt

SEQ ID NO: 49072 - DNA, 2023 bp, Cannabis sativa
agtgctcttcgaagtaccagcatctagttttcttttagcaggaactggggaagtatatagggctaggaggattatctttcaaactcttcttgcccactgatgctcgtgttttatttttttggggttgttttgggaactttttagtaacaggggagaaagatcgggtaacaaccattgttaatgataaaaactaatatttatagaagaattttaacaaaaaaagtaggaaatgtataaggaagcttaagatcaaaaacaaaaaaaaaaaaaaaaaaaaaactgcacgaatttgaaaaacaaaatagaaaccaccaacttcacaataagtgtctggaaaaaaaaaactagaagaagaagatgaacagtaggacatgggggagtgggatttatgttaattattaaatattaaaaataataaagaattattttttaaattcatttaaattacaaaaaaaaaaaagagtaaagaacttgtcatttttgtgacagcccacgtcccaatcaaccttttttttatcaagaagaaggaaatttcaaccttttaattaaaagaaaatgtaataattattaaatattaaaaataataaagaatactttttaaatctatttaaatcaaaaaaaaaaaaaagtaaagaacctgtcacttttgtgacaacccacgtttcaatcaaccttttaattaaaagaaaaactttaaattttgatgtgagaaaatacggtaaagatatgtgtaagtcaaaaaaacaaaaaaaaaaagtttgtacaaaaaaaacagtatactgttgtataaaatccaaaaatatacacagtataaagtaaatttcagtatatatataacacatgcatgatcgtgtctatttttgtgaaactattgatcctgtaaatgtaagtaaccatcattcttgatctcgagtgagtgcatattcttggtataagtatgggaaataagagaggaagacatcagaaatattaatagctagtactatatgtgtgggaaattaattatgtagtctatattataaatatttacaagaccaaaaaatgcgtttgaaagcgggttctgacttctgaacccctgaattattaggtttaattattaaaagggcctgttttagggtacgtacgtggaaagttatacatatataaaactttaaatgtgaccactttggataaaggaaaagcagctggggtttcattttgagggtgcatgcatgccttctcttgtggaagtggaaactcttattggaactaaaatctgtttggcttttaataagaacatagtcacatgcatataatattatttgatgattaatatatgtgatttagaacatatatatatataatagaattgcatgctgatgaattcatgagcagagatctatatatagtttgagaatccaagaacgagagattccctttgtaattagttatatgtaattttgttatttaactatatatattactattatttataatatagctagggtgagtgattagtttagctatgtatgcatacgcggcaactgatagatgaataataatctcttttttatcttattttaacaaacatccaaaattagaatcaaacaattccaaaaataagttaatgcaataatgcaagtagtagtagtcgtatacgtactatatagtattctctattattattattattattatttcatacattacgcagatgatatatatgggaagaataaataagtgttagtattttcttttttaacaataaatagaattgtattgaatataaatgttttacttattttattagtataaggttttctaaaaaagtgttcaaaaaaattgtgaggacttaatctcaaaagcagaaaatatcatactaatgtgagagttaaggcgatgggcagtctaataatcggtaacatttttattttttaattttttaatcacaaaaataaaagtagattttttatttttataaattttgtttttaaaaaataaaaatgtgttctataactacttttgttatttaattttaaaaata

SEQ ID NO: 49073 - DNA, 706 bp, Cannabis sativa
atttattttttaagaaaaaaaaagtaattcttatcactcatgtgtatgtggctatgtgtagccaagaatatcatggttttctctatgattgtgctttattttcctgttaaaagacttggattgatgccactgatatatcaatggtttaaactgtaccttatacatatatatatatatatatatatataaatataaatgaaaaagctttcaacatgctcatgtttgcttgtcaaatcacatgtttttgtaacctagcaactactttagatttttaaaatccttggagggatcatagatatgctcatcaagtacttttgatcatctcatgtttaatttatatttttattttttatttttttgttggtttggattggagctggattatttggatgataccatttataggtgatgttttgttgagctaatatactaatcatgaattatatatatgttaattatgttatccatttattcttataaaaatttatatatatttattatatgattttatatacttcaattaatatagtttcttaaccttctatctctagtatatataggaaatttttataataagaaacttcatttgtttttataagatagtgacattttattaattaaccattaattaaattaacttttgaaggtttatttaaactatcaattaaattgaaaaaagtgctttattaattatgttttttttttt

SEQ ID NO: 49074 - DNA, 1680 bp, Cannabis sativa
  modified_base (1444)..(1450): a, c, t, g, unknown or other
ctatttagttataacctcccaattagaatataatttacttggtcccaagtgtattcttggatagagattctactatgcttcaatcaaaaataaaaggagaagtaaacactatcatagtataaaagagaccaatgcctcccatattccttatgaccacttgaggtagcttcaaatacttctcctttatgatatgatcctaatccttaaaaataaaataataaataaaataaataatttattactgaacatttttttttcctaataaatcataagattttattaaataataacatgcgatctaatcgagatatctttttttgttagagatgcgactaaaattagaattagaaaaataaattaaaaaatcagtcgtctaatttccagatcgtttgacaaaaaaataaaaataaaattagatgaaaaaaattacagcatgcatcactgttaaccttaaacacctataatctgttccatccaccacttaaaagacacaatagtaaaaacggttgcagcaaattcaacctcgtaacttgatcactcaactattaacgatttaatggtgatctattgaagaacaaagaagaaccataatgaaacaaaataaaacaaaacatgtcatgtagacaagattaaaatattcaaaactatgtcacacagacaagactaaaatacttaaaacacaagactaaaacactcaaaagtatgtcatagaaaataagactaataacagtagcaaaaattgaatggtaataacaaaacacaaccccgaccaagctgcaccgaagtttaaagaaagtcggctggcctagaagaaaaaaaaggcaactttcgataattataaatttagaataaaaaaatctattttttattttttttttataatagtacatgaatccagagtgggcattaacattagatgttcacaaatatttcaagccttatttataaaattataaactatttaaatttttttaaaatttacaattaatcttaaataactacaaattacacctaaaaaagaaaatcttagaatacatcaaaatgtaccaaaacaatcatttcaatagtacaaatgtaattacattaaatgccttaagattttatatttactaatctatatatatttgttgtataaatgatttcttaagaaataattattttgttttactagaatttttaaataatattataatattcttgcgttcaacaaaactcagtttcaaatttttcctacaatcatattattctttattataattgttcaatcaaattattttaaactttcagtttcaaaaaaaaaaaaaaaattattttaaactttcttgtaccaaacccaattataattagagtaagaataataatatagctatatatttttttaattattttagctaaaaataaatagtatcatgaagatactctacaaaataataataataataannnnnnnaataataataataatatatgtaatgtcacataaataatgacaaaggggtcaccaaaaaagtgaggacaagtagcactaccactaataataataataaaaaaaagtttttctacaatccaaattttacttgacaaaaaataaattattcttaaaaatgtgtttcatccttgctaattttaagtactttataaatcacctcttaataaagatattttgtataaataatatct

SEQ ID NO: 49075 - DNA, 1501 bp, Cannabis sativa
gaagaaattatgatatccctatagaaacaacttgagccatttgacaaatatcataaagccaaaagagatcgaagtcctctctagttcctaggctaataataatccctacagatctagtaaggcggtgaagaaatattattatactaaaaaaatcaaacacagtttaaaaaacatgaaaataaaatgagaaatttacaatagtatatacatattttaagtttatcagaatatatatatagcaaaaagattacagtaggacctagcaaaagtcctttactggtaggaaactttttttgattattgattttagatcatgtggttattatgatgtaaaatgtatactcttacaataggactgcttgtatacaattaaaactttaaacatattataataatatttaattttatttttcttttaaaaaaattatattaataattaaaaaatttataattttttttttttgaattattgtttttttaaaaagttactttgaattatttttatattggtatttatttttaaaaagaattattttttctaaactcattttttttttttgcttctcattttttggtttttcataactgatgatttttttatgtttacacctagttttttatttcttttgcttttaggctatgcgtaattctagtattattaattattttttcaatagtttttatcttattgtttggttgctcttttgagacgccacttatcaaaaaaaaatatttattaattaattttgtatagcataaaaacaataagataagcgtaaaatatatattctcaacgaatttgtagttagccgtaaaagttaattctatctcaaaagatcgactgatcaagcttcaagaacaaatgccataaagttgttaaaatattatgagtctatttggttttgttttctagttttcagtttttagaattgcgtttttaaaagtgagaatagaaacagtttattgtcattttaaaaatttaatagtgtttggtacaaattttttaaaaccatttttagattttttttttacaaaaaaaaaaaaaaaataatatttgaacaccataccattacatgaacccattcgggtccgggttcgggtttggttctgggtctaagatcgaatatgtgagcaaaaatgtataatatgttagacaaaaaaattatttttgaaaattaaaaattttctatttttttagtttctaaaactcaatttttaaaaaaatttaacaaacagcctctattagttttaaaaaattatttttagttttaaaaaagagaaaatactttttaagttataaagtcaaatagcctctatgaagttttgttttttaattaagtaaatatgagtacaagtccaaaatatttattattaccataaacttgatttaataaattacaaaacaaagaactattacgtaatcttaatggtgataaggggagaaaaaaaaagaatagtaataagaattgggaaatttgattttctatacttagaaaatcaa

SEQ ID NO: 49076 - DNA, 863 bp, Cannabis sativa
acgagctgcacagtatgtttaaagttacgttaatacgcctatgctagttagggtgttacatacagagcagctaaatacttgatccccttttgtgtaaactgcatcgagaaaatcttgtagtaattttccaacttctagaagtttggatgaaggggtaaaagagcctcctgttgggcatgtgggctggaaaatgtgcaaaggccatccccagagtcattggtaagatggttgtcgaaatggagaaaggtagttatattcccgatgagccccttcctatctacgttgtataagcctcttgagtgtgaggttggatggtggagaaatccacattggcttacccctttcttggtgtacagaggcaagaacctccttgtcttccttaagaacttaatggatcttctcaaccattagttctccccgtgcagtaataggtttcctgacctcattgtatccgccgaacccttcaaacgtcgtaggatcgttgaccttttttttccctatgagcttgagctgggggcctcaccctagtcttctacttcttgcaccgtcgtacggagcatgaactaatgccattaaccgcacaagatgcggatccttaaaaaaaaataacctgtaagtttgcttggtcggtgcaactttccttgtctttggcgggtgtttacataaagtatattgtgtgatgttagctgcgatctttgcttccatggtcattttctttgaaagctctagatcacctactagcaaagtgtgtgaaaccctcgccacatgcgcacatattataaagaatatctactaaaaaaatataatagagcacttacactaattttaatgaccacatgcttaaaatatagaattagtaatcg

SEQ ID NO: 49077 - DNA, 949 bp, Cannabis sativa
aatctacatacatatgcaaaaatcaaatttattgttagaattttataaacatgatgatgatcctaaatattaacacaaatataattaaattataaataaaattattaattatataataaccaaaacttcttcaattaatcatgtgttttttcaaattgttgatgatcataaaaatttgtttttttcttcttcttctccttataatttaagggaaaagaaaataataataataattaaaaagaagatatgaaaaaaaaaaatcaaaccttgaagaaaagagattcaataaccagctaaaaggtatgtatggatgattctctcattgattgatatggaattaaacaataataaaaataataattaatcattaatttggttttgattacaattaattacagcatattaaattatttatgaattaatcataaattggaatattaattaatcgattaattaccacacaaattaaaacaacccttcctattatcatgcccaacctttaaatttagaatattaattttcttaaaataggcattccatcactctcaactcataattaaaatttgtatatatataaatagatttatgtcatttataatagtttgttgctaattaactacatatttaggaaatataaaaaagttgtactaccaaaaaaaaattattactaagatctaactactatttttgtagcaacaacgaagaaaaaaccaaatattttacttgaaatatttagaattattgttttaatggcagagccagtccaaaatttgacgggggcaacacataaaaatatatataaaaaatctatatttatttttatttctcaataattttcacatatagtttaaaaaatattgaaaaaaaaagggaaattttcatgggccaccttattttggcaattattttcaaaaataacgttatttttgttatgttaagtttttgtata

SEQ ID NO: 49078 - DNA, 1548 bp, Cannabis sativa
tttatttttataattcatgtcgtcatgatgtaaaagaaaattacaactcgaaaaatataaaaattgcctacaaatagtgtttaaaaacaatcgagagtgagagctagaaaatgttcttactctaacaaagcaatcgtggaaatgcaaacgaagtaagcctgcagtaatggaacggtcttttgcgaatcgttctctaacaacttgtttaataatctgttcggctttagggcaactatttttgtagaaattttgagttagttgaccaaaaacacaaggactaagaacaagaatgctcaaaagaatcacaagagaatgaatcttcatcatgattattatgaagaaactataaaattgtatgttttaattagggttttaattgtgtttggctaatcaatgctgtgaagattgcttatatataagagctaagagttggggtcacgtaaaaaagtcaaagaattagacaataatatagagacgacctcgtaagcacattcgaacgtggtatcatataaattcatgcattgcacttattgattaataattaattaggtagatatacatatatgattaataaattgaattaattaattattgaattaagagagaaggctttcaatatataagagagatattccaatattgttttgctaattttgaatacataggtacaagtatgttgtgtagcttataaaagaatatttaccgaaatattcttttataaaaatatatgaggcgaggctggccgccgcacaatgcgggagaagggtggtactggtgtagctaggtttagctcgtgccatttaaacctcgcatgaggggatggagacgtgtgagcaaatgacttgatagctagcggccatgaggtgatgagagggcgtgacacgggaatttatcggaaaaaaattagttttagtgatattttttagttatatcataaattttttgtgacttttacttacaacaaaaagttacttgaaattaaaatttaacatttagacacaatttgtcattaatttcattttagtcataagttgtgactaaaaatatagttaatcacaacaaattgtgatttttgtgactaatacatctaaccatgaaccttttttgatgatgtaggaatgatggtttataattagtcacaacttttttttaatacttttagttacaagttttgttgtgactaaaagtaaaaatttttgtagtgaagattacccgtgccttggaagtttggacgttgattaaagaagaagttgaagtgactgaattcaaccaagctgacattgttaaggtttgagataatcgaagtgggagcgtgtggctgtagggttataatgtctacattagggatgcacacgcggggcaagaaattggcggggagtactttacctgtcttcatcccggttaaaaatttaaattctcatccccgtttattcccatcggggatagatcgagaaatcctttaataagggcgggacaaggcggagaatctcctaataaaaaaataaagttaataataataatttgaatatataaaaattaaaatattac

SEQ ID NO: 49079 - DNA, 1186 bp, Cannabis sativa
  modified_base (797)..(799): a, c, t, g, unknown or other
aattatactattttaattattattaaaataaaaaactaaaatattaaataaaactaacactacgtggcttggcacgtaacaatcacctagtatatatatatatatcaatgattaagaaaatgtctatatattatagagacgtgtgccgtctataaaattattatatataaatatatattcatatagaatatcaatatttaaagttttacataattttaagatttaattattatagaacaaaatacaacgacggcacgtgaagcacactatatttcggagttatttagatagttgatggagtattgaaggattgtaaaaggaaatatgaaattcccattgtgagctattgggtaggtagaggagtaagataccattttgtaactagttcttttgttcttaaccttgtactctcatattcactcattcatcaataaatcttgcgaaaagaccaggccagttttcctgtggattagaaaccatatagaaagggcgttaaaactcttgtgtatttacttttttaatcagttttctgcttttaaaattaaaaaaataaaaatatttttcaaaaacatattttataaaattatttttacttttcaatttttaaagtgatctttgaaaaaaaaaaaaacaattttaataattttttaaacagggtttttttcttaatcaatagtttggacttcgatcagacccggactcagatctccccacggcactggcgctgaacccgaccgatctaacttggacccgaatccgacctcagacctagacccaacgtaaataaaatcaaaaannnaaaataaaaataaactttacaaaacaaatttttgttttctgcttttaaaattgaaaaacaaaagtagttatagaacgtatttttatttttcaaaaacaaaaattttactttcattttgtaattaaaaaattaaaaatcaccaaaaggtagttttacttttttgagtttatttttttggtattagttcattcttgattgttgatggtgctttaactcaaatttttagtgtattgttcttgtcgttggttgattcttgcaagtgttttgacacacatagagagatcatatttatgcatttaagtagctaaatactttttttcttagttttgtttttgctacatagcaataataaatggaggagatatccaaataggccattttctttct

SEQ ID NO: 49080 - DNA, 841 bp, Cannabis sativa
tttcatctgatagcaggcaaagtgctgctaaatccatttttctttctcattcaagttcgtttagagtgcaacctttgattatttgtagaaagcaactgcagggtttggctggactacaagggaactttgtaaatacatgtagattggtctttataaactgatgggagaaaggaaacacgggtggatgcagtgatcccatctttgatccaagatgaaactctgttttgccggagttgatttcattgatgctcctcaaattcagaaatcttgatgattctttaccaaagttgttgattatttgacatgcaatggtgtcaaaatatacatccaaaccaattcagttgccagtaagttgcttcatgaaatgtatattggtggtaattcaaaacagtatgacagtttttgttgaaatgtcttacattatatactcaacaagatacaatttttactttttccacttttgaatcaataactctgaccccagaccccattggtttttttcatgctgagttacttattaaaaaaaaccatttgttaaatactttttagtatgtcatgggtgatttcagactttcatctgtcatgccattaagttgtcctaaaatagtaggacaaacatggctgttctgaacactcatcttcaatgagagttgaaaatataacttacaaaatattatgtaagaaatcaccaattccataacaaatagaatctatgaaagcatttgatgtacattggccattgggaatttgggatggcgacctgggtaatatacgatctattttggaaataaaaggtagtaactcgctcaaagttgaaagtacagaagatgaatcacataat

SEQ ID NO: 49081 - DNA, 1884 bp, Cannabis sativa
  modified_base (104)..(105): a, c, t, g, unknown or other
  modified_base (1125)..(1128): a, c, t, g, unknown or other
aaattcttgtgtctttatttgctttactatatttcattcgtattaaactgctcgtcacttacaaaattagactcgttatcattggctaaaagcgaggtcaacannttggtgctttcattgagagttaaactcaaggatcgctctttattccaaatttaatcacaagtaagatggtggtaaagactcgtagaggcatggttgatccagcgaatccccaggttttggatcttgcactacagaagccaggaaaccaaagggttctcctacccataaatccttgacagccatcaactacgggtcacggtgtgaggactcttttggatgaaatcgcgcctggtgtgcaagagactgtgaatactagttcaacagccaaccagggtgttcataacatagccattccacccgctaccaatgtataaacaaccattttagatgacactgaaatccagaaccgtcgtgctcctcttggaatcatgcagggtcataccaacaccgtacatcatgatacggaggaactctgtgctgcgataaatctcgcatttgaagagcagagatgcatgtttgtcgaatggagagacaaggagatggaaacgttcagggctcagcaagcaatcattgacgatcgcagtcggcaaaccactgtgctgatacgaaaagcctatcaaactgtcgggaagtagcttgcgaatgtcattctcttgggcaaaacagacgaagatccaacgaggaatacctcccagactacaaatggtcagccatcaaatccgcggtcataggttccacctgtgggccaagcggtaggcgggcagaccttgtgcagtaattcatcgggagaagttatacccaataactccaaccaagttaatggtaccggtcagcaaattggccaaaccaagcagtcactgagactgccaggaatttccgtttttgataggttggggacgacttatgatctcagaaacgatctgaacaggaggagaggagtggacaatcagcttgacacgccaatcgtgcaactcggaacccgcgctaaaaatcccactcataaagatgctgacgtgactcagatcggccaagaggccgaacaagttagtccagccatgcaggcacagctggacgaactannnnatatgttccaaggcctggctggttagaggaacaacgatcttgagttggatcgagcacgtggaacccctttctccccagagatcaatatcttggagttgccacacaagtttaagatgccaacctggaagatgtatactggaaaggaatatcctttgtccaacctcaagtatttcgaggagcaaatggatctgcaaggagtacccccactctgggttcatgggtagctgggaagactcttcttaagaccatatccccaatagtgaattttctgtttttaactttagagttaaaatatctagtcaccttcttttgataagctgtcattcgtattgcgtattggagactcgactcgtcccggagctcttcaacctgatccagcgcttcctgtaataaagcctggtttgtagctggatcataagtcgttctcctgtgggatgggaataacgtttctagcgggaccattgcttcacaaccgtacgccattgagaatggcgagtggccggtcgttgttcttggtgtcatccggtaggcccataaaactctttgcaattcttgaggccagttgtttctgcaggccagcagctttttatttaaagtgacatttaggatttttttgacggcttctgcttgtccgtttgtttgtggtctagccactgcggagaagcttttaacgactccgtgttggttgtagaagtaagtgaactcttcccaatcaaattcatttccattgtcagagactattttgtgaggcaagcc

SEQ ID NO: 49082 - DNA, 2023 bp, Cannabis sativa
caaataattctatcttttaccagctaaattacacttcttggtgttgtgaaattctagtaacaacatttatcaatcaggaaattcattactccaaaaaaaaaaaacatttacaacctattagaatcttcaataagaagacctgattttctacaatacaatcaattataggtatactattcatcttttgctttctttgttttccagattttccttttctttttcctgtgttgttttttttcctgatcgttggcagcagctaatgaggctgcaacaaactaaaattcctcttataactgatcactgacagcagctaatggagctgtaactttctgcaacagtaaaaaccaggtacagttgtgcaaaccagtcggcatcagctggtttgagcttctttggccaattgcacaccactctattcttgacatcctccttcgtagcatgtacaacattatcttatgctaatctccctgaattccatagcacctcatttcgattcttccataaatgatacaacaacgcagccattgcagcggttagaactgccttccaaaatctggtcattataactctttccagccacctgcgcagcttactcaaagctgtcgctttgactctccaacctagccaagatttaatttgagatagacaaatagtagagaatgtacaagcagaaatcttctccaatgatgttaagtttgtgtaatctttctctagtgctaagtctatcttggattgcaatccaaaagagaaagctatgtctaggaatgttgagtctattccatacctcatgactccaaaataccttgctttggggagagcaaagagacttgtagccatttgatatgttgtatttggggcttgtgaattgttgaatgtccatgacacctgtgagttaatctttaaccgcattcaatttcctccaatactagcttgcttgaggtggagcttgataagtccaccaatcctctcctttaatgtatacacaatgcatccatctaatccacaggttatcttctttgttcgcaattgcccatacatactttgtcattgccgcaatgttctactttactattcttttcaaaccaattcctctagcagtttttggctgacaaacatggtcccaagctattaaccccgggccttgagaaacatgattgcatttccaaaaaaaattagtaaataacatattacaaataatgattccgattatttttcatttattatgttacatttctccattaatttattcagattctgaatactatatagtaaacgtgccatgagggtttcagggttttgggaatagggatgggaatggtcaggggaatgggaatgtgcatgggtcagggaatgggaatggggattgaaaacgggaatgggctgggaaatgggaatgggaattggttggggaatgggaatcagaagagaaataggaatgggaatgggaatgggaataggaatgggaatgcgaatgcgaatgtgaatgggaatgtgaattggctggggaatgggaattgaaatgggaatgggtcggggaatgggaatgggctggggaatgggaatgggtatgggaatggggatgggaatggggatggggatgggaatgggtatgggaatgggaatttgaattggaataggaatgggaatgggccttggaatgggaatgggaataagagtgggccggggaatgggaatgggaatgggaatgcgaagggaatgggaatggcaatggaaatggggatggggatgggaatggcaatgggaaaggatgggaatgggaattggaatgggaatggaagtgggaaagggaatgggaatgggaattgggatatgggatcaggggttcaggggtcagagtccagggttcagggttcagggttcagggtgtagggttaaggggaatgtgaatgagaatcgaataaaataaaatttaaaatgcataaaaaaatttgataaaattcatcaaattttttctcatgttacatgataattgtcgttccttccatttcgaaatagaatattc

SEQ ID NO: 49083 - DNA, 5174 bp, Cannabis sativa
tagataatattctactgcaacttttctttatatctatcgtcaatacatacatataatcaaatgcgtgtagggaaaattttaaagaatttttttttgtagttgacttatcttggcagttccaaaatgtagagattacatgcgacctatcttgacagttctaggtgttgaaattgcccaaatctatgagaagatcttcaagataaaaactactgagattgcttaccctatctcggcgtttctcaattgccgtgattggtcttgaccctatttcggcggtcaaatcatctacaatcgataacctccgaaataggtctattacgagagttcttaattattgaaatacggtaattttccgatagtgtagaataaacaaataaatcataaaaaacattctaaagctcataatggcaataagaatgtttatattgtagtcagggcccggtcttagacatagcatctaggactcacttattttagggacctaaataaaaaaaatactttttgaaaaatatacatactttttaataatttttaaaaatattatttatctttataataagagtccaaattttttttttgtatattgtccattttaactcaggaccggccctaattgtaagtatgtactagtgaaaggatataaaaatttcaaacataatttaagtaattaactattgagtttgctacgtagagagtattttttatattaacactgcaatatagtattttccttaaggaaaaaaaaataaaactgatcgatgatatacaagttaacaataatcacaagagaaaaatcatatgtatatctttttgtggtttctaatcgaatccccccttagtggattccaggttggtctatatgttattgatgagataacatttataaatatatacatttatagggactagggaggatgaaaaaaacaagagaggatctttattttattttaattttattatagtgtgaatccattggttcttatcctcaaatccgattattttggtattccttggagtgaaccttaagctagataccattataacaaatctagtgaactcattatctttttctctttcttctttttgaaaagaaaaatatccaaataagagtattttctattaatcttgaatttgctttttcaatcttattaacatgcaaaagtagtcagcttccaatcttccatgctctatcttattaataaagccataaataattaatattttgtttatttggctaaatcaactcttatcatcatttctctttaatattatcatctagctttgaataaatgttcggtttctctcattctccaaattaaatgtactttggtttagtctaaggttcttgctccaaaagaagatttcaggtcccactccctcatctagatcctaaataaaattacatattatttggattttattagattattatattgttgtatttggccttcacatagggctatttcatagattttggaaaaattaaaacctactttttaaaaattatgataaaaaaaatattttagaaatagttcaaaaagattttattaaaaaaaaataaagaagctacaactaaatatgtaaagttggtacaacctaattttttttttttttaaaaaaaaataacgactataataaatttatttgtactaaaaatatatatttacatatttattatacattaaaaataaataaaataaattaacaacaataaaataattaatatttaattctcttatttttttttattttctctctaaaaatattttaatttacactttagaagaaaaaataattaaaaatatatataaaaaaaataaaaattataacgtaaattttttatatatttatgattataacttaactaaaacattgtcattattattatcattataattgaatcttaataatttatagcattttaaaatttaccaaccactctattcagtttttttctacagttttactgtagctatttttttctcacaacacaatcataactgatttttccacaatacaaatgtgccaaactggcccatagtataccaaaatacgatggcaaatatttttttggatattaaaataatactgtttaaattttttaaagatacaattatttctcatattatttgcaatttcaataagatggcgtcaggacaactttaaagttatttttgaaaataccctcaagtttgacatgcaattataagtttgaaccaaaagccgcaccaataacacaagactttgtatggtgagcttggaaaaacgaacgttggtagctcgtaaagaatacaatatggcagatgttgtattagtggaaaataacggtccattggttgttcataatatagtgacattgatgacctcaaatcaacaactatatgtgatattcttcagccaccaatgacacttgtttctcatttttctcaaataacctctcaattggttgtttagttttcccatgactatccacatctttgattgtgatttcatcttcaataacttcataattgaggatggatgtttcttcatcacccaattgagattatcatttgttgagcaaagcatccaatgtacgcaaattttcagccacttcaaaaggattctttctctttaattataggttgaatctcttctatgtattcatctgatgtgcttctatattattccaacaactctcacaacttttgttatttgagttatcatccttaaaactctctgaatcatgcgccattaaattatcacatcgagctcttaccatgtccaccaagcgataaatctcttttggaagtgatagtttatttttcttttcttcaattggttggggtaagtttgggcaataaggagagtattggtggctccaaaccttaagtaatggatcccaatgctagtcgtaatcaaaatctgccatatcattcaataaatttattacatcatggcatcttcttaacaaatgctctccagttatctctgctccataatcaacccagcttctggtttcatcatcaagtccattgtaaaaaaatagagtaaaacacccacttgagaaattgggatagcatctctctcgagctccttaaatattccctaagcagaatagaatgtctcattgtgttgttgaacaaaattcacaaggtatagcatttagatttactttgcaggtcaaacacattcagtaaaaaattagtaaaattaaataaaaggaaaccaaattagattagaattcaacgatattgatattaactaaaatagtcctcgacaacgatgctaaaaatttattgtgataaatccaacatgcaagtatacgtatcgttttaacaagtaatactcaggtaagtgagatcgttctcacgagaactgtagttaagtactaatcaattaaattcttgtttctatttggcaatcgaataaatagattttgaactaaataaactaagtaaaatttaataaaataaacaaataaaaagttaacaatagatgtgaaattagggatatgatttcaattgcgctgattacccaactgttaacactaattaaccattcttcttcctctatgtgatgaaaattataaattaacctaaactctttctagatcataaaggtcataaattgcatgccaattaactactacatttctaagatagaaaaatatacaactcgcattaagcaatagtctaaaagtcacataagctatgtgaatattcttatttcacatcaaaacctatctctattcattaagagcaatctcaatattcactttttagattttgtattgagatcatagatcacgcataaggtgtccaaccaaacacatacaataagcacaaatatgaataaatcaccataatagagaaagaaagaacaataaaatagcattaatctatagaataatctcagccaatatctatcaaattcctaaatagagagtttagatcataattaaattcataattaaactaaagacaaataaaaacataaaaaattaagaggagagaaagaaacaagatggaggattgttgcgaatcgcccatgctcgctccaagagccttcttcttgtgtttatagtattaatatagtctctccctctataattagcgatccccttgcattaatagagttttccagcctaaaatgtgaaaagacgaagttttccttgaaccgtatggagttggcactgcggtggccaatatcctcgctgtgacagctgtagaaaaatgaaaaaatgagctttctttagtcccttgctgcggccactaaaagcctcaccacgaccattggacccattttttttggttcgacattctcagtaaaatatctataacattcacatataaactcctaattagatttttcaagatgcgttggaaaactaaaaaagagatctaaaacttttgtgtttggacattttcaaaaatcggatcagaacatagttgaatttagacatgaagaagtttcaactttattttcttgaaaaattttctctattctatagatcaccatttttagaaatttgacaaaagtccattaaaattggactagaaaagtatttctagtctatttttgtgttggacataacatccagggacataaaatgggtatttttaagtccaacaatgttggactaaaaaaatatttctagtccaccattaatggacatgaaagtaggattttaaattttttagaataaaaaaatttatatattatttctttttattaaaattatattttaatttataaataaaatatttttaaaattattaattatccactaatagtattactcaataattacaaaaaaaatagatttacaaaaaaatagatttacaaaaaaaatagtattactcaataacatatataacttttttaaaaaaatagatttacaaaaaaattagaaaaaaaagtatttttttcgtaagaattaatagtgtctatacacattttggacaaaaaattacaaattaatcaccaaaaattacaaatcaatctcattttatgggctaaatacaaagccccaaacaagttaaaaagaaatacaaacaccaaaatcaggttctatctgaaagtcctaattgctataagttctaattgatgattcttaacagagtaattctatgttatgaactgaactttaaaatcaatgaacacagaatttacaagcttcctctgcattggaa

SEQ ID NO: 49084 - DNA, 1635 bp, Cannabis sativa
  modified_base (896)..(919): a, c, t, g, unknown or other
ctgctgcatacacaccgaaacacattctgcatgagtgagtttgtttgttctccacttagcacaactagtcaactttacttcaaatactctttctacgctagcctatctggtataattgatttgagttgtggcaacacgctatgttgattctgtaaagtgttcttatgtatatcattggactataatgctctagtgtgtttaactatgtaggaggctatgctgaagcactcagtgtgcaacaaaacagaaaggatcaaggggagagaatgaagagttgggcagaggctgcatggagaaaccgccggctctcactggcagaggcactagaaatgtctgaaccatcttccaaatctctggtcatcgatactcgaataagcagggttctgtagttttttcatttcctcatatctctctctccttaaaaatgttcatctcttgcagttttatgccatgtataaacttctcgtaacttttgtttttttgctatagaagccccggggatttccagggtttttgtacaaggatatggtgaataaaccagtatgaaatttaaactcataaatacctggttcattcatgtacatctatgagaaaccgaacacagaaaacagtagtgcagtggcaaaatatgagtcgtgtatataagataaaaataagatatgaggtttattacaaacaaactttcaatcaaataaaatgtcaaggactctacattggtcactgaagttgcatcgaataagctcacaaaggaagatcaagaccttttccaatttccacacctatcaattgtagtatgcccttgttcagtatctgggtaatgaaaaagcaaacggttaatcgaatataaactatactttttaacggtaatagtagaaacattatatatatatatatannnnnnnnnnnnnnnnnnnnnnnngagagagagagagagagtaactaaccagttcaacaatgaaagttccaatgagaccaatcatacaagctctagaattccatgtctcagcgatccttgtgaacccaagaaatggtggcttaaattttggctctactttcggcactaccacctgaaaatatttgtacccttttgttaaatcttactaaaaaagaaaacccaagaagaaaaaatatgatgaatagagttgaaacttaccccagcgggaagctttgcagcttgtactctgaacttagtggagactggactctttaatgttgtgcaactgaaattaagattacccaagaagggtttcggtgtgatttgattatttttggtccagactgtagatggtagcagagacgaaactgttgaagttgccattcttaattttggggtttgatgttgagaaaaaccataccatagagaagggtttattggtctctctattacacaaaaccttatcttctcagcgagagtttagtgacggttgtagaatattccgtaagaaacaaaagctttttggggctcatattatgccatgttgaaagcttccatcacacaatttgtttttttttgttgggtcccatcccattccgttccttggtattcatgatgctgagtaaagaaaattaataggtaggtggcttgtacatggtgatttgtgtggcccactggctttaggattgattttttttttt

SEQ ID NO: 49085 - DNA, 3788 bp, Cannabis sativa
agacaatccctataattatgggattgattcagagaaaaaagataacctattctaagtttcctatttctatttcgtacattgtaattattgaatcattgtatttcctatttcattcattgtgagcaaaagggaaactatgcctcatgtattaagtctttataaatagtgacttagcctcactatgaaagggattgagagaattgttgtagaaagatactctagagagaaaagagtgatctaagagagaaagttactcagagatcaattgcaagagcaatcgagaggtagaacaattcattccttctcccaatttattacaaatacaaggggagtaggctattaccacacttacggggccgaacctctttaaaatctggtgttcactttattttattattttttctttctattaattatattacttaatcactttatttctaactcactatcatttgctagaagcgagatcaatattcattttctccccgagttaaattgtatcttcattattttttttgatgcaaaaaatagcccaagttgacaatatatcaaattgagcacagagtccagttttaggcctcttagaagttttgtttgctccaaaaaaaataattgaatcttaatctttgatgaaaacgaagaaaattcgtggtagaaattttggaaaaattcctttgaattggcccaagttgacaaaatttctacttagccgttgggccgggaccaggtgtcaacctgggcactggtctcttgttttggcccctagattggcctatttcttccccaaaagaacctatctccctatttatgacatagatgaagaagatgcgcgattcagattttcaatttgatgcttagagctggcccaagttggaaaattgtcaacttggcgttgggtgcccatgcatcgtgtgttctaggtgctcaaaaatgaaagttcctcaaatctgattttgttgactcaaatatgtttgtggtctgtctagttcatgtctcggtgcaaatttttacccgattacactacgtcagccctggaaactgaaaccctagttgggttgtcaacttgggcgctgggtgaaaccctaggtcccagggttgattttaaaggtgttgtttcatgtaattttagctcccaaggcctagacttggatgcttcatgtcatcatggtacataatactaaaagatagtgagttggaaataacttggcgggatccaaatacccattctggagttcctaaagtcaacttgggcgcaaggctagggacccttcccaagtcgactaatattactcaggactactaaagtctgagatgttatctttcttatcacgtgtcaaacattgatgtccatatcactagggaaagtgtttggattaacattgcccctaagtcaacttcacacatgtgtgaggatgacttaatgacgtgaatcgagcctatttctcttgaaataattaggtgggcattgattttggcaatcttggaaaattgtttctgttcttcaagaattgctaacagagttagaattttgaatccccttgctcttgtttttgagaattttctaaaactataagtaagggaaaagaggaaaaacttatcatttttcacttatcttttattttttcctttgagaacttaaaatgttcatgtatttctcatggtgttaatgtaattgagtttaaatcctactccttttggaataagccattaaaaatttaaagaataaagaagaagagaaaagatttaatcttttgcttataatttgtctttttctttttaaagtttaaattttcttaagtcttaaatgcattaggagttattatatcttttaaattttgaattcctattcttattcgaccagggaacgcaaaattcattaagtaaaaggaaaagagaaaagatgattatcttttatttgtcatttatcttttcatttaaaactttaaatttaaaagacttccaattgccttaggattaagagatttagcttactataaataagagtgcctttactattttttttttcacttttctttctgctttccatgccttggcctttttgagagcattggtatttcattttcattaattcttcaagtactcgtcaactcctcatgtagaaaattttagattttttttcaaaactttctttctttttcttcctctctgtattttcttccaaggattctagaactcactagaaatccttaaattccaaatttaagacttcaaaaagtcgaaaataaaatttcatgtgagctgttttgagctgaaattttctcctccttcttggtgtagtcacctttaatttgtcttgttaaggcttacaagagctatttttgggttgtaaggaattgaattttgaagctgacgtaccttgtatgatgagaagttgaagaatgtgtgataaatatgatccacacatggctcaattcactagggccaagtttattgtgcccacatctaagaacttagaaaaagcgggtggtgggtaagtgatggcaacagagcttcttaaggctgccaaagagagtaatgatttgagagatcgagctttgaagctaaaacctcttatattctacatcatctctgaacatcaagttcaattaatcagagatgactaccttcttcaaaaaactttcatttggaaactgtttaacgaattttttgacaaccaagtacttttagagtttaagaaagtaatgatggcgtaaataataaaatcataaacaagagatttttacgtgattcaggcattaactatccttagtccatgagtctattttattaggctcattggtcggtggctatttatacaaatacaaatacaatgaactttttctctgttccaccgttttcctcttgaataagaggacgcttagtaggaatattcaagagttaatagaagggttactgtaatgtgttgaattgatgaagaatcagtttccaatctaaagtaaaggtccaaaaaaaggatcccctttttgtgctatctgtgagatatttataggccaattctcttgcatgggctattgttggataggtcaccgtggggatgaaatcccaccattagattggtaggttgcgtatttcctatgtggcttataagggtgtcagatcatactggttgtactggctagacctcgaacgcgtgtcatcctagggtcattcttgttaaaatttccttttctcctagtcgttggattgtttagctcagtacatgaggacatgcatgctttgcacgatagcgtgtcatgggggaaaacctctgacattgtataggaaacaacttggtccctaggtctgtagcctgacacgtgtggataaaggtctcgtgagtcgaagtcgtacctaggactggtgtgacgctatggcatggtcatgtagatccacatccctcgcggcagtaaacagtctctgctctcgaatgggtgagactttgactcacaaaatagaggaggaccatggttcgcgagagtctatctcttggccagtagttagggagcctcccttcacggaagctttcatcacaagattaatgcccttatcttctcggggtactcaatgaagtacttgggcaacctagtgacttcttgaccttctttgattaaaatccatgtgtcatgcttacaaaaatgcagagaacatttaccccctaagcttctggacataccatggtttgggagcttgcagtatctttgcgcacgtgggacataggactggttctttaatgaactacgtcatcaactgccaaactagagtatcatttgtaacaccctaactagcat

SEQ ID NO: 49086 - DNA, 634 bp, Cannabis sativa
tctctctctctctctctcttcatggtggacctcaccagatctgaagctccatgactctgattgagccatctctaggtcccattgagccaattgaagctcggttttgttgatccctcgttgaaaagttttagatcccatatgagctatctttgggtcccgattttgtttataattttggatttagtttaagttggtggtggcttttgtgatttgtggtgataattttttttgtgatttaagattagtgctagtgtggtggtggctgcggtggtggttctagcagtggatttagtggtagtgattgtgatggcgctgataatggagaagaagaaggagaagcaagatagattagggtggagagaattaggttccagggaaaagaaaagaaaaaaataaataaaataatattttttataatttatttattgttataattttttaaattatttttataatattttaccagtaggtttagtaccaccttttatctttttcacatccttcagtccaatctttaaactgtgcaaagtttgttcatatataggtgatgaccgaggttttcggaaaccaataaaatattataagattaaaaagctgtaaggaaattagagaaggattttttacgtggttgggg

SEQ ID NO: 49087 - DNA, 2688 bp, Cannabis sativa
atgtattgtattagttattacgactaaattttttaatacattgtaagttgtattatttaatacataataaatagtccgtattagcttgtattataatatttataaaggattcgactcaactccaatcttcgacccaaatctggacctgactcgggactgaacccaggaccgaatctcggacctggccccagactcgaaccacgatctgggactcgaacccggaccctgacctaagattcaagacccgaactcggacccagacctaggacccaaccttgggatccagacccccaggatcctgaaccaagaaccgaactcgagcttgaacctagactcagacctcggacctggacctggactcgaacttgaatccagacccgggacctaggacccaaacccagacctgggacccgaacttgaacccgaacacgagatccaaacccgaactcggacctaggacccgggacccgaatccagacctggacctaggatttgggacctggacctgaacccaaacccagaatttagatccagacttggacctggatcgaattcgaaacggacacggaccagactagaccatatcggatccagacctggacccagagctcaaacttggacttagcacccgagacttgggacccggactcgaacttaggactcaaacccagaactgggacctaaactcggggcccaaacctagacctagaactggggcatagacccagatttggacttgaacccaaactcgagatgggaagggacctaggcccggatcgagacccgaaacttgggacccgaacctgagactcaagatctgaacctagaacccagacctggacctgagacttggacccaaacttgaacctggaccgattcgtagtcagtgttggggaccttggggtcgagtttattgaaaatatattacaactatacacaatttattgatacaagtcaacaccaaacatagtattgtattaaataatactaatgtaatacaatacaatattacacaatacaatatatcgtaccacagaaactctaaataaaaatatataaaatttgaaataaacaaaaatgatgaattaaataatgatcccaaaatattaatacaatgaacaaaattcctaagttattctcaagctatgcaatttcttttttctattttagatttttttttttcttcatgagattcaaattataatttaactcaaataataattttaatgatatagtaagtataaataaattaattttaattgatcgtaatctaatcggaaaaattttataattcattcaaccaaattttataggtatctatgcttcatgatacccaagttcttcacatttttttttatagaaataattacataacatattaagttttatatttttacgttcaaagattttttttatatatatatatttacggtattctataaaaacacaagaagacaataaaaaaaattacatgaaagtaaaaaaaaataacattaaaacaactaggaccacatccaatgtttttaaatctaataagatccgatccaattatatattggatattacattaaaccatccaatctgatccaattaatttaactatctaatcgatccaacttctaatggatattggattggatcagttctatctgctggatgtatttcatgtatatctattgatttaattcaggtttatctaatattttagacctagtagtatctattggattgaagtggatccattcaatctaaaaaaatagtaaaattttaatattaatttttatacatacatatttattttacgtatagcaaaataaaatctaattattcattcaaactaaataaaatattaattaatttgatagaatgttggattagatttttgaacagtacatccaacatccaatccaatttaattggatattcaaaaatagtatccaattcgatccaattgggtattcaaaaataacatccaatttgatccgatcacaattagatatataatatttttcggtcaattgtaattggatcggttggttatcattagattggattaatttatgcacacccttaaaaacaacaacaaatcaacataaaaaataatatacaaataacaaaaaattaacaacaaaataacaaaagtataacataaaaatacataaaaaatatcatattttatgtagaaaaaatctaaaaattataaaaatattaaaaattccgtataggccgtatttttataatttttttgttgttgttgtttttatgtgtgtgtgttttttgaaattgtccattttttataagctcaatataatacaagagtaatttgtgacgcaagtatttaagttttaactctcaattgttgataaaaacctaaatttaattttttacgttaataataaccaagttatatttctagaactccataagtatttgaccgttaagtgtgaagttataatccatttgtcattttcttattagtacatttaattaatttttaaataaaaaataaaaaaaaaatgatctggactaatcagggactgtcacgtggccattgacttaacacttaacgaccatgtacctacaaaaattctgaaaatataacttaaatattattaccgtaaaaaaataaacttaaatatttataccaatgtaatacaacttctgtaacgtccccgcttcaagcctcca

SEQ ID NO: 49088 - DNA, 1702 bp, Cannabis sativa
aataataataataatagatatttgtggctaagctcccttaacatttgtaattgttacacgcttacacatataatcttaataaaaaaatgatgacaaaaataacttattttacaattttgttacagttgtactcttttagttgttaagtgccaactctacatgacaatattattaaaccaagtattaaagtgatggtgtgtttctgagttgacacttaacttaacatttaaaaaagtatgactatataaaattataatataaagtggctttgccactatttttttattagggtgatatgtataaaaatttcaaatattaagagaatttcgcaacaaatatctaagtaatacatatgtattgtcaattataaataaattaaaatagtaataaatcttacatacgacaataataatttgagtatttataagtaaatatttaaattttaataattttttgatataattatgaaaaattatataaaaatggttgtagttataaaaagcatacatatatttataatgaactcattaattgtaaaaaaatataaaaaagtaaagcacgaattcgagttatgatatttaagaaaaacaaatcaactcgagtaaagcacaacaagaattcgagtccgaatataaaaagtagttgatgtgtttaaggaaaatggatcagctacttgaataaaacacaacacgaaaatacttggcttacgagtatcgtacctactactctttaaaaattttgacacgatccatattttttaatagcatgagataatatgacccatcttttaaaaatgcacaaaaaatatggatcaacacgacacgtacgagttacaacactagattatagactagttgactttactactaattcagtatattataacatgattaattaaggagaaatgctaaaaagtactagtggtgccaagcatcctcttacgtatcaatattgttattagtctaatttagtatcgagtctcatatagtttaatataatagtttttagagagtattactagtcaatcgtaaaacgacatgtcttgaaagtattagacaccactggtgtccaatagtgatgctcttaattaagtcatgatacactattaaaggatttttttaattataatttggcgtaccaaccaatgaatgatatgatgaaattaattgtccttattaaataaggtcttcctaacctttcaaaagaaaaattaaggtatcctaaacgacgacaccatataatgagtccaattaaaaattttgtgcattgattcataactaatatctggaatagtgagtcaactcttactgcactcttatcactttgggtagataatatataatatgtcatttaattcaaaaaaatcagccatagattaaaaatattaaattttaagagttataagtatttagtaaagcaagaaaacacatacattttgtttttttttaacaataatcactttcattgaaaagtaattaaaggtgagcacatcatacataaacaaacagtgaaaattatctaactaaattagtttatcattcacgctagagatggaaattggtcggttaatgtacggggaatgcaatccccgcccccatccccgttacttatttatacccctatccccgccccatccccgtctaataaccaacaaattcggggtaggggaatacccatcggttatggggaacccatcgggtat

SEQ ID NO: 49089 - DNA, 1301 bp, Cannabis sativa
ctcgtaaggcatgcataaccacacattcatagtaatcttttaggtttgcgtctgttgatcttctagctaagcgtcagctaatctcaagagttagcctttctaatttttgggattaacacttgccccctagtctataagaatttttttaagtattcttgttgactgacttcgatgagctttaccccatcttttggctctgcggctacctttttaggtgctcatgccttgaggtcttcttgttatgaccctttattcgggagtgttggatcttaggagctacttctattcagtttcattgtgggtacttgtcatgtggtgggagtgttaaacctcttgagttttctcgacctcttttatgaactttttttttttagggagctttttgccacttgggctttcttaatctcttttctagtgtaactttattggagggagtatagaatcatagagcaatctcaatctcttctttgttacttattggatgtaagggaccttgtggccctttagactatgctcaaccttaatttaagatttaacattttattgcgagagcttgtggcctcttaggcatctctcaactccttacatggtgtaattatttagctaggagagcttgtgaccgcttaggtgtcgctcaaccccatctactacatttgtggcacttaaagcacgttttgaatgctagaaatcggtattccttttagagaggtgtccctctcatagtcatatctatttcctttttttccttctttttttatttatttattttttgtgctgcttcaattagtttgacaatgtctattgacaagtatagtgaataagtcaaacagatatatgtagagtgataaataccatatgtaaagtgaaaatttaatatttcattgttaagataaacacataagcacttgggtacattttcaagtctcaaagattaacttaggtgccctttttgatttagtacaatgtattaaaggctgactcaccattgtcaggaatgctttccacggttggttggcgaaaaagaaagaactttactttaaagaatcttttggacatttgaagtttataggttgtaggttggaggtttttgcttgactgtatcagcttataagtgttggcggtatcgcctagcagacctcataagggtctgacaagattcccaaagaacattcacatgtatctatcgccaagactctgttaccctcctccacatggatgtacttctttgctctctcatagaaatcattgttggaaatttattttatcaggatcttagatgtactcacaagtatgttgattta

SEQ ID NO: 49090 - DNA, 1239 bp, Cannabis sativa
  modified_base (338)..(340): a, c, t, g, unknown or other
gatggtgatgaggtggcacgttattaggagtgcattagtttaattaacgtgatttacgttaatagattgtatattacgtatagatatgaaaatttccctaagaaaattctacaatgcattcatatttattttagtatgaaataactttttaatcaattttttttcataatcatgtatatattataattatttaagacattctgtaaaattttaagaaattcaaaaaaatttaacacgccgaaaatagagttcaaaccgtgattgcatgcgtgattattttattttatacacgtgtaaaatagactgtgtgaatactgttttctatattgtaaattatnnngaattttttaaaattttatataatgttttaaataactttaacgtacacgaatataaaaaaaatagattaaatatttttttggataccgaaataaatagaaagtacataagtatattctttttaaagaaatatattgtaaaatcaccctacaaaacatacatcatatcatgagaagactttttcttatttttatatgttagcattgttaagttatcattttatattaatgtaacaatccttgttggtattctagcaatattgtcctaaaaaattgttacttttttttattattaaacattttaatatcccaaaacaatagagatatgacacaataataattaataatttttttatattatttatataattgaaatatataaaactcaatatattatttatattttctcctttattaagactgaagccatatatggccacttggcaatcttctcaaccatttttttttttaaaatatatgtatatatattgagatggaaatctgagtaaatggcgtagctcatatacggttgaacttggttgaaaaattggtaataactccaaaaagacggtcaacatggaatattaaacacattggtctccactactatttatacgtgacgttctacgattagttaacgatattcaagttattttcttacattatatgaaaccctatatttaattacaccaataattatatgacatcgaaaaaggtgcaagtcacaaataccttttaataagaggattgttaaaatgtatcactctaacctaatattcttttcagtgtcatactgcttttagcagggacggagggactttagcccatatgtgggctaaagccctcactcaaatataaacatcaaattttttatatgtagatatatacatatattaattca

SEQ ID NO: 49091 - DNA, 1622 bp, Cannabis sativa
atgaaaaattatatgcgtattataatcccatttgattaaatttttacttttgtttatagctaaaaataagataagtataaaatttaatttattttttatcttttgaataagtactataccttttgtgcaaaaatatgatttttttttttcaaaaaagtattttatgggaaaattaaagaaaaagttaaaaaatatgagaaaatcaagtaaaggtaaccaaacgggtaaccaattatcataaaagggtaactaggtccctaatggtgttttttttttcttctaaaattttctcataagataacttttttgagaaaatattatatatttgcaaacttatactttaaaaattataaaaataaaaattctcataatcctatatatatttatgaaaacctgtgccaatggtgatctttaatccaactaagggcctcacgaactctcattacttttgccaattctggttccacttcacctcgatgaaaagaggtccgaccttcaacaagaaaatcatttgcattccgtgctactataccataaccatacccgtgatcctcttaaaacaaagctgcatttacattgaccttgatactattaatttgtggcaaaatccaatgctcagtcccatctcccacctgtacactaggccaagatgactctaacgtagagtattgagcatgtctccattgatcaagatactttttttttgcagttacaacaacgtcacccgccctcatcacctccttattaatattccacagcaaatcatttctgcccccaaagagcccatcaaactgtggctaaaatacaatgttgctccatatccaaggccttaaagggtgttatgcactacttaagaacatagttatttgggtttaaagatgtgctgatacctattctattccagcaaagttgtgcctctagacaaaatatcattttttttttatttatttaagtgaggggagaggaggtaaagtgataaaaagtgaggtgagaaaaaaaataaagttaatgttgataaaatggagtacaatataaactatgattaagaatactatttaaataaaaataaattagccttatctacaacaagggtcgaccctagctttgaccacactactatgaggtaacattttataattagttaacggttttttataatctttattaaagtaaaataagtagaactcaatatttaattgtactaataacaatataatacttaattataagtgctaagtatcataattatcctttagtatttctctccaatgatcaatttttgttattttttatttagtttgtcaaaccctaattattaaaacaagtagaaaccacaattattttcttggctatatgcatgtcaatgccatatctagataaacatgtaatagggataatttccaacttttttttttatttatttatttaatttttgtgtggcataaaaaaatataacttacaagttatatttattaactcacaagttaccaaagctttcattatttactctctttctaaataaatttttcattaatattagatttcggccgattttgatcttaggctagtataaatttttcctaaatgctttcatttgtattaggttttttaacttctcattc

SEQ ID NO: 49092 - DNA, 1064 bp, Cannabis sativa
tcttctcaatgggtacaagaaattgtccgatgctctcattcaagaaggattcacacaatcccttactgaatatactctcttcactcgtggcaaagaagacacattcattgcatttcttgtctatgttcacgacatagttataacaggccccaatattgcagctttacatcaaatacaagacactctgcatcagaaattcaaattgaaagctctcggccccttgagatactttcttggttttgagattgatcaaagataagatggcttatgtgtctcccaacgcaaatatacccttcaattacttgaagacacaggctacatcggctgtaaacctactaaagcacccatggatccgagaacgaagctcgatgatcaacaaggggaactcctcaacaacccctcatcttatcgacaattggttggcaaattactctacctcattctctcgaggccaaacattacatatgtcgttaattgcctcagccaattcatgtccagtcctagaactacacatatgcatgctctaaatcacctccttcgatacctgaagggacatccaggacagggacttttgtattccccaaactcatccttgcacctgcgtggattctccgactcagattgggcttcatgccccatcactagacgttccacaacagggttttgcatctttttaggagattgtcttgtctcttggaagataaagaagcagcctaccatttcgaaaagttcagctgaagctgaatatagagccttggcaaccaccacaagcgaaatcacttggctccaatatcttctcaatgacttgcacataccacaaagactcctactttcatttattgtgacaatcagtcggctatacacatcgccaacaatccaacttttcatgaacgcacagaacatatcgagctcgactgtcacttcatccgcgacaagattgccaactccaccattcgcctcattcctgtttccagtcaactccaacttgctgacacattcactaaaccattgccctcaacattactcaactcccatatatacaagatgtctgtatatgatctata

SEQ ID NO: 49093 - DNA, 760 bp, Cannabis sativa
aggtctgcacttgtatgctgcagtggctccacctcaatttgcaccttcgattgagaattgtcacttgaaacattgggtaaaatacattactgatttattttaaaagaaaaatcattctcattgaaaataacatctctactgctcaaaattttattatttttaattgataacaatctatagcctttgacaccaatctggtagccaaggaaaatacatttaataggtctttttcctagtttatcctctactgtgtgtgcatatgcatcacagccaaacgatcttaagtgcaatagagaaggaggcttaccattccacaattcttcaagggttttgagatcaattgctctactaggacttttatatattaagtaacatgaagtgtacaaagcttctccccaatatttcttgggcaaaccagagtcaagtagaacacatcttaccttgttcagaagtgttctattcatcctttcaacaaccccattctgttgtgggtttttgacaacaattctatgtcttctaatgcctgtttctacacatagttcatcaaactcattattaataaactcaagaccattgtcagttcttaaagatttgaccattttatcagtttggttttcaacaaaaattttccaatttctaaacatgttaagataatcattttatgtttcaataagaaaacccatacctttatgctataatcatctataacaaataagaagtattaatgtcctccaggtgttttgtgttgggttttgtgccc

SEQ ID NO: 49094 - DNA, 1031 bp, Cannabis sativa
caagaacacatgaacaaaatggaagagccgagaggaaacatagacatattacaaaaactggtctaactttgctagctcaatcgggtttggatctaacctattggtggtatgcctttagctcagctgtcttcacaataaatagaatgcctacaagggtcctacagtacctatcaccttatgaaacactttttcaaagcaaacctgactataatattttgaaatcctttggttgtgcctgctttctccatctgagaccatacaacaatcacaaattggaatttagatcacaacaatgtctatttttgggttactcttcacatcataaaggctatctatgtgactccaatgaaggcagattatatattgcaaggaatgtagtgttcaatgaacaacatttcccagcaaaaagtacttcatctccacatcaggtaactactgatcctttgtctaattttccttctacttccttttctacacaccagaatgtatgtgacactaatctttctcttattgatcctcctgtggcaaattttccacccaccacaatccccatggtccatactgagtcatcaataccaccacatacttccacatttccccacccgacagctgtatgcccatctgtcaccacatcctcaacccgaattgtgccacctgctcctatcttaccacctcaccatcataccagtgatccactcccatcatctctttccttatcccaaacttcaccaaaccaaataccagttccatcacctattcaagaaccaaacacagtcaaaagaactcaccctatgaaaacccgatccctgagtggcataagaaaaccaaagtcatatcttgcaactaaacaccctttacctgagtctctcctcccaactgaaccaaagtctctcaaagcagctcttagtcatcccaaatggcttgctgccatgaactcagaaattacagcactcaccaaccaaaaaacctggacccttgttccttatgaaaatcatatgcaggtaattaccaacaagtggattcacagagtt

SEQ ID NO: 49095 - DNA, 1118 bp, Cannabis sativa
ttttcttcgttttatgtcacgattcaagcctcgagtggtggtcttttgagataataactttgttgtctggtcttcttccgaatcctcagcttgaaacttctgttttatctgtatggtatgtctctataaccgctgtttcggtatgtgtattttacattttttgaatttgaaaacttacattaagtgaaagttttgttgttttaataacagtatgtctactattgcaacactctatacaataccagaaggacttggttcagctggaaggtaatttgtactatagtaaaaaaactttatgcattaatttgaataacaattcttaacattttttacccgaaaaccaaaatcctatcgtgggattaaggtttggtagctactaagtataataaagctcccacaagtcactcacacatgagcgatgtgggacaaaacacatacaaatttctttttctcaatagattaaatcacaccaaacacaacatttacctaattactgaaagaattcttaacatttttgttggtaactgatttctttttttctttttctgggacaaaatagcactagagtttcgaatgaattaggtgcaggcaaaccaagagcagctcgtcttgcagttggtgctgtcatgtttctttccgtctcagaatccattatcgtaagctcagctctgtttgctggccgaaaagcattcggttacttctttagcaatgacaaggaagttgtggattatgcaatgaacatggctcctctagtttgtctatctgtcatatttgacagtttacatgctactctttcaggtttagttctttcttgttcgatcgatcgatgtagtgataacattctcgaatctcgagtcactcatgattaatctcatcttaaaccaggcattgctagagggtgtggatggcaagatttgggggcatttgtgaatcttggagcatactatttggttggaattcctgttgctgcagcattgggtttttggttcgatttgagaggaaaaggcctttggattggaattgttgttggttctttcttacaagcatttttgctttctttgatagcagtatgtaccaattgggatgaaaaggtatgtgtttttactccacttttgatt

SEQ ID NO: 49096 - DNA, 2971 bp, Cannabis sativa
cggtgtggtaggaggtggctttggtacaacaggtgatggtgtggtaggaggtggtttcggaacaattggtgttggtgtcaaaggaggaggtttaggtatcactggcactggcaccgaaggtgggggcttaggaaccaccggtgctggagtcaaaggaggaggctttggtatcacgggcactggtgttgaaggaggcggcttaggaaccactggagtaggcactgatggagggggctttggcatcacaggtgctggcgttaacggagggggcataggaaccaccggtgttggcgtggaaggagggggcttaggtaacactggtgttggcgtggaaggagggggcttaggtagtacaggtactggcgtggaaggaggaggcttaggaatcactggtgctggcgtcataggaggaggtttaggtaccactggtactggcgtagatggaggaggcttgggaaccactggtgttggtgtggatggaggtggcttgggtatcacaggcactggtgttgaaggagggggcttaggaaccactggcactggagtggaaggagggggcttaggaactaccggtggtggcatcaaaggaggaggcttgggtaccactggcgctggcgtagatggaggaggcttaggaacaactggtgttggtgtcgaaggaggaggttttggaaccactggtacaggcgttgatggagggggctttggaatcacaggtgtgggcgttgttggaggaggcatagggaccactggcattggtgtggaaggaggaggcttaggtactactggtgttggtgttgatggagggggcttaggtatcacaggaactggcgtggaaggagatggcttaggtactactggtgctggcgtagagggagggggtttaggaaccactggtgctggcgtggagggaggaggcttaggaatcaccggggtaggtgttgatggagggggctttggaactacaggagcaggaattgatggaggaggctttggaaccacaggcacaggcgttgatggagggggttcaggaaccacaggcataggagttaatggagggggcttggggaccactggcactggtgtggtaggtgtggtaggaggaggtttaggtactattggtgatggtgttgaaggagggggattaggtattatgggcactggcgtagaaggagggggcttaggaaccactggtgctggtgtcactggaggaggattaggtaccactggctctggcgtggatggagggggcttaggaactactggtgctggtgtcgaaggagggggcttcggtataacaggcactggtgtcgaaggaggcggcttaggaattggggtaggaattgatggagggggctttggaatcactggctcaggcgttgatggagggggtttaggaatcactggcgtaggtgttgatggaggaggcttcggaactaccggaataggtgtcgatggtggcggctttggaactacaggtgcaggcgttgatggaggaggctttggaactataggtgcaggcgttgatggagggggcttaggaatcactggcacaggcgttgatggaggaggctttggaattactggagtaggtgtcgacggaggaggctttggaactacaggcgtaggcgttgatggagggggcttgggaacctctggtgtcgaaggaggtggcttaggaaccactggtgttggtgtcataggaggaggctttggtaccactggtggtgatgttgaaggagggggcttagggactattggggtaggagttgatggagggggctttggaactactggagtaggtgttgatggaggaggttttggaattataggtgcaggtgttgatggagggggcttgggaacctctggtgttggcatcgaaggagggggcttaggaatcactggtgctggcgttagaggaggaggcttaggtactactggcgttggcgtggatggagggggctttggaaccactgggacaggcgttgatggagggggctttggaatcactggcgtaggtgttaatggagggggctttggaattactggagtaggtgtcgatggaggaggctttggaaccacaggcactggcgttgatggagggggtttaggaacctctggtgtcggcgtcaaaggagggggcttaggtaaggccggtgttggtgttgatggagggggctttggtgcaactgggggtggctttggcatggttggtggtggttgtacagctggcggtttgacgtggggaggcttgggagggtgcacaatgggcggtttgggagaatgtggtggtggttttggcttgtacggaggatgtggtttgacatggggagggtgtggtttgacatggggagggtgttttggtggtttaggatgagatgggtgttttggtgggtgtttaggagggtattctggtggtggacagtagggtctagcaagggaagtgagtaaggtacccaaattgagaaggaggaggaaggtggttgctagaacatactttcccatttttagttattatggttactaagtgttgtaatgtaatgtataccctcctcactctctccagagagaagaaagcaaggtagtgaaatgttgagataactctctgctagagaaggtccttaaatagtagagactaggatatttttcaactagtaggctaggtgtggtatgggattgtatatgtagtgacaaagtgagccagatacggctttatacttgatatgatgatagagaaaagaaatgccggtttttgattgttagctaataaaaatctgtttgtacagctgtaatatttttgttcaatgatagtttgttactttcaaggtcatcgtcgtgttatagtaactaattatatgaagttacgtccatattaattttacactgacacatttatatagatgacgttaagatagatcgtctgttcataatgtcacgttaatgaagatttaagaattagcaagaacatata

SEQ ID NO: 49097 - DNA, 1267 bp, Cannabis sativa
  modified_base (812)..(814): a, c, t, g, unknown or other
aactaagttgtattctggcaaccgaggcactagcacccaagtcttgttcctttttaaggcaacaatctccttgttcatagcttcattccattccttagattcaagtgactcctcaatgcaactaggtatgccaaggctcgggttccatttggcttgaccaagataaacttttggtttaaaaatcccagccttggcacgggtcaccatggggtgagttgaaacaggttgtggtactgctggttcattgggctcttgtgcctgcatttcttgttcaacagctggaacagataaattgtcagaacaattagtgtgtgaactgccaatattagtgtgttcattaccttcagtagcattgtcgattgatgtgcttccagggaattttgtgactgaggagctgcaccagcagggacaaaaccagtgggaagtgaggtgttttcagtaccagaaaaatgtaggtttggtagttcagaccactagggatagtggataatggtctgctgttcagcagcataattgtttaggaaaccacttttgaaaggaaactctttttcattgaagattacatccctagagatgtaatcctccccgttggacttaggcatttatagcctttgtgggattcattatacccaaggttcacacatttaagtgagtgaaattgaaatttttgtgtttgatagggtcttatacaaggaaagcaagctgctccaaacactttaaggaaggaataatctggtttggtattaagtaaaacttcaagtggtgacttgtgatccaaaacaggtgtaggtaacctattaattaggtacacnnntgtttggaaagcatcaacccaatacttaagtggcatatgggcttgagccaagagtgttaatcccatttcaactatgtgcctatgcttcctctcagctctaccattttgagctgaagtattaggacaaggatgagtgaaattgatgccatgttctagggtaatatcagtgaaggattggtattcaccaccccaatctgttctgatggttttaatggttgttccaaattgattttcagcaagtgccttaaagtgtgtgaaggcagtgatggcatcagatttagatttgagtggataaatccaaacatatctactaaaatcatcaacaaagtgaatgtaaaatttgtagttgatgttagatgtaaagaccgcctatgaaagaatactttgtattattaattatttaagaattatgtattaataattatggaatgcatattttagaaatatattata

SEQ ID NO: 49098 - DNA, 2186 bp, Cannabis sativa
  modified_base (1982)..(1982): a, c, t, g, unknown or other
taccatagctagcttgcaaagaaaactaattaattattagcaagagaatcaattactacatgcaaaaaatcaaacttagagcgttaaaattatcacataataaagctctaatattatttagaattaaacccaaaagaaatatatatctagaaatcatggacgaattagagttcgaatcaattaatccttgacaatctaactcgaactgaatgttgtttaatatagtctttaccctaatgaaaaacataaaattgaaaattaataaatcaaaccttagtatatatatatataattacttagtttaatgagttatgtcatctctttagttttcatttatcgatctgctaatgacttatagtactcttataattagattctcttgttcttttttcaaaattattttttcggtcaaagtgatgttcatgttaagtgtttggtactattatttttgcagacataatcaattagtaaagtttaattatttttcaaaaataaatgctgaatattatataacttgttcaataatcattccagtagataattaatacaatgacaaaaatttctggtgttaatattataaaatgaagcttgtttataggttatggaatatttgctactttataattagaaaatttggcaaaaacagaaattgtatatataaaagcaaaagttatatcactaaataacgattttcctataaatatatacataatgaatttatttttcaagtatatgaatgttaaagaataaagatctgtgaggagtaatatatataactaaatgtgaaatatttatgtatagctagctgagaaattaataaataaattactaaaatcactagagagccaacattaatatcatgcaaaatagatcagaatcttttcaaggtatagttagttacctaagaatctctttgaatgactagacaaattatatctatatatgaatatatgtgtataacacataattggtcaatttttagttttaactattcttattgatgaataataattttatattagatactagcggtgcgataggaaaaaataattgtagctatactgtaagaaaaaatagtagtagcaaaattgtaaaaaaaattaattaaactgaatattttgtaaattataaattttaaaatattattgttaagattttattatattaataatgacaatgtgacaatctagttcataataatcataaatatataaattttttaaataaaatttttatttattttttttctcaaagtttaaatttatattgttatcacatgtaaaaaaacaaaaactcgagtatataaaaaaaattctaagttgatgttgttttattaatgtttataataaaaatatacatatttttttaaacaaaatataagaaaataaaagatttaaatattattaattttattataatttatttattttaaatatttttatttttataatagataaaaaataaattagttttagtacaactaaattcagtattgatatttctttcaaaaaaaaaaaaaattcagtattaattgatattgggtattagtagtgtccaacactttttaaaggtgtcatcctacaatgatcggttagtgatatcgatatcgatagcgatattttaacacttagaaaagtattagatattgatccgtataactttttagcattaattttataaatttattaaaaaaaattaattaaaataattttttctaacatttagaccgtaccaatttttaatttttagctattatttttctataaattttcaaataaataatttttcaattgtttaccaaattatacttttttattacattttttttttcttcagaaagtaccttttaaatctgtgtcaaattaaggaaccctttagccaattactatcagtgcattttaacaattttgaaaaaaatgaaatcattgattatattagtgaagcactcaaaccttgctagctatatatatatatataaatanatatatatatatataaatattgggtgcccaccattattaagattaattgtcaccatacgaagaaaatgtggctcttgaaaagatggtcaaaaagtgaccatatataataatattaattatactcaattacatatattaatacaaattaaatttactggttaattgatatatatatatatatatcatcatatatatgtatattca

SEQ ID NO: 49099 - DNA, 1268 bp, Cannabis sativa
tgatcccatccttgagaagcgtacaacacgtatagggcaaaaaggtatttaatgcccttgggagtaagatgggtcagactgatgtggtagtaatttgcaatctctttgaagtatggatggaatggcaacattgcaccctgcttggcatgaagtaaccctctccaagatcagttgcaagtttcctgggagaaggaaggaaacactcgacctacccaaaaaggccttcctcgaagagattggtcaatctcttaaatgtcaagacggatggtggagagacccattgagctctcctcagacccctcctgtttatggggcgagcctcagtgtattcttcctctacgtaatctcggccagcttctagaacttttccaatttcagagataagttctccttcttcattaaagccaccaaatggcatcactcggactcccctctcttccttctctccttcttctccttcatcctcagagggagtagcatgacggacctcgccatgctcctcaacttcttagacctcaatgtctctctcagcggcactttcttcctcgaccataggtcgggcttgttccatccaactacagtgaatagtctggcaaaatgagggtcactatctgaagttttcctcattgtctgttttgtccgttccattgctttacgactgggcgatgaccttaatttagttgtgtgtcgagcaatagttataacaaacttagccataggggttccctcgacaattggggctggacacccttcaggaagagtatcattgacaccagattagactctgtatgtccagttagtgggcagataacgcctctaacctttcttcaatttccagatgaaatgcttgtatccttccccacgcacttggtcgggataccaatgatgctgcaactcgggctccaaagatggtgtgtgctcactactcacttcccagtcttcaaagctagaatttgagaggttaccactagataaagatgaatttgcacggagtcgagggtggtcttcgtatagaagtcggagcaagtcctggtcaatgtggtgcttgcctccccagaaatcatcagggttcatctacaaaaggtaggagacaagaaaataagagttggtctaaagaagagatgaaaaatagattttacatgtcgaccatgccagattaaggataaaaacaaagggtttcactcaaagtttatctgctcactgttcaaagctttcttgatctgctcggaagacaacgtcaatggatttcttggcaagttccttcaaag

SEQ ID NO: 49100 - DNA, 2777 bp, Cannabis sativa
  modified_base (227)..(231): a, c, t, g, unknown or other
  modified_base (2549)..(2564): a, c, t, g, unknown or other
aatagctcaaatccaatccaatctgcacaatatgtcaaatctaatctaatcgaatcctcaaaaatgcggatttgataaattattttggatttattactttttaatatttatgaaaaaatatttttttttccacataactagtaacaaaataaaacaaattattattttatgtcttcaataataaattaaaataaataaaataataaaggataaatactattttggannnnntgttttgcaaaagttactgattggaccttttgttttgttaaatgacaaaatagaccacgtattttttaaaattgtaaaaatatgattttgagcttaatttcgacaactcttttttaatataaccaacttgaagacaatttctaacacgaacagatacaaaaaatgtaaacagttttgtcataaacacatttaaattatattattattaaattttattttaacaaaaaatcagttcagagtcctatttatactattctgaaaatacatgatttattttttcatttaacaaatagatggtccaattggtaatttttgcaaaacacaaggtacaaaataatatttatccaataataaataataaattcaaataaagaaaaaaaaaattgtatgtataaaaaaatattaattttattttaaattatatgtagaaaatatataaataagaatagaatatatatatttatccattaaattttaaaatataattgtattatatgtatttaacttttaaattattattttctttatattaaaatattatttgtacatataatttttatattttttttataaatatgtttgaattgaattaaatgtgttattaacatacaaattagattatattagatggtgtaaattagattggatagaatattttatgaaaccaccacctccatcgcgatatctctctccgttgctccctttcaatttctggattgcatccgttgctcctttagtttacggtgtcgtttagcgtttcagttttcttcaattttattctcaattcattgaaaatgaattctctcgcataatccatagccgtttcagatctagagaaaatcatcgttttcatcgaatccaaaatctctgatactcctaagcattgggcgagattatccacaaccttccacgatcttgacagtaactgatcattctttactgcgaaatcgaaccgcaccatcgcgatctctctgaaatcatcgacaggactagctttccgagccatcttcggtgtgggcgattcgaatttgaaacattacattttgagactgagaaaagagaaagaggctaaggctttcccgaggaactatagaaaatgatcgccgattaatagtatccccgaaacagagcagaccagaccgatttgatcaaaagacaataaaagcagaaaaagaataacagagtctattgtagtgagttgcactcaaccaaaatcacattggcttaaatcatgcatgtgtcactttattataaaaaaaaataagatcttactttggcatcatgaggaagagcaagagcagtggtaagaagagaatagccagtaaagactccaacttcaatagtcttctttgcattcatcactttcaaaaacatcgatataagctgtccttcatccacaggcacactcatcggactcctgcaattatatatatatagataaataaacccaaatttaaattaaattaattaacaagaaaagatcgaggccggcaagaaaaaaagcaccgtagtttatagttcttgacagtggcttctctaagctccttcaactgctcatgttctcttggataacaatatgtttcatagatgtactgcatgcaaatgaaatcatcaaaaatcaaattaccaaatattaaacaattaatggattaattaatatatatatacctctagaagtgctggtgatttgaggatactcttattcggtatagctacttcttctgccatttccggttgctgaaaaaattccgggctagcttttttgatgatatatgaggcaagtgaaattaatgaactgtgggatgatgaaccaatagtggaattagtagtggagctttaattgaattgaaccaaatgccacacctcattattagttagacaacactgatatatatataaaagttgaaaatatttttttttatgaattaactaaatttatatttaaataaaatttaattaaaatatatgtctttttaagagtattgtactcaaattattcttcatactcttaaaagtaaggcataatttcaatataatagatttgtattttttataaatagatgtgtaagtttgtaagaaagttggggtaaattttaattaaagaagaatgaaaactatcgtgaaatgatagaagtaaaattaatagaataattaaacataataaatttaaaaaaataaagtaaaaatcaaaagcatcaaattaaaaaaaaaatatatatatatatagtgtaatttcttttatttttaaggattatttcacaaatatacaaaaacaacaaaaaattataaaaatacgatttcacagaattttaaatatnnnnnnnnnnnnnnnnattttatttataaaaaatacggtatttttatattgtacttttgttaatttattgtgttggattaaaaatcctatgtgggcacatatgtataatgtatatgctattataaagtagtctgatacaaaattaagtgaccaattatggtatgagtatcaaaaaggtattaaattgtcatagaaataatgtgtaaataccataagttaatttataatt

SEQ ID NO: 49101 - DNA, 2787 bp, Cannabis sativa
  modified_base (243)..(243): a, c, t, g, unknown or other
  modified_base (331)..(332): a, c, t, g, unknown or other
gtagtttagccgccaaaaattcagattttgtggttaagtgttacaaactgtaaagttcaggtagtttagccgccaataccccaaaaataaaaattacatagatattttattgggtaaataccattttagaccctgtgttttgcaaaaattaccaattagaccctctgttttgttaaatgataaaatggactttgtattttctaaaatggtacaaataggaccctaaactaattttttgtcaanataaaatttaataataatttgatctaaatgtgttatgacaaaactgttcatattttttgtatctcttcgtattaggaattgtcttcannttggttatattaaaaaaaaagttatcaaaaattaagctcagagtcctatttttaacattttggaaaatacaaggtttattttatcatttaacaaaatagagggtccaatctataatttttgcaaaacacaaggtctaaaatggtatttacatccgtcagattaaaagaatagagatccaacggataggaaataagggagaattggaaaagatggctcattaatgctaatgatgtgcctcgaaactatgaaccgccaaattcaaaagcatgcaattttttaaattgggttatgacgaatataccctcagtaatcatttaaaaagtacttttaattttaaaaaaaaactttttaagggacaattattatacccaaaatttggctgtacttcagaaagtgacacgtgtcaatctcgtggaatatgaatcaatagatataataacaattatatcattaaatgaaaaatacaataactcattaaatatagaattaatagagtatattcataactcgctgatcaaatagtcttaggcgagacaatgatacacaaactatgaattcttgtattggcgagagaccatcttgcctcagaaagtataatcacgaggaaactacggacaatatatagcgaggcgtctatctcgctatacattggagaatattgacgaggtgaatcggcccttaaaatacttagtgtataatttacattataataactaagtgtaacaacttgggaacatgtaggacatgattgtccaatctgcaaggccatatggtcaaagagcattttttaagtttactcagtatactggtgctcctgccattactggaaggcatatgaataaaccaagtcattattggtcgtctatgtacaaagcgagatgcctcaatcgagatggctctacccacgtcaacgttaactgccttgaagataggaatgataagcgaatgtgcagttatcgattttttttaatgaatctagaaaattatattagctcacaaaactttttacatcctaatagcacccgaaaaaatcaagcctaaattatgtatccatacaatttgtacaagaagaataatcgggttttacaatgagtagaaccactctttgtcattactagaaacttttttaggccaaaataattccactctttagaggaccccagccttcaaatccttgcacattctcatgccatcttgagtttccttatcccagtaagacacatttctcatcttccatatatgataaactaagctagtaacaacagcagctattacaagcttcctaaacttactgattttagctctctcgagccatcgaatcagaccagcaaggttgtgattttgcagtttccattacagccaatctttgatttgttgtagacacaaccgagatattgagcagtcaaagaataagtgagctgaagtttcagtatgcattttacacagcagacattgttgatcaacattaattcccatcttgaacgatctatctcttgttttgagcctttgttgaatagctagccaagatacaaaactatgtttcggtgtgttaagtctccccatatttgtttactccaatgcactttcacctgaactggatttagcagattgtaaccttgagccacagagtacttttacaccaacagcttgccattcaaaccagtcttaaactgctctttgagtctcaccaaacatgtcaagttccagctagcttggcttggtaggctgtaaccccaccaatcctcatgttgcggttatcgatttgccaatggatgaagcaaaagccattggaaattattctcaaaacaacaactttgggttcaaccaaggagggaatcgaaggaatagtgggttctatcaacagagaaatcagaaccagacacagaatcaacaacagactcagcagtaaggctctagtggaaattctggtcttcagacagatttattgttacaatttatgacagaaactagatcttccattaaagagttacaaactcaaatggggcaactggcaactcaggtagcaacccgtcctcagggaaacttgcctagtacaaccgaaattaatcctaaagaaaactgcaaggcaattaccctgaggagtggaaagaattatgatgggcctgatgtggtacaaccattgaatgaagaagttaaagatcaaccggcaccaactccaacatcaacatagaagaagactactaatagtcatgcaccacaacaacagtctccgctaatcagtatagatcatcatgtgaagaaaccttatcctcagagactttgaaagaccaatatagacaagcatttctcaaaatttctagaggtctttaaaggactacacatcaacattcctttcgctaaagctttggaacaaatgcccagctatgtgaagttcatgaaggagatattgtccaagaagagaaaaatggaggactatgaaacagtggcattaac

SEQ ID NO: 49102 - DNA, 2213 bp, Cannabis sativa
  modified_base (36)..(45): a, c, t, g, unknown or other
tttgttaatatgagacttagaaaatgtataactaannnnnnnnnngaggttattcttatttataactagctcaaattaaaacttgattttttttataacaaactagaggtacgttattctttaaatagaatattcttagatagaggtttcactatataagttaataatttaagaggtctttaaacctttttatttatagttatttatcaaaaattttaaaaacttaatataaaaaaataaaagctgagaaaatgaattaaataaacaaaatagagaaagaaatttttatgtggttgagatattaatgaaccctaatctatgagttaattgtattaggctaagtagcattgaagtattacaccaattttcttgacaaacttaagaacccaagatttttactagtaataaatttccaaccttttgtatgaaggtataatgtagtatttataggctaggatctaggtatgggtatacccgagacccgctagggtttgcgtgtaaacttgacccactgggataaatacatataatacactgactttgagcccacaagctgaggcccagcccatgggactgtgatcttctgtacgatgggggaccactttgatgtcaacaggtggcatgcgtttgccaactctttgtgttgtagctgtcagagtagtggtcgttagacaaagcgtatgttccctttgattgtgtgggcactcttatggactaacgcatgggaaaaaatcctgacattgtgggattcggtgttagaagatcgccatgtcaactttagctttcgagacgtctcttggaatgctcatccaaagggcctctatgatttttttctttttgggcatgatgccttctcggaaccagagagatccaaatcaaggtgtaagcggtcggtattctggatgaacttgcaacccatccctttgtgtggactcagctcattacctcaattaggcccatgtttgggcttcagttgactgtctttgatttggatgttccacgagtcctcctttcaaaaacacgaataatatttacccacaagctttcgaaacttgagagttgtgaaggcttggagtattccatccaaattattatggaaatgtgagaaatctttgaaaaggataacatttttgacttctatacttttaattgtggacatctatgagtcttttgattccaacagattggggaggaagattagaattagagattgataaatattctagagccaaagatagttattaaatcgttagcatcacataaaaatattcctagtctattgattccaacgggtggattacatgtggccttagtttcttggtctgtgaacttcatgcgtgtgatgcctagatcagcacgatgacgaccgaatcatgtcaacgtgtaccaaggtgaatatttttcattgaaagcacctcgatccaatgcttgacatttaatgctaacttttttattctcagaccgttatattcttgtattttcttggatgtaatctgaaccattgattaaggggcatgaaaatcaccatttttccttataaatagagtgaaaaaccttcattcaccacttttgcccatttaacattttgaatttaaattttctgagagagaaaagacgaaaagtgtttttgctaatgtccaaccattttgacgtgtgcctccatcttcttcttcacatttgtgcacgattaaatccaggagcaccactcccagacctgacgtttcctccttcagacccatcaaaactattggatttccaggcagaaatagatagacttatagctcgtgcttgcaagattcagtccaatcaattgtatagacaatatttttgttgttgtgttgttgttgcatccaccacacgacgtccaaattccttccttgagtccttcgtcttctccaaattcttcgctttcatcatgcaagtatcttttacacttctggaattttataatacgtttgagatttaggttagaacgaacaatttttttgagaatgtatttgaccaaattttattgcttgcatgtctactgtatgagatagtgaatagggtttaggctttcggggttgtcttgaacgtccttgaaattagaattttgattttcccgagtcctgtttgtagacaatattaggttctataaaattttatctttttggtgattttttgcttaaacactgaactaagaaaaatggtgtcgagtatggtagaattttaat

SEQ ID NO: 49103 - DNA, 764 bp, Cannabis sativa
cagtgtggtgtagggccagtcgttagtccatgaagtagtcaaggtaacgtactcgtgtataagagccattattccgtgagtgtagagacctaatagagacttgaagcgaggatgttacaacatgtaattttctctcacagcgtttgaggcacgagtccctttttttgctatagctttatgttattcaaatttttgttggataattagtttttttgatgtgaatttctttgttattgcaggaaaaaggatgttatagaatttctaagtggattgcagattgaaaatgaaggattagaagatacatgcatattatacttctttaccttcatatttctccaccttttcaaagacctttagttgttatgcttttgttatacttgaaaaaggaaaatttgaatgagaataagaatggatcacaaatgaagggtattttggttattgaaataatataaggtcgaaaataatataattcttttttataagggtattttggttattgagttattttgggtcaaaaatagtataatcgtattttgttcattgagttattttgggttgtaaattttttgtcgatttatttggtttggttaaaatagtatatttgggttaggtagggcacacacaacaaccagaagttcccccgcccaacttgctaagaaagaaccccaatgaacatatttgccatgattaactaaggtgtgattcttttatcgcatatacaatttcgatatgattataatttataccgcttttcatatcaatca

SEQ ID NO: 49104 - DNA, 651 bp, Cannabis sativa
tatgacaaatggttggatgaaacgcatgttgaagccattaatggagaatctacctgttgcaggaactggttagccagttttgcatacctgacgaatcggttaaccggttcgcagcaagtggcaattccaaggtctttttagtcctttcaatctcgaatttttctctatataaactctaccaccgagtttctatttcctattcagattttttaaccctaaatagaagcctccaaccgtcttctctcaatttttccctctccaaacctaactttcacatcctctccaaccctctacctccatggatgattcatcttcaagaccgaagaggcaaagattctcaatgcaacaaagggaacaaagatccaaagcaaggaatgacctcttctcccatgaaaagtatgcaagaagattcaatgaggacttctcaaaaagagatattctaaatgttaagtaatgtgttctcaaagcccttgagtatgtcaatttcaattctctttttgaacatatgggatggaaaaccttgttagaaatttaaaccaatatctatcctaggctagttagagctttttatgcttgctttgaaactcattgtaatccatatagtgttgagggatcctcaaaggggtagcatttgagttaaccattgacaag

SEQ ID NO: 49105 - DNA, 968 bp, Cannabis sativa
atctaagatcctggtaaaaaaatttccaacatagacaccatcaaagatcaaaatactaaaaaaaaaggtcaaggctataattttccttcgccattatctccatatagggttaagatctgaatatttaacagtaaaatatcatctttagctttggaaaaaaattaaaagaaagatatgactatcatattgccaaaagctaagaatgactggttgcacctaaggttgtaagatttttaaatcagtaagtgattataactctgcaatattttatatcacttctaaattattgttgtgttgagaaaaagttactgaccgaaatgttagaaaaaacatataatacttttcattccttgataagagcctttttggaataattcgagtttttgaagaaaactgatttttatgagtaaaaagtaatggtttggtgtttttatgctagatgatgttagtggatggattgacgcaccaaaacaacattttcctagagtttcgaaagtccgtgaagagtaaaaacctgtgggtggttactgcggcgaaggctgaagcgagcataaaaaagataaaaataaaaatatgtggaatcaggccctgtcgtcacggccacgacttggctagttgcggtgaggaccctgtcgccacggtaagcaaccctgtggccgcgcacagtagtcaaaatctgggcaatgcgatagaatcctcgagttgcaaaattgagatagaaacacagagagagagagagagagagcaaggaaaatacggagattgcaacttcgagtgttcttcatcataattctttttcttctccttaaactcttactatttattatgattttgattataatgtctagttctaagtagctcccttttagttaagggttatttcaaaatccgagacatgaatttttaattttattgattaatgttaatttttagtttctattatatcaaattgcttctattcttttatg

SEQ ID NO: 49106 - DNA, 1135 bp, Cannabis sativa
gtacaatcacgggacaaaatcatatcccataatttatatccataaatctaattaaatggtttaaattaaattttgaaaactataacataattaataatttttttatttataattaattttaattaaaaatcactactaaagaacaaagaagtcaatatgagcccgatgattaggagatacattgataaatggcatcaaccaaaataatatttctaatacaatgaagatatttagcccactagactgtgcttacagggttaataaagtaaacttagtaagagtatcaacaacaatattaacagttttggcacaaaaaattaagctcacaatataaaattttttacatgatgctttgatatctgaaaggatccaccccaaaaatgaatctaaattgaaagaattcttaattatcagccaaacctttgcaatcaaattcacgttgaatgttgtgaagccaaaaaaattgcattgattgacatcatgacgtaccgcaagagcttcttccatatctagttgaaattttcttctaattttcaaattgcgctatccaaaaataccccatgaaagtctcgagccaccatgcccaaaccacaaatgccattcgcgagatcaatagaagcattagtgttcactttaacaaatccctcacggagacactaccatcgacgctctttgatcagacaaatcaattagaggtggagtgaaactctgtagggataatggtattttcatgaatttacttattttgatagaactagatacgctaccaagtgattaggattaactcaatatcatagctaagaagaggttgaattatattacaaatgaaaccaaaaaatatcactaaccataccacttaagttttcaagcttaaacttgcaaagtttcctcattagatcgagattgcgacaatcccaaaggacatgataagtggtctccaagtcaatcaaacaaatatgacaaatgttttcattgagatgagcccatatttttgaagattgatctttagtagagattcaatttgaaaaaaacatcactatttattctactcatattatcatcaaattacttacacataaataagaaaacattgcagtcctttaaataagtcaacacataaataagaaaacattgc

SEQ ID NO: 49107 - DNA, 1305 bp, Cannabis sativa
tatatatgtggagataaatatgtgacaattataaagtattttgtgtgaacaatacgttagtccaaagattaatttattgtttgacaccgttttattgttaatgtttgattgttatactaagtgtaccacttacagttaatgttgctatccaaatacttgatattaatgtgtatttggtatcttgagatagaattaaccaatttttaaatttattatttaattatgaatattgatgtgagcttgttttatttattctatattcagctagtttattttctgttgcctcaataaatgctaatattaattctattcttatgcttaatgagattgattttaatgattggaaaaggaacttacttatagttctgagatgtacggatttagaacatgtactaagggataaacaacttgtacttttcactgaggaaagtactcgtgatgattaaacaaaatttaagaggtgggatcgttcaaatcgcatgagtctaatgattataaaacataacattcaagaagcttttgaggcatagaatctgtaagggtaactatggccaagaatttccataaataaattgagaaatattttgctaaaaacggtaagtttgaaatgataacacttcttggttctttaatgaacatgaagtttaagggttgtatcatattgtctcaagattaaatatacttaagattgagctttttgatgatgtgcttgtgctcatggttttgttaatacttcctccacagtttaaccaatttaaaattagctacaactatcaaaagggaaaatggactgttaatgagctcatttctcattgtgtgtaagaggaagaaagatagaaaaataacaaaactaaaagtggtcacttggccactacccctaaggataagggcaagaaaacaaagtttgagaatgaagctgctaagggtccagttaaaaagaaacaacaacaggattctaagggttgtttcttttctagccaacctggacatgtgaagaaagattatgccaaatatcacgcatgacgtgtaaagaaagatattaatattgctttggtctatttagaagttaatttagcaattaaaaccatttggtggatagattctagtgctactcctaacataagtatttttatgcaagtttcctaagctaccgaaagccaatgatgatgaaagacacacctttgtgggtggtggacaaatctcgatattgctgttcatttgaaaacagtcagtttactttatctttaaattcaaatgttattaaaactggttatttaaatgcttataaaaatatttatttgctag

SEQ ID NO: 49108 - DNA, 966 bp, Cannabis sativa
tacaccgtaaagttcagtggtttagctgtcaatatccctttaatcaatcaaatgtctcatgtatcccccactttgattgagtaaatgaaacacttcatagagacctcgcttagatgcataaagtaaaatgtctttcgagttgaattttattttagtgtaattaccacaaagtttgttgaaattttgattgtcgtagctttgaaccattatttctttcatacaaaataggtgataacacacacatctttgttagagttcactggagacctcattttatcttgcttgtaccccgttaatggccatgtgcaatatctacatagactctctatagaataacttccaattctcataagaggcagcactaccactagtccatataggtagaatttagtgtctcacaactctatttagacacatctttccataaacaatctttcagttttagccctccgaattttattgttagtactcgttcatagatgggacaagttgagtactactctttcattctattgacttgttattaactattgaactcaagactaaatttttagtagtgttaaagataggttaccattaatgagtaaagctctaagggagtttagaacacatccctcaaatttttttgcttctatcttgtacggaaattaagcgaattgttataactacatatgtttcgattctaagtgaatcttgctatccaaaatttgtgtcaacttttggagtgacacaagttttctccttaagtatacttaagctttgaaaattgcatcatcgaagattaatttttacactttcttaacttctcacaaattttgataccaagcatatcaaaatcatttgacacaaacatgtctaagttatactcaaatttaaggcactaagcatgcctaaatttcacatatcatccattcttttatcaaatgagcttgataaatattggatattaccccccccccccccccc

SEQ ID NO: 49109 - DNA, 837 bp, Cannabis sativa
atatttatatatatatacctctctttcgttaaacatggggatttggatcaaaacgacagggaaattagaggagcccaattcgacgtcgtcttgaatgggttcatagttgtatcttttctctggttttggccagaaaagtttgaccaaaacgatgacgattcccatataaactctctccatgaaaagcattaaagacatagctaagcaaatgtaaactccaatcctcagcaatgggactatcaatggtgctttaattagctcccacataagtccaatttgagatgcaatgtcatatccaacaccaggtcctccctgaaacgtttctgggatcagaattttctgagctgtttctgccattttctcgagaaaatacaaaagggattttctttctttgtttctctttgaaattgaatgctgaaaaagaatggattttttttattgggtcggaacagaaaagtcgaaaccagaacaaaatgtttcagatccctcttttctgtttctctctctctaataagagatggaaagtacagaagagaaaagaaagattttctttctgtactttcctttctcccaaacactcttcttcttcctcctcttcttcttctctctagctaaagatttctgctttctgctagagaaatgaagcagaggcagaagagcattgagccactggtttttttaagtgagagagagaaagagaaatggcggaagagagagatagaaaactcttgatagagagagaaacaaggctgtccttttatagtcagttttgggtcttatttttccaattttagttttttgtatttattgggctcaattaattataattatttattt

SEQ ID NO: 49110 - DNA, 700 bp, Cannabis sativa
atattcctacgaggaaaaaagaatcccaacaaaaaagtataaaattacatagaaaacaaaatatttaaaaactagttacacaaaaaaaaaaaaaaaacttaaaaataaacaatatagattaaagaaactaatttcaaagaacataaaaatagcctaataaaaaaaagttaaacaataaaagataaagatgaacaaaaagatttcacaaaataaaaataaattatgaaaaataacactataaacaaaaaacctaaaacaagaaaaatcataaatgaagaaaccagtttcatttgataagaaaaattacaaagggagcaaaaggcacagacgcatcaacaggagtctcactctttttctagccaagtgatttgaaaacaggttttttttttttttttatctttgttaatgacattaaccagtttctcatcattatcaaattttgattggcacactttttcctaacaataaaaaatacaattcaattaatgaacaaaattcaataaaaaactatgaaaacaaacatagagttttaaatttatacaaaaagaacaaaatttaataaaacaagacaacacacatatcaaccaaaaatataaaagaacaaaaagacataccaaattagaatccttaacaggggccttagttctactcttttttgatacactagcatcatcactaacggacttcctttttttggtcg

SEQ ID NO: 49111 - DNA, 1386 bp, Cannabis sativa
gaaccaccctcaccgaaggtagaagtgtgattagagtaaagatcttgagtattagcgtgagaaggcaggtaggaggccgcaggcgcatggtggcctgacaagaaaatgggaggggtcataatacccttgttgctcgtgtattaagggaaaaccctggtgatgagagtaaatcacctagagatcatcctccataaggtgttcgctccctgcatcagtgaaagcagatgagggagtgcccttaggacgattgggtgcattgaggtcgtcctggaccacttgaggagagggaactcgatgcctcaattgcctgggacaccccttgtcttctctttcgggcgccacgatctagatatcatcccttcatcagtaggagggagaaccgagggatccaccctccctaaattagttgggcacatgggcgacccagagtgagcaggagattgatttggaatggtggcaacgggtgaggaaccactactagcacccacttgagacaggtccggggatgggctaaagggcatagaattccaaagccctgagttaactattccctctgcattagaaggacaccctgacgatgagctagctgaaggccatccactaatgttatttttgagaaaactcttggtcttggccaacagacccttaggagaaggtctagtgcgaatgggctccgactgatgtactgccggcgcgactaacttcctacctaaggaaagaacccctaaggactcacccacagcatgtgactaccgatgacctgcaaaaacatcatccacaacatttgtgaccacctcctatgccgccgcgtctccctcacgcgcctacaaaggagtatggccagacctagcatcatccccagcatgtacgaagtataacctgtccgcctttagcttgtcacctgcccgaatcaacctgctttttataaggcgaggtaaagtcagaaggtgatggcagagcttcttgtcatattctacgctgaacatcttcagcaggctggaggaatactcctcttgtgtaaggatggggggatgtgccgctgcaaaagacaaacacggggagttaaaaggacattatgagaagctcaatgttagacaattgatgaggatacaagtcgcggaataacttactgggcatccaaaagacctcccatactccatcttgctttaactcaaagaagaagttttctttccaatgcttccccacattagaaaggacacccaccaccgacgcatcagaaggaactttcttataaaagtaataacaacccctaaacgaggagttgtgctggaagttgtagacgtaatgcacctctctggccgtgggagccctgctagcggcctccatgaaggctatgaagaggctggtcaatatgatctacccgtt

SEQ ID NO: 49112 - DNA, 2951 bp, Cannabis sativa
gatcaatcctgagttcgagcaatggattgttaatgaccagcttttaatgggctggttatatggatccatgacagaaggtattgctaccgaagtcatgggttgctcttcctctgcagagttgtggagcagtttggaagctttgtttggtgctcattccaaggctaaaatggatgagtacagaaccaaaatacagacagtaaggaaaggatctatgtcaatggtagattacctcaaacaaaagaagcaatggtcagatgtcttgaccttagcaggtgacccctaccctgaatcccttcttgtttcaaatgttttatctggtttggacatagagtacttgcctatagtactgcagattgaagcaagggaaaagacaacttggcaaatgttgcaggatctgctgctcagtttcgacagcaaattggacaggctcagttcactctctggaaacagtaagcattctaacaatgcctctccaactgcaaatcttgctaacaaatctggtagtggaaattacaacccaggaaacaacaataacagaggcagaggaggctcgagcagtaacagtcgtggaaggtttaatggcaggggcagaagtggcagaggtggcccaaaacctacatgtcaagtctgtggaaggtatggacactctgctgcctattgctacaatcggtttgatgagactttcatgggaacaacaccacctggaaacactggagacaacaacaaatctgggcaaaatgctactgcctttgtggccactcctgaaatgctccaagatgatgcttggtatgctgatagtggtgcaagcaaccatgtcacatctgaagctgcaaacctgaatcagaaaactaaatacaatggtaaggactctcttactgttggtgatggcagtaaacttcttattaagcatactggttctggttttatgtccacaaacaacagtagccctcttatcttaaaagaaatgttgcatgtccccaaaatagctaaaaatcttgttagcatttctaaattaactgctgataataatgttactgttgagttctcatctaatgattgttgtgtgaaggacaaccaaacaaagaagaaagtgcttcaagggaagcttaaggaaggtctctatcaattcaactctcactgtgtcaagtcatccaccaaaaatcctgccactacccgtgttcagcaacccaagtctacttgtttttctgctttatcatccaatttaagttccaatgtaactcagtcagtgactgagagtgtgtctagtttcaattcaatcaaggatagatggcataggaaacttggccatccatccaatcatgtcatgaatcttgttttaaatcaaatgaatattaaaagttccaaaactgatgaacttcatttctctgaggcttgtcaatatggcaagtcacatacacttccttttaaattaaatcatgacaaagccaagtatcctcttgagttaattcacactgacatttggggtcctgcacccattatgtcaaataccaacttcaaattttatattcacttcatagatgactttagtaggtacacttggctttatcccttaaaagccaaatctgatgcttttcaagcattcactcaattcaaaagccttgtagaaaaccagtttgacagaaaaataaaaaagctaaagtctgactatggtggtgagtatcaacctttttcaaaactggttatagaaagtggtattgactttcagcactcttgtcctcacacctcagcccaaaatggaagggctgagagaaaacacaggcacattgttgaaatgggcctcactcttcttgctcaagcaagtatgccacttaagttttggtgtgatgcattccttactgctgtatatctcattaacagactgcctacaccagttttaggcaacatctcacccactgaaattttgttcactagaaaacctgactacaaacacctcaagacctttggtgttgcttgttacccgtgccttagaccctatcaatcacataagtttcagtatcactctaccaaatgtgtaaacttagggtatagtgaacacttcaaggtatacaagtgtttaagcaccactggaagagtttacatttcaagaaatgtaatcttcaatgagactgaattcccatttaagcatggttttctcaacaattttcacttggaaaaaccagtaaatgttcatcttccctcgtggtctgtgtctttaaatgttccagcaactaggcaatctcagtcaccaacacatcacaatacatcttcccaaaccgatagagatcccgatcttaattccaatgaggcactttcagataatattgactctcaacaggttgtttctcatgatcatgacagtaattatgccattgagaacattgaaatacagagtgaaaactctgaaacacaaagccaagatcaggagcctacaaaccagcaagctacagaccaaaatattcaaccacctgttgctcctttaacatccactcatcccatggtaacaagagccaaggatggaattttcaaacctaaagtttacatgggaaaaactgcaacagtcgacactcacaaattacccaagtcacttgctgaagctttggcacattctggttggaatggtgcaatgggagaagaggtttatgctctgaaaaagaacaagacttgggtgcttgttccaaggctgcctgacatgaatgttgtggggaacaagtgggtctatagaataaaactaaatccagatggttcgcaccaaagattcaaagcaagactcgttgcaaaagggtttagccaaagacctggtatagattatggggagacattcagtccggttgtaaaggcttgcacagttagaatcatcttgacaatagctgtgtcaaaatcttgggaagttagacaacttgatataaataatgcttttctaaacgggagcctaattgaagatgtttttatga

SEQ ID NO: 49113 - DNA, 1187 bp, Cannabis sativa
gactctatggtctcttagaagtccaagaaacaaaacactgtctctcaatcttctgccaaagtagaataccgagacatggccacaccacttacaaatttccatggatacttgccttactcaaagattttggagtcaatcattcacatctaacccttatgtattgcgacaacaaagttgtcattcatatttatgagaatattgtatttcgtgaatgcaccaaacatattgacattgactaccacgttgtccttaaacgggtacaaagtggccagctgaagcttcttcatgtcaacactaaatacaaccttattgatctccttaccaagcctctttttccatctcatttcaaggatttagtttccaaggtgaatgctacgaatttgtacacttcatcttgagagggcatattaaacattagattatctcatctagtatttgggtatagagattaggttatccttgtttggtttatattcttaggctgaattactttccccatatatatattttatatttattatagattaactaatttcactttatttaataaaggagatattattctaatagagaccacatcaaatttaattttataattaaaattaataacacatcactatatataaagatatatatgttatataatataccacgatcattatttatttgtagttatttttgtatacttctaaggcatgagaccaaatatttgaaactctaaaaatgttgttttgtgcccaaaaaaagaagtaaacgtaaatacattacaaataaaataaaattagttaattttatagtaaactatttataagagttattttggtacactcttatctcttttggtatccaagataattttttagtctaattttctagctcgacatgcttgatttacttgaagagtgcaaagttcggaatctaccggcatggtgattgctaaaggttatgacttaactaatttggctttgactcaagctggacggaactataagtaggcatactctgtccaagtccaactatgtacgaaacatgtcaactaactaagtgccacattaccttatacgagattcgggataacattcgacctccaagtccacgtggaaacttttgctcgtacagggactcctatgggttacacatcgcacagaatggttacacgcgtttgtattcacgtgtcgtcctagatg

SEQ ID NO: 49114 - DNA, 1358 bp, Cannabis sativa
tgttgattttccccagggaaggatgatccaaacttaattctatcaccattcaagctctccaccatccataaaaagaagaaggtcttacgaggaaactttaaatttcccttataaattaaccttaacgagagcaggtggcaccaagggcaggaaatgaaaaagggaattttaaattgttgagctggggattttatgactgcccactgaagccctaagacacaatgcttgcacaaagtatggccacaccacaagacatagggtacattctcaacaatgttgaaagattcccagcatatgggacactctagtccttcttctctgctactatttgagcagacatcgtcatctgaacactctaaaaaagcttgactcgaaaagttggagcttttctttggtccaatacttgaaatggcatttgaagcaaaaccccacatcttaaatataataactgtacaagataactcaaacgctaaaattgtcaagattgcatcattcttttatgaaaccccaataggccatgaactaaactgaataaattcctgcttttgtttatgctatcaatagctttttcccccctgatggactataataaagaatagtttaaaaaagtaattaagtcaataaaacgagctagaagcaattatcattacaattgaaattatttcaagtagacaaagaagaaaggaaaaaactatatgaatatatttttatttctcaataacagtaacatatattcatattggaacatgttaacaataaaagtcccgcgttgtagtttgtttgagttacggaacaaacaagctaataaaagtattactcaatcaatttctcatctcactgtttattttccaaaattatgtaaatatatatatatatatcaatgttatttttgccaaataattttgaaaatgagaaaaccatctttccagttaccaatattaatattttaaatcagaaaattgaaattaacggttgcatcgcaaccaactactcaaatacaattcgtagcagacaaagttcgactgaagcagtaaattaatacaaatatcaaaataaatcagtgcaatgaattaaataaaaagattgatatatatatgcgcaaaagaaaattgagaaagagatttaagcgaaggtagattcgaataatcaacagtttggaaaagacattaactccagtgaggaaaatattttacctttgttgcataatttcagtaaaaaaatcaaagatttgaaatgatgaagagagaatgttgagcagagatcgaagcagaagaagtcgcacactcggtcatcttcttcttcttctctctgtagtatggtgttttcttctatttatatgaaaatgtataagagatttg

SEQ ID NO: 49115 - DNA, 1726 bp, Cannabis sativa
atatattgatgatattgatgagaaaattctctttcgtagtaagaatgcaaagcactaataaatattttagggggcacccatagtgattactacattctgtatttgtacattttttttttaaaaagtcgtatttgtatagttagctttaattagtcttataaacttgcaaatctgatataaaataatagtaaagtcaatttataagtagaccaattataaaaaaataagcataacaagaggctatacttattagatctgtaataattaaatatgttaaatttgaatagttagtagagatatttatataatttgttcttagtgatatataattatggttttttttattgttctgatcttattaaaggccacttgcagctacacagttaaaatagtaaaaaaaaaagaattgtaacaaaattactcagatgtttttttttttttagaatgacatagcaagaaagaatttcaaaatctagtgccaaaagctataatgcatttttttttttttttaagtttttgtgtatcaatatttaatttatttactttacgtaattagttgttatgttttgttgtaatgaggttgctctattttttgtagtgttttttctatttttcatttgaagtttttcttattattttttatatgatcgaaactagttttacagattttgttataattttatatgagttcacaagttttgctatgatttcacaggttttgttataatttttcatatggtcgaaactggtttcacaagtttcataagttcgaaaatggtttcacagggttcacaagtttgaaactggtttcacattattcacaggtttgaaactggtttaacatgttttaagagttttgaaactggtttaacatcttttaagggttttgtaatgggactgctccattttatgatatatatattatgtatattttgatttttaagtttcattttattattttgtttctaggttcgatattggttttggcacttatattttgtttttagagtattgttgtgccgtatgatgctttaattatatttgtaagtttttttttttttttttaattttgtattttgtgtgtgtgtgcgtttttcatttggttcattgacaaaactagtttcagttatcttcaatgtttatcatttatgttttgttttcataattttcattgttgttatgtgatgaaactaattttcgtttggtttttatagtgttcattgttgttgtaagatgaaattgatttcggtttattttttgtgttttgttcatatagaatctgattcctccaataagaatacaatggaatatgttgctaaggattcaagttttgacttagagaagaaactttatctaattaaaattaaaattcttaggaaggttattcacaagaaaaaagtaaatatgatctaaattttaaggattcattttttgtatgaattttttttttgaaatatattaatttgttttaatttatcttcttatgtatgtttaatttgttagttggttgtactaaataattgattttcgtgtttaattgttggtatgttattttacgtaattggggtttaagttttattttttcttttgttattttaaaaaaactggttttactgcgtcacatttacgttatttgcttcctttatgtaactagtttttctgtgtcactttttaaatagttgtttaacataactagtttcagtaatttaaatttatttatggctaa

SEQ ID NO: 49116 - DNA, 1128 bp, Cannabis sativa
atatagtatgtgaaggtttagaaactacaatattatttatgtccttatcattttgcaccgagcaaaactcatgtgcttgaaattggatccaaaaagttcatcaaaattcaaaggtggtaccaaaacatttccatcatatatatatcattctaatgaaaatgatccctaaaacacatatatattattggtgtattccctttttatttatttatttttttgaaagcaattataggtgtatttaacggtacagtttcttcatattctctcaaccataaaattaagtattttgtctctttttgatagttttcaacaccaatttttttcgctttttctttttagtatacatttctagtactctcatttaataattcccccaccacttgtgttatgaatattttggtgtgttcttcatgtggattgttgctcaccaagtgaaggtcatagcaagtatgactaataaaaccaaactaaaagttggcttcttcatcgcaatattaacttttctttgtcagtttttgtgcgaaaatttgaagcttttgaggttgcttattttgaggattatttgacctttaaaaaggataagagagagagatagagaaagagaaggatagcctctagttttctatatgtaatttcttcaaagaaaaataaatgtacaatacttacccaaaatttaaagtcttcttttatatattattattttttggttaattaagatttttatcccgaactttgacatgtaccaaatcatgttccctgaacttttaaggtcgttaaaaatgtcccctgaactattgagattgttggatttaagaacttttgtctaattttaataaaaaaaatctaacatggatgaaagttcaggaggcatgatttagtatatgtcaaagttcgaagaatggtttagtatacaaacaataactgaaatagtaaattgaatgaaattaaataaaagtccttgaatctaacaatttcaatagtttagggaaaatttttaacggtcaaaaaagttcaggaggcatgatttagtatatgttaaagttaagggggtaatattgatttggattacacaaaaagtatataaatccgaatgaaactaattatgccaacacccctacaattaggggt

SEQ ID NO: 49117 - DNA, 1756 bp, Cannabis sativa
  modified_base (1556)..(1565): a, c, t, g, unknown or other
attaatctaatacaatttaattatattgttttagatatataaatatgatctaattttaaatttatttataaaaaattatatctaactaattttactaaaaaataaataataaatttagatattttaaataatataactaatagatttgtcatgaaattttgaaatgattatttaaagtcttatttaaatttaagttaaaatttatataaaatataattaattaatattttttaaattatattttaataaataaattaaatttaaatatttaaaattattttttaaaaaattaataattaattaattaatataaagtttaaaccaatactttcctttagatagataatatcatgaatatttttgctgttaaaattaacatagatgagaatcgagtttttgatcgttgacttatatgtatatgtatatacgtgtaatcttcttcgaaaaggaaggtaatgaatcgatcaatacattttctgtacgtaagtatatatattattcatgatgagaacattactgtagagccattaattgatcagtaagtatcaattttaatcggtgataaatatatacataattattattttttgagtcaactttctctacgtatagaacagttgttccatataaatagaacagaaacatcataaataatttgctcgaatcgataagatttatatggtcagtcatttaattagaaaattgggcatacaataaatatatatatgacaagtgagcaagctaccccagtcaaacagtggcattaccacccagtgaactgttctaagttatatatggaaggtctcatgcatccactagaactagggtttataagtttgttctgatctgatcaacctataatatatctatatttcaataaaataataatattatatatatcaaatcaaatacaacaaaccatcttggaaatatatatttctttttaaaaaaacttattttaacataaaagctatttcaatatataattttttttattagtatatattgttcaaaatggagttgggtctctcttctaataaaattattactgaagttgggtcaataatatataatttttttattactattatatacatgccatgttttcaaaattgtccagcaatagcataaactatatataccattaacaagagttcaatttttgcacaacaagaatattacttttcttattccctattttgttactaatttaatttaatttatgatttttacccttttatttatttatttatttaatagtttatatatatttgaataaaataatcttttatatatactttcaacaaaagttaaatatatattttttttaatttttgaatttatattttgcaccctatatgtacactattatgaagttattttttaaaaataattagcgacttaaatttgaataaataattagaggtttatcaataataattttaaatgtcaataaaaatattattaaaattacacaaatatataacaaatataattacacacttttttttctaacaattctcttaaaactgttataaataataataataataatnnnnnnnnnnataataataataataaaatacacaattctcttaaatcatgggtaagaaaactttaattcgttattgggaaagtgagcctacactacatgatcaatattgaatagtctctgtccgtccatacattttagcagagtagtgatgagttgagtcattatagatctgtagaaaccttgggtagcttccacacacag

SEQ ID NO: 49118 - DNA, 1707 bp, Cannabis sativa
tgggtcaagacatccaccaagtaaaggcataggattgcaccaaagtcctggagcaggttccggttccggttctggttcaggctctggctctggttccggatctggctctggctctggctctggttccggatctggctcgggctctggctctggctctggttctggctctatgtctggttcagggtctggatctggatctgggtcaagacatccaccaagtaattaaagacataattaaggttagaccaatcttgaagcttgtttcgactctcactttggctcatattttagttctagctcttgatatggctttggattaaaataaagatatccaccaataattaaggcataaggttggttgagaggtttttaattcccaatgtattaattactatgaacatgaacaaagtgtgtactccacatattattttataattaaataagatatatttatattattatggttcttttaatcattatgaaatataaatatatattaataaataagagttaattcatttatgctttttttaacaaattaatttatggttatggttttctttctctttgtattttttaaaaagtgaggcataatgtgttagagttttatgtccaaatgttaatcccgaaaattaataaggttaactctcaagattagccaacactaaccgagagattagtagagacacactcaaagaggtaccccaaatgtgtgatcttacttgaccacatatgtgtctcgacaagcatgctcgagaaaaagttactcggtcatgctccaagaacatgtcacttggccatgcaccaatagcaagtcactcggtcataccttaatcttccagatcttccaccacacacaaggactaatatgggctagtagaataaaatgtatataaatttcttattgaaatctcaatacatgagaaaaacactttttaattattttttgagaaaagattaaatgagattaatccgttttaggttttctaaaaagttacgttaaaattttgttattagaattttgtttatacggtatttaaataaaactaataaaagttttatttaattaattatttaaattcaaatcatttattaaatcatatttaattatttgaataaataatataaccaagttcttttatagatatttatttcctataaccgattgaatgaatatctcaaccaattgagggaatctctcaactaccttgagagaacatccaccagaaatatctataactacttttgaaatttaaatttaaataaatatttcttttttgaattaattaattaattaactaattcaaaaacaaatctagtggggcaaccctaaagtagtgggcgcctatcaccatgttacacagtgtaggtggcgccacccttgtctcaattaagaaaatattggtgtcttttgtccagacaaattttatcttttccaacaatttatttcattaataaatttgaaaaaaaaaataaattattcaatacaaaataaataatattttgacaaatcaaaatagactgaacttttatatataaatgttatctctacctttgacagtgtttcaaagtagaaatctggggaccatgaacctataattctaagctccaataaactaaattatttattgaatctcatcaatcaactaatcatgtttattaattcgatgattactccactattaatatagaattgaactcttagta

SEQ ID NO: 49119 - DNA, 1481 bp, Cannabis sativa
aaaaaaaaaagtacatacaaggtattaaatagacatatttgcttctaaatgggagatatttctttttgtaatttcataattaattaaaagttattttggtatttcaatagtaaaaagcctatgaacattctcatttttttttttgaggttatagatgtataaacatgatgggcttagagtattacttaaaacttaattcaaaaattaatttttaatacatgtaccctgaatgacatgtttatttacacgaataaacatgatggactaagagtattacttgaaacttcattcaaaaagaaatttgtaatacatatgccatgaatgacatatttatttatacgtataaacatgatgagcttagtctattattaaaatcttatttcataagcaatttacaatacacgtgctagtttaacttttacattttgtaattttttcttttttatgttactagtttaactttttctgttttggaccaagtttttaaataataatttatacatatttttaaagtttctttgtgaaaagtttcatcatgatattttttttttcatatctataattaaactcgaagttatcttctttttctggttgtgaccaaatagaagttttcttcttcaattgtaactactttaattagtggtctttgggcatgccccctagtgaagagaaatttagtttgttgtggttcaactcgctagtaccacgagttattcgctatagagtgtctccatttgttatctatctaaacatattgggttatcttcaagaagattgaatcatctttgaatagatttatctttgagtatagttatctacgagcagacttatctacttgtagatttatctttgagcacaattatctatgagcagatttatctacttgcagatttatctctgagcacagatatctacgagcatagttatctacgagcagagtaatctacgagcaaatttatctactagtaaatttatctgtgaacatagttatttacaagtaaacttatctaagagtagatttatctactagcagattatctctgagcgtagttatctggtcaccacttaactttttgtcaaagtgaaaaaatatctattttgcatatcttccaagctttattggcctcttctgctcgatacttaaatgctatatagaaataattagcatgctaatatatataaattacatattttggttaggctctcctgtaaatttgatgaagagaatatttttaggagttgattggacaactcacaactcaagcttgtgtgatatatcaacaatcgtaactagtaattacgagcaaattgagttttggggatatgagcgaacaagagttcctcattttatctttttgtcccactttggctccgtgaaatatatatcttttggtaaccacttgaacaaccagtttgtgagccaacaaagttacttcttattgtttatgccaataggatgtctaaaatattgagaccattca

SEQ ID NO: 49120 - DNA, 937 bp, Cannabis sativa
aaaaagccatgcccagaagaattggcggttggattttgtgtactgtattgctgtgagaattcgaaaaaaataatggagtttggagatttatttcagattttttttgggttttttctttctgtaatttgcagtagtgcccctgtagttattgtcactttacgataattgtgaataatgaaaagttattgtcattttaccacaattgtgaaatatgttggagtgttcatgtgctcacatttaatgaatttggatccaacctaaatttttaactttttttattttcttttactgtggagtgaattttttttcttcagaaatactgtgttttttttaaaaaaatactgtgtaagttttatactatgtacagtgttaagttttcattattgtttcacgattattttttagttgttccactattattttaattgctctgttttgttattttacggttgttttataaaaagatagtatttttgtaaaaaaatttcgtatgacagtaaaattataaatttttacctaaaattcaatatttttgtaaaaactcctataattatttattagatattttctattgagtttgatctcatctgtcctttgcttttcctagtttcaatctattttttggtggcaactgtgcattttctggcctcgtgtgctatgtggcggtggtgatcgacctagatttggcaaatgcagtttggtggttctaggttgggttgattctcggttccaacaaggaaagagattgtatttagtttgtggggtgtgggaggagggtgcagttgggattgggcttgagttcagaccatgggtctctttgtgacttgttcggatctggtgtgtgggggcttcaaggtgtggaaggatctttagaagattgaaattgattgacaaatagatgtctttggtttgccgttttgatgtcttttttttagtt

SEQ ID NO: 49121 - DNA, 1433 bp, Cannabis sativa
aaagcctctaaaaacaaataataaattccaatgtaaattcccacataatttataatttaatgaaatctaccttttcaatgtttcaagtaatgaaaccaccatgatcaaattgttgttaatactaagcactacatatatacatattcgatcttaaaattgagccagaaaaaaaaaattagtctttaattcgaaaagaaatataatatttttaaaattaataaaaaaaattacatatatttttaaaaggaattttttttagatccttgagctaagcgaaacttcgacgctggcttagttctcttatatctagcgccatgtattaaatatctttcaatttttttttttgttatccatatccaataatgtataatgttttactttaattaacatttaacagctagcattagccaaaataaattgcttgttttttctattttcttttataaacatataaatcattattattattattattataaagcaaaaattgtaaaagtacatgcatgtgatgatattttacaacaagacaagtttttccatttggattataaaggtacaacacttgattatattgcatgtgaaatggggtctaaaaccaatccttctcaattctctctctctttttgtatctatccatataagatattgaatagtaaaagttttaacatatataaataataaattggttgaaatttgaataattatatatattttctagaaaaaatgagtaatctaatctagaacacataacatgtgatgcctaaaccaataactctaaagctaagtcataatcaccacctaaagaattgactattaaccacttattcttaataattactttataatcatttatggccaaaaattgacatatagttcactaacaatatcaaaagtttagcttgtttgatggtttaaattgagaataaaaccatatggaaagaataggtaattaatgagataataataaaatatttataataattaataattagctttttgtcatatcaataagacaaagaggaagttcccataacaaatgtcataaatgtttacttttgcttcttattatgaaacttcactttcccaccacatggcttgttcttttattatgctaataattataataataaaactcttttaatcatcatattatgtagagcattattggacatcaaacatcagtaggactcaatactttttataagtagtgttttataataagttagcgatattttgtagaaactattttcttaagttatatgagacatgatactattaattacactaataacagtataacattgaagaaagtactaaataccaatgatacctattagcatttctctattgtgtgagtattgtataaaatttggtgccaatttcattctgaatagggtaaatattattttagaccatgtattttgtaaaagtta

SEQ ID NO: 49122 - DNA, 1369 bp, Cannabis sativa
  modified_base (1325)..(1333): a, c, t, g, unknown or other
atttaggttgttaaatcaacatctatatctatctcttgtgattgatctctctttctctcccttggccaaccgcactctttctctcattcattctctgaaggccatacacgtaggacccacaagtaataaagtagctgcatttattttatttttaatttaaagagaaaatcagctgtataagaatacacctacatcagttggacaattaatttattttaatcttactggtcgaattgccttccccatatcatgaggtagtaacaatacgccttacaataaatttaccctataattatataatcaaacatacatgtcagtaaatttaaatcatgttaaaataacatcctacagaaataggttatttattaataaccaatttagctttatagaatctattttagtgtgatggtgtgttgaacggtaaataataatttaccaggatattaattaattgagctttaagttaatagattatttttaatatttatctctttattattattattattattattacaaagtaatagatagaataagaatgaattatgtagaaacaaagcactaagacaaaaaaaaagtcacataaatttatatttctccttctgtttctctttcaatccaagcctaaacatggaaagaaacactaaatactcttaccaaatttctctcaattgcttgccaataattcaagcttaggatggttcgaaggttgaggtaagttgttatagtgttttcctttgatttttgttgatttaagctagatttctatggtatttgagggattcagttatagttagaaattgatggattaggcattattctttcgtggtttttgagccaaaatcatgtttagtttgttgttatagagatgtcgaattcgttggagagtgagatttaagcttttgagttcaaagctcaaactatcacgtggtgaattataattcatttgtgtatttttgtgttttgagttgataaatatgcttagaatgtctaattgtcttgtgttgttatgtttggttgtgttttgagtaggtggggaagtttagaactcgagtttcttgaggtgcaatttcttgactcaaacggtcgcctgtttaggggaaactggtgcacgtttgttttggtgtggccattacaccggtagcttaattgaaattttgtgcacccatttgaggttatttttggtaccataattttcatttctctcgatatttagggtattatgacacaatttatcgataggaaatttttttactatgaatttaagtactagaaagtgttataacgagttattcaccggtttacctgttggaaattattttacnnnnnnnnnagatctactcacaattatgttgattaacaccctaaa

SEQ ID NO: 49123 - DNA, 1284 bp, Cannabis sativa
tgcgcaaggctcaaaaactgtccttcctagtttaattgctcaaaattaaggaagatttgttcaaggtagatttattggtcacaacattatgatttgccaaaagcttatccgacactatggaaggaagtttagaaaagcaaactgtatgctcaaattggacgtccaaaacgcatatgaaactattcatgaatgagattttattgaagagatgctttacgcttttcagttccctccaaaatttattaagttgattatgacttgtgtgagaattcctcagttctctttgatgtttaatggctatttacatggattttttgaatccaagagagggttgagacaaggagatctgatgtctccgcttctttctgtcttaggcatggaatatctctcccgcatcatgcagaaaattaggaagaggtaagactttatgtttcatgatctggtgacttgaagctaaatcatttgacctttgcggatgatgtactactcttttgcaatggaaattccaaaagcatctacctcatgctccaaggctcaaattattttcacaaacttcaggtttatttcctaacccatctaaaactgtcttttattgcaataatatgagtgactataaggttcaaagagttcttgatgcttcgtgattcaagaaacacgatttacctttcaagtacttaggtgttccaatatgtcctacgagaatctcaacagcagagtgtggtaccttagttgaaaaaatggtggcaagaataagaagttggagtacccgaaacttgtctttttcagggagagtggtgctcatcaactcaatgttgatggccattcattcctactggtgtcaagtcatgcttttgccaaagaagattgtgttggaaatagaatctatttgtcatagtttcttgaggaatggaaatcatatacttacaggttcaacagtaattgcctggagcacaatttgcttcactaaattttcaggaggtttgggttttagaagcatttcagattggaatatggcagctatgttcaagtacgtttgggccattgctaaaaagaaggacaacatatgggtgaagtgggtgtacaatgtgtagataaaggaggagaattggtggtcttataagaccactccaacaaccaacttgtattcccacaaaatggtagctataaaggatagagcaaaatagttgtttgacatgaatcaagcttcaaatgacagctacaaagtggttgttggctttcatgctcttcaaccttttcactagcaaagttgattggagttctata

SEQ ID NO: 49124 - DNA, 1240 bp, Cannabis sativa
tttttcaagatccaaaaccttgatacatgtaaaacagattaattaaacaatattaataatagtgggataattctatcaagtaccaatctttgtaaattttttatatttttacgtttaaatatttatttttatatttttataatgtattataaaaataacaagaaaactatatacaaaagtaacaaaaaataacgtccaaataatatcaaaacaacaataaaaaatatatacaaataataacaaattaacaagagtacaacataaaaattcattaaaagaatgtattttctgtaaataaaattataaaatcgtaacactgcttaaaattccgtacaactatatttttgtaatttttttgtattattttgtgttttttatttttttgaaatcattcctattatggtgcatatttttttttctttcaattttctaaggtacatataatagagttgacctgtttaaatcttattttcaacattataaactatttagaattttctaaaaatttacatgcggccctaaataagtacaacataggcgattataaaaaaaaaataaactaaaaaaacttttgtaaatatcaaaacaaataaaaaaaaaaatctaccaaaatacatttttatatttagaaggtgtactaaaaaatttcttaaattttactataatttatgaaaaatctcacaatgtgacaatataatatataagatatgcatgaactagtccaatccttattaattaattttgagatgtatccacatacatcttaccatgcacttcatcactgtattcatattaataactaattaacataaaaatctaggagagaaaatacaatagatgagaagtcccattctccaacttgttctttgatgtgtatatatataattaatatattatatgagtggacttttaaataagtcttaaagggagaaaaaaaagccgtacaatatttgtttgtacatggaaaatcaaaagtaataagaacattttactgttgtcgttgctcattgtagagtttcagaatatgaaacttgagaaacagagtaacaaggaaccagagaaaaaagaaacagagtgtatgaaaggttaaaaaaccagaacttgtatttcttgataattcttaatgtgtttatatacaagaggaagagagaaaactaaaacgtaacagactttagaaaacagttacaaagttagttataacagataactaactcaacaagctgactcaactatactaaca

SEQ ID NO: 49125 - DNA, 1104 bp, Cannabis sativa
cttttgtgatataaattagatgtcttcggtataaaatttatttatcattttgtgagatgcacaatctttgcagtttgttgataaaatctctatttgttcttttttctatccaattgcattaagttgtagtagcttttacagtgaatatttgttctcattttcaggaatatcctcccggtgttactctagtacctatgcaaagtaggacaggaaagccttttttgacaacgaacttgattgtatttgcacctgattgttcttcagactacagtggagatattagttctgttgctagtggagatgcattaatagttgatccaggttgtcactcttacctccatgaagaggtatgccttgaaaatttatgttgaaacattgctattctgctgcctttgacaaccgaattttagtttttgctatcttttgcttgacctaagtaaaagagattctctttcattggtctagagtatggagtatgcattatgcagtgcctaagatcttgacctacagtatcctaatggggatctcttactttttactattgtaatatgtgaatttatgatgtgtgatttctttttccttttattatttatgctgtttacatgttcagctcaagaatattgttgcttctctgccaaagaagttggttgtctttcttactcatcatcaccgcgaccatgtagatggtaagtatacaaattccatttttctcattctcagattatccattcactcgaagcagaccgaattcattgataagaaacataacagatgtagatggtaagtattggtaagcagcttatcagaagttcgttgtctttattattgttttttttttctttgtcaggtttatcagctgtccaaaagtgcaaccctgatgctgtcttattagcacatgaaaatacatttcgtcgcctcagaaaaggttacagtgttacagtttgacataatacaaatggtgattgtgtctagttataactattgtcttaatttccatttcttctttgttattatttgccatagaaatatttcgataaagtagatactttctgtttagtttttaacatgatgaaccactaaacttttggaactatgttttcactg

SEQ ID NO: 49126 - DNA, 1196 bp, Cannabis sativa
actgcccaagctatacagtccctactaacttgttacatatcaacttatatgtgataatatttctttgtcattatcatgcccatgattttatgagtcacttccttttggtggatttggatgaagtgattgttcgtcttagtcggacaatgtccacgcaatgagctgttttaaataaaaaattgaagttttgagctaatatataaatcatcaaaagtggtaaattgtttgatatatatgaggccaagtcgggattcagtaaaggatacctacctaccgataaaatctaattgaattttttgcttagaaataaatattagttttaatattatatattacatcactttattttcataagtggaagatgttaaaatgaaaaaacttttattgatatgcttgagggaatgattaaagaacagtaatactaataacaatagtgtacaaggtatgaggtatcatataacataagccattccaaataaataaataaatatcgaattattattaaaattaacatctttgtcagtttactttgtctccttgcaatcatgtagttcattcataacttgttttggttagacactgttacctttaattttggaacaaaaggtctattagtaattctcttgccccaggaatattataaattatttaaaatattatatttatagatagttagagatatgcatatttgtgtaacacgatgctgtcaataaaaagaacagcaaaaataaagagtatagtattctcacgtatgttcttttgcaaaaaaagaacactcaacagtagaaagtgacaccccataaaggagctgtggaagttggtgcaccactcggaagaaatacatgatagtaaccaaaaaggcaaaaagccttcaattttctttttgtccattgaaaattaagtcctcttttttaatttatattttacactgttttatctttattttaagagttgcggttctcattgtcccacttgtaacgttatcaatctcaataatagaaatttggtataataattttacaaactcgaacagatttcagtcagtcacaacaactcacaattaactcgattattattcagatttttaatattgagggtctgattgtcgactcctctacccttttttgtgatgaaaaatgcaaaagagattgatacgtttcagtaatggtcataagtgctttacagagattgatact

SEQ ID NO: 49127 - DNA, 1223 bp, Cannabis sativa
cgtgaaaattggtgtatttaatatttgcttttgtgtgtttttatatgtggtttctttgttaacacattatttctccaccaaatataatataacgagcttactcatgacaagtgattgcttcatattttgtatatgattcaatatgagaactagaactgtgttcttcaattgttgattatactgaagtaattatattagattgtgatacacatttttactacaacattttagaagcttctacacatttatatttagaaaaaaatttctaagaacctttagtaatttctggataagatttaatctagaatatattagctatgtgaactcttgatcaatatttagatgtgtatggatacaatttcttctaataaaaaaataatctagaaaaaataattttaactacaaagtataaagggtaaacaattataaatatcccattaaagtttcaaattgtaaccaagcttgaaaactaaatcaagtctccaactacttccaaataacatactacttacttttctatttgcccatatagaattattttctctcatacaattctcttctaagccaaattattctctactatatacaccaccaacatcactacttcactacattaccatcacaaccattaaactacttattccttgtattcacttgttcaaatttaaattaatacaaatttattctcaaactatcagtagtatcagagcttcgttcgatcatatcactgggcgtaatcttttctgctcgtcaacatgagtttggagtccaaccgcttttctctacctcttccaattttccatgaagaaaattataatttttggtccatcaaaatgaggacctattttcgatcacaaaatctataaaaaaattattagagaatgaatcaatattctggagatattacatctctttcagaagatcaaaagaaggcactgaaggataatcaacaaaaagattctcatgtattatactgtttgtagcgagctatggcagcagacaatctttttccgcggattatgggcgtagcaacggcaaaagaagcatgggacatgctgcaggaggagttccaaggaatagttaaggtacacatagttagactacaaaagcttagaagagactttgaaatcttaaaataaaagataatgaaattgcaaaagattactattctaaaattaaagaaatagtaaatcctgttgtaaagcctattacaataagggtta

SEQ ID NO: 49128 - DNA, 2688 bp, Cannabis sativa
gctttccatgaagctattgtctccactgcttttcgagttcaaaagaagatcttggttgcagttgaagaagcctttaatctgaggccggtagagaagcagatgagtgtggtcattaaatgtcaagttatttttttttatttatatatttaaattaatttttttaaaaaaataaaaattcatgacctagattaattaggaattgtcacgtcataatttacttaacacttaacaactaggtacttacagcaattttagaattgttatttatgtattaataccgctaaaaattaaacttaagtatttatttgcaacaaggatttaatctttagtactcaattttacttagttggtaaaaattagtctaggaggtcatgtcttgggataaaactaacttatacttatacttatacttaggatacaattaagagacaaaagtttttttccaccaaagagtaattgtggagttagaagaagaggtaggtctatccatggccaccgctgagattttttggaccttttaattattaggcccttgtgtataaggatatgtgatatttttaaaaatcataaaaggattgcatatattttaaaaggaatttttatttttttggtctctgagctgagtggacaagtctgatccgtaaatattttaattcatctgaagcattatacttaaaaatactacgataagaagagaatcgagagcttctagccaaacaatgtactattcgatttgcagatcgtctaacaaaaaatagactaacattatttaatgaagaaagcaattcttagtagtcatgaatgatcaaatcgaaagtagaaaatattggaagatgactgcgaatagtttgaatagtaaccatgttgtctgtttcaataactgagtttacccattgattacacttcatccaactaagagcttctttctcccatagcctctgcctcctcacaagctctttgtaaggccccggtgtggctcctaacaacaagccccaacccgaacttgccatcttgctcaaacatagcgacatcgacattcactttgattgtgttagtagagggtttaatccatagctcagctccatcatcggataaacaaaaatttatagatgattttattccataccaagttgtttctcgctttccaaagttcccaacaaaccatagcagctgaatatagcttgtcatcttcgagcttacaaaagagatgagaaatccaagcaccaaaagttgcaggaacatgagctatggtagcagtatttacctttgtccaacaagaagaagcaaattgacatgtgactaaaatgtgtaagaataatcaaattaaagtcttgaagggatcgaaaatccatcccacctacagatttatgaatgtgttaaatactaattatacatgaatttttaattttatgtttgagatagacaaaaaattaatattaattaattacctaaaattaataggtaaatggaattttattaataggtaaatcaaacataatctatgtctattacatgcagatattgttccttcaacaaaatcaaaaataataaactaagtcgtttacaatatttaggaaaaaaactctagtaacatctctaactaaatgattcatctctagctgtgatacatcaaaagaatacgaaaaataccaaatttatattcttaatgaacaatatgtgataaatcacacttaccaataacaatacttaccaataacaatcaacaaaaatctttcaattaaaattgggtagagaccctcaattattcaaactagaataaaataaattatcatgataacccatgctcaaaattctcgaaattgaaaatcaatcaatatgaataagagaattatgtatggacccacataaaggcaagaggggaaagttgctcctaaaaaaaatgaaaaaaaaatctataaatattttagttagtaaaaacatatattttaataaaaagtaagtaattaagaaaatgtatcctttgttttcttattttttattcaacaatctgttaatatagttgttcatagtcttgttagagtatcttatttttttttttttgcaaatggagtcttgtaattaataaaaattctatatttactttaaaaaaaaatatttatttgttttactagttaaattactttaagagcattttttatttttaatattacccactcactcccttacaaaaacctaataattataacaaactgtactaaatttcaatcctcaaagattcgcaatccaagcaaaacttgtcgttgaaattgctagacagagtgttcagtgatgataggtcattcccaacgtcatcatcatctttcttcactgagttctttccaccaaccattatataaatataaaccccaatatgtaaaactactcttaaagtataattaatagtattgccaacaataattacatacagggagatatgccattagaggatgtgcaactaattttgacactaataatcatggatttgagtcactttttagtcagttctttggccatggtgttagatttggtctcatcccttgtgaccccagatttgtttattggttttttacttttgctacttcccttgaccaaggtacatagtttttttttttaactttgttgatttgatatgtgttgtgactgatttcttggttgttgtatttaatatgtagagaaagagcttgaaga

SEQ ID NO: 49129 - DNA, 797 bp, Cannabis sativa
tatgtaaacaatcacgacaagctctccaaaacaaattcggcaccttcgctggaatcttcaagttttaaagtttcatcaaaataccaaaattatttgcatcggtccagtgaccattaatgacttagagaagcttgtaagcatttctaatagagtatgagcccaaagtttcatgacaccaataccgagtatcattctccacaaaagtatataataacaatagaatgaatgagccacctatcacgttcattaaagatatcaaaagaatttcatcgtcccacactcgattttcgggtgccatcaaatgttagactgttatgctcaacttcactgaatgtgaagagataacaaaagggtgatcttggccattaagccacggttgagccaaagcagagaccaaagaaccactggcaatactctatctacaccttgtcctaatcaaagattgactttcaagaatgttgcgccacacaaaactaggatattttcctagactgccagtgagaaaagagccttgagggtagtatcgagccttgaatattttaccaactagagaattctcatttttcaaaagtctccatgcttgtttccccaacatatatattgttgacgctgaaaagtagtcaatatcagcttgctagattggcgagatgattaataagtttaagtaaataacttcaagagacacacataatgtatagtaattcacttcccatgtcgcaatggtaatggagctacatctactttgagtttttatttctcacaagaattacaagaaatggctaagtgtttaagctcta

SEQ ID NO: 49130 - DNA, 1348 bp, Cannabis sativa
  modified_base (299)..(303): a, c, t, g, unknown or other
ttttattagtcgatcgattctaagctcattcagaagctccatatgtatgcttttgatattaaatgggctgttaatctgatcttgggccttcatgggctttactttttttactaaagaaagaaaaatgagaaatttacaaaaatactggaacttgggttaatttttacaaaaatactgtcacacagaaattttttcaaaaatactgtgttttcataaaacaccagtaaaacacaaagcagaacaactcaaaacaacattagaacaactaaaaaataccagtgaaacttaacacagtatannnnngtatgaaacttataaaaaaaaataaagtaaaaaaattaaaatatcatctgacagtatttttgtaaaaaaataacaaaaattaatataataaatttctcaagaaaaatttacataagaacacataatatagaaattaattactcatttatcatacaaaattaatataccccaaattttagtaataagtaatgtatgatatatatttataatttgttctatatctaattataatcatattgctttaattgaaatgtattttcttttttataaaattaattttatatgtatttccttcattatttattttacttttatttttaaaagagttattaaataaagaaagtataattttttttttttttattttattgaacgtgaacaatttactaatgatttatttagttactatttgttattgttatcttcttgttattattttttatttttagctttcaaaaaattatatgagttgtcacatataattaatactctaagaaaaataaggtataaaaagaagtattcaatatgatttaataatataaatgctctgttatatttcattttgactacttattgatgttacattatataatttggtatttgttggtatttaaactaatttgttatattatacttaatactatcataaatataatctcctttgtccgttctgcaatagagaagaagaaacaatcctacacgtccttgttgaatgtccttttgccaattcttgttggaataggtcaggagttttgacagggagaggcctcaaagacaagcttcacagtctggaatcttgttgatgtgaattcttcttctagtgtggaagaggctttaatgatcaactgggctatatggaatgcccgtaatgacctgttatggaatcaaaaagtttcgacagttgcgacggttgttctctcagcacattctaaccttagtcaatggaagtgcgctcaacaaaaaagaatggagcctctcctatagaccatgtatggaggaagagcgttggatcaaatctgttttcaatacgattaaagtaaatgtt

SEQ ID NO: 49131 - DNA, 1354 bp, Cannabis sativa
tcctttgttttccaattattttcgctggaaactatttagactcacttctttgaggcttctgggaattttctaggttcattgtctttctttaaacctttgatgtgggaatttcatttttggaataaaatttcatccttttttcttttgaatttgtctggttggcatatcagacatattttgctcttgtaaaagaaaattatagctctatccagttcttacctctctatcttccctcttttgtagatgaattttggcaaatactaggaaggtaaccactgaatagataacaatttacttcatcttctttacgagaagcagccaggactccgtgcagcttcatcttcatcagtgataattatcgacatcgagcttagaggagtgggaggttacaagtggctcatcaaagtcctcgaagcttctggtacatcatcatcattacttcagccaaatcagtggagaattataaggcttatttattttggaataaacagaggctagatgcattattcccattacgttgacatacaaggtccgaacggacgtcccagaaacgctaccgagaggctatctagagccttcaaagaatagcttcgcactagaaaaaatttctatctccatcgcaaagaataccactaaagcaaacgccccatccagacatagggtgatggccaaaaccaaacaaacttacagaaatacctcgactaaggatccacacttttcccgaatttttgtgatgttcgatgtagaacaagttgagcatcctgaggacgatgttgaaattgttgttgtggaggaagaagtccaagaagtcaagtatcagggcaaggtctgagcaactacttttcttgatggtgaaggagaagtagtggaagatgatgacaaagaggctctctaagttctttcgtttggaggctacagtgaggccgaagaacccctctttgaaataatagttcaagataactcaagatttaggtcgatcgactattgatcataattatgatatgaattaggtctttatgataaacgacatcttaataaagataaatttattcattattggccattgtcatatataatctctatcatatacaacaccttcacattgatgtctcactacatcaataatgcaaaccaagattacttttaccgtagaatggacatcaaggaactatactagcaaccattgattaattaaaaattccataactttaatatgttgctgactgttttattcataagattactcatactgtagaacacctttttactgtcgttataatgtcccattttcagtgttttattttggtcaagtttttattatcctcgtagattttaataataaattaatatatta

SEQ ID NO: 49132 - DNA, 697 bp, Cannabis sativa
ttatatttgtttattttgatcgagttctattttaaatatgttatatacatataaataattattttgttgggacaaatttaaacttgtaatctaaaaattcatgacacaaaggtgagtaattgaatagattagtcatcatggttatgatagaaaaattgaatgtgttttacatgagtattctataatataaacaaaatgaatctcataaaggggatgaagttcatcctaatttaaataatatgtatagaataagattaagaagttgaagacaaacaataagacaatctttaataatatttaaaaattgtaatttgcatgaagttggatcaaactctctgcctttaattggtattcttaattccttaatttgttataaggaattgttttcttttgaagatccttttagtgttttatatacatatgggtagttattttttgtgaaatttttaagaaaatattattttttatattttatttataattttacagcttaaaatttttaattacgaaaacacttttgtaaagctttaaattacaaaaatacgttttactcaataaaaaattaaaaataatgaaaaatcaactttacaacaactaaaataaactataaaataacaagaaaaataacatcatgacaactataatacatttgtaaataaactctaaataaacggtttattattttcactgaagagat

SEQ ID NO: 49133 - DNA, 2639 bp, Cannabis sativa
  modified_base (1778)..(1783): a, c, t, g, unknown or other
aaaaaaagtcattttactagctaggtattgttaaaatattgactattacaatagaaatatataaagatatatatatttatagtttaattaaaattgaatggtaaagggagatgccatttgtttggtaatgagtactcagtcctcccaattatattatttattatatataattaagatatttacgtccaaaagccatgttagtaaattaagcagccgaccatgaaaatgacaagttgaaaaattgaacacaattttcacatattaataatagaaaaaaaaaatgcttgttaattattctattctacaattttaaatatgtataaactataaagttgtttctctttcaaatcaaccttgagacacattctcttttaaagccatagtctaagtctttaggcaagtttcacatcacatgatataaatatatcctttcgtacctaaaagaacatgacaatattatataaactaataataatagtataaattatttcaataaacaattcctttgaaacctaacactgattcacaaatccaactaatattattttaaattaattatagaaatttagaattcccagctgagatcctttataatactattcagtttcatcagcttttctatagtaattttttaatatttcattgagaacaaccaacattccaaattatatattcaatccaccaccatatgattgagactactattttttatatataatttaatatatatatatatatatatatttatacttgcacataaagttattctaaattagaatttttgttacctttctctcttctttcaatttcccttgtgcaaaggtaatatatatagtttatgtcaattatatcttggatacttttttatattatttttgcatgcatgcatttgtttttatttcaatttgtgcaacaaaaaaaaatcatatatatataaagaaataaagcaaaggatgaactttattctccccttattcttttttttaatatatttggggtcatgacaataggggaataaactattttataagttttataagttaataccaatttagcttttaaattaagatttcaattatacaaaatcttcaacaagaaaaagacaattatcatttcatttgagtagcaaacacaaaaattatgctatcaaataagcatcgctcttataataacactgaaaaagtgaaatatttagcgattcaatattttataagattttaattatgtatatgctaaacttctagtatgtgcattatctattctaaggaatcttttgttaaaatctaattagaacattaattcatacgtgcacttgctatctcaattaatgtatatttttttctaatgtttttattattatgaacattaacaaaactgaatttaaataaaaaaataaaaataaataaaaaagaaagttcgtagtatacttgtgggtcatgattggttccaaatgagaccgtttggtcatcatgactaatgagaggattgccaatgtggtagggtgtacacatgcatcgactaataattaaataatttcaaagctttaaaacctaataataaaataatttacagtataaattttaaaatttaattttaaattttaaataaatatttaagtttaattttaagttttaaataaatatttaagtttaatttttagtaataataatacttaagttttatttttcaaacatccgtaaatacttagatattaaatatcaagtaattatttatatgttatttttttattaatatatttaaattaatttttttaaaannnnnnaaaaatttaatgactttaactaattaggaattgtcaagtaataatttacttaatatttcacagccagtacttaaaaatttaataatttaaaccaattaaaaattatcatatgaggtatctaaacaattataaaattataatttagatattacttatgtatttatttataagtaaaatttaaatttaagtatttatgttgtaaattattttaataaataataataatattattaagtagtgtgtgaaatgagatgagatgagatgtgatgtgggtggacccaccgaaacctacagtgatccaacagcaaaccaatcgtcgccggcaattggatatggattggacgccatgtaagacaacccttctctctatatccactactctttcctttgtctctttctttaatttccacactcatcaactcctctctctctctctctccctttatactctctttccctcttcttattcctttatcattattatttatataagttaaggaattattgaacttagaaaattttcaatactaaagatagtttcaaactattcacagaattataaagagatttttctattaaattttgtcacacgtggcaaataaaataataacgttgtttagacaatttccatattacgtgtataatttaaaattaaccatttatattttgggaaatttgcggcaaaagtcccaaaaagtttaatttgatatagataagttcccaacctctaaaaatagcaacaatagtcctcaaggtcgggttttttatttgtctgttggtctccaagttaacagatccgttaaacccaattcaaatgtcacgtgtcgaaatattattggtgggtgttattatttta

SEQ ID NO: 49134 - DNA, 990 bp, Cannabis sativa
agagtttacgggtttttagatatggagtttatttttgataaatcaaacaaattattatttcttcaaacaaacaattagtttatttttaaacaatattaataaaatttgtttgatttatttgaaagtgaaaaactcagatgagatgagaagtaatgtagtatagttcctccaaataaaaatgtctcatttgtcattccttgaaagttgttcactcgcggaagccatacctgaaaggcttttgtgtcctttttggaagggtcttcaggatagtgttagtcttcctccgaaaaggagttccagacaactagttattcttcctgaaaggtagttctggatggtcaactccaactatctctatcctatcgtgaagctccctcaccgagtgccttcagcccgtgatcttgaaagcttatatatgttcttggaatcactaagacttacactgacgtggagacttcgctaaagaagagttggttaagttagttatttgttaactaacttaacaacctttattcttgcacccactaactttaggatcttgatcctaagccaataaatatcattcacacttaagcatttgagaggacaaacttctgacggttcaatttgagattaagagttagagaaaagattgagaggtagagagagagagagagaatgtaatatcccgataagtctaatggtaagtaattagagtttatatatattatgggctaaccaggtaataagtgagattatgatcttacgaatctacttcagcataaattttaatttttgttataagtggataaataagcataatttattaattacggatattcatatagcatgtgtgaatataatacgagtttttagtggaataaaaatctttttgagtttggcgaccttggggactcgattggggccaaaattgtcgtagtctaattttagaattaaaattgattaactaaaatcaattaattgagtctcttacaagcagtttgtctcaac

SEQ ID NO: 49135 - DNA, 1195 bp, Cannabis sativa
acgtggtaaggaaatcgcccctaagtggagtatgacaccagtttgtatcgatcaggcttgttaataatgaaacctctgaacgagcttaagacctaagcgatgtgagccacaacgcgtgaatggccaaccagaagaatttgttaaatatcttcagagatacttgccttaactgagtccacaataatagccaattaatatccctattttcatgagttttgatttaatgtaacagaatgagagaatcacatataaatctttcctgatttatctcctattttttgggtaacttatgtattcaatattccctataaatagtgaagccaatctaatattcagggaggcttctttttacgcactttgagagagaatactgtgaaatatttgaaaccttcatgagagagattgaaaaactcgcctgcccggaccttgtgatcttgatattctttctaaaacaatacaattaaaagatgagtaggttattaccgttataagggatcgaacctctataaattttgtgtgtcgtttataagctttaatcattattttattattatataattgctttaatggactaagtgtcgttggctaaaagtgatatcaacaatagtaatctaatcgtgacatctccctcgttggaattacaatcatgattagaataaaaaaaaaacaagccaactaatcaatcgcctaattctcggaactttttacaaaggaaactaaaataaagtcaattgaaaaaggttacagcatcacagttaaccttaagaatacacatatccagtttactccactgctcaaaggatacaattgcagtcggttcattcaacccctcagcttgagcattcaactattgtgcaaggtatgtaactgtactgctaacaacttcttcagccgcaaaaaacttgcgttctcagccacaaataacaatttgatggcgaggtattgaagaataaaaagacaaaccaacaacgaaataaaataaaataaaattatgtcaaaaagacaagactaatcgcaataacttaatcaatagacatttaaaactatgtcacagaaacaagattaatcgcagtaacaaaaccacagacccaaccaaaccacgcctaagcccaaggagggtcggcgggcttagccgcaaaaaaatgggaaacttacaaaaatactagaatttgagttaaattctacaaaaatactg

SEQ ID NO: 49136 - DNA, 1228 bp, Cannabis sativa
gtctttatcaatagtttttcgacaatttctcaatgttttatcgatggtttattgttttggttttatttgtcaaatcttttttaatattgatagtttgtcgagcgatagtttttcgattatttttcgcgtgaactgtgggtttttttagcatttacaaatgtttccaaagcttatagtttcatcctccgagcattttacaagtcatgtgacatatagaggcaatagagtatttaataaaattaaaatgcagtttgatgcatatgattttactgatagggcaaaggaaagccctttcagccagttttggagggctaatactctattcgtttcttcagtgttatttcaccaattgatgttgcataaaatgttgagaaggcagaagaaatgcagatttacattggaaggaacaagatcaaatttggggtggtcgagttttgcactaattataggccttaattgaacataggaagccaacagatgaggaaaagagtgcccacttgagggaaaactggttgataaacctgtatttcaattggtccaatagttgaagacgaaactacttcagaatcagttcttatacggtaagactctagaagacgtgtacaagttagggttgtgtttatttgttgaggcaatgttactgggtcgtgagagtaacgctcacatttcgtttgtgttaacccaaaaactttctctggtgacatggacattaatgtttaacacgtggcatgaaagatgatgtcacgaagttgagtacacccgagtcataccagtcgacctgggaggggaccctagccctatgccaaggttgacttcaagatcccaggatggaagtttgaacttcaataaattgaatccaacccactatctttcagtattatgtaccatgaagagatggagtaacctaatctaaggctcgggagttgaaattacataaatctgcaacccggaagccaacttgggcacctaaggtttcacttggtgcccaagttgacatcctcaactagggtttcagtttttggggccgtcttagtgccgaggggtcaaaacttacattgagacatcaactagacataccacaagcatatttgaggcatcagaatcaaatcggagcaagatgattttgttgggatttaatgtcctaaataaaactcatttcaatataatcttatttaataaatagaagattagaagtcatttaatgtaacatgtgattttcatgattatg

SEQ ID NO: 49137 - DNA, 983 bp, Cannabis sativa
gagttttacgcagagtcattggaggatggtcctaacgttaaagatcaaacaaagcgcttgtggcatgattatcgatgttttggaccattttgcttctttgacttgcacgaagggaaagaatctaaacccgcaggaagtggatcttggataaataacgacgaggttgaatttgtgttcctcttgtttcagaaattaattagtgcacaccctgaactcaaatcaagtcagcagttcgcaattatatccccatacagtgcacaagtaaatctcttgaaagaacgttttaagaatacttttggagttgaatcagagaaagtagtggatattactactgttgacggttgccaggtagaactcgaatatattattttgtaagatatggaacctttgcaagattatggaaacatatttttgttcctgtttcagggtcgtgagaaggatgttgcgatattttcttgtgttagggcgagtgagaaaaatggcattggatttgttgctgattttcggagaatgaatgtgggcataactagagcaaagtcttctgtcttggtaagccattatatcagacctaaatgtatcacctagcctcgtatgcaagactaacgtctagtattcgatcaggtggttggatcagcatcaacacttaaaagaggcgatgagcattggaataacttagtacaaagtgcagagaagagggactgcatgtttaaggtaaacattgtctctcccgggtattcatttttcatattaccaatcgagacttgtgaatttttcttgatgaagaacaatttttcacattcccaccttaactaacactatactagccttgacaacttttgctccttcatgcaaaatttccttcatttcctacatacactgcattccgtacccctccttttcataaccacgaatcgcagttctttttttcccagcaatttcacaattatgaaatcccgaaagctgactcgcccctctggtgcagt

SEQ ID NO: 49138 - DNA, 913 bp, Cannabis sativa
  modified_base (418)..(418): a, c, t, g, unknown or other
caactcttattaataatcaaaaaagtctttacaggcttttctaggcataaaccctaaaaacatcttccaccactcctcaataaatttaactagagtgaggaagaagcataaacatttcccatcatcggtattcagtgccacttgcatcaacttattaaactggatagatgaaccctgaggtttgtcctaccctcatataagtcaatttgaggcatgctgaagcgtgctggtagcgacgtttctaaacttcttttaataaatggctccagttctttatcttctgagttagacacagtgcaactttgcttgcggaccagacggaccgtgatcttggttaagataacgatttgatcctccagccttctagtgttgttctccaggacatcacatcctcatatttacttatttatattattcntgaggtttcctctacgaggtctggctttcccacatctgactttttctctctttgcatttaaacggtcgttaaggttcgttgttgacatgttgtctttgggatttagctcttccactttgatggtctggttaatagaaatattgtagcagtttttccttccttgaacgttaggctctgatacctgagcactacgcctattgtcccactcgactccgcttcgcatcgatttgatggtctagccctggggcatggatgatcctttcttaatatattcattaatgggtaatacatataagagtgcacccatatacatatttatgtatatatatatatatgagaaaaagtatgtaagtacgaaatgtgattaattaattaaaaatagtatgaaaaaatttgagtgtgagtagtaagaaattgtaaaagagagaataagatataaaatgagtgctggtattttttttttaaaaaataaataataaaaaaaatttagtgaga

SEQ ID NO: 49139 - DNA, 1400 bp, Cannabis sativa
atagctatttactgtggttcttttaacgtttatcagcagtgtctacttactggttctatttttcactcttaactatatctatgtatatatactagtttggaatgcagtgcgttgcactgagctcatttaatttaagagacatcttctcacatataagttttttaatacaattacctcaagcacaaattaaaaaaaaaacaataacaagaatttgtcatgtaaaaaataacacataaaaatacctatcataaattcaaacataagatatatatatataaaatatataaaaaataacataacaattaacaattttatacttcaattagaaaagctttttactggattttctatcgtaaaataaatttagtgattttaagtgagggattgagatgagcttgaaaaaatataagaaaattagagaagaagaaatgaaaacccctaaattttggttggaaacttttttgagcagagaaataagatgataacaaaaagtaaacacatcacatttcacaaataaataactcaccataaagatgaaaataaacaaattaatttcaaaatcaaaaaggaaaaactaaaaattgatagaaaggcaaagggaaatggatgcttatgcactaatttgtgtaaatccatacacaaataagatattaaaaactaataatactttaatctgagataaataaaaaaattgggctaactttcattcagatgagacatctcaaaaaaaaattaaattttgttaaatggacatccataagcacgtggagcttctataaaaaaaaaaaaaaaaaagacttgtggagctttataatcaatagaaaataaaatagagattgagtttagatacgtgtcatttttagagagaattagtgttgaagtaggtgaagcaagaggggtgaagctgaatatcataaactcaaatcaaatatgaggttgtgagaggagaagacaaaatttaatgtgaaaataccacaaactccttattaagcagctgaataatattaaggtttataagacttttaagcaggacgtgaacatcaaccttattatatataagatatactggtgcaagacattaaagttttgtggttatgtattctttattttttttaaaaaaagaaaaaagtcggtcgtatacgagttttatatatatagcaaatttcttatcttattttgggatcaagcacatatgcaattgtgcccacacctcgtacatatatatatggggcaaaattatggtaggacctagcaaaagtttcctaccggtaggaaaatttttttaaccattaattttaggggattttttctcatatagctttattttggaaaaactttacttttttactctcatataggaaattaaacaaaaaagaaaaactcaaagtctttttttcaaa

SEQ ID NO: 49140 - DNA, 1304 bp, Cannabis sativa
tagattgaatcatttgtcgatttgtaggggttaaaccatcataaaaatattttactaatctccatttttcaaaaccatgatggagacattttaataataaatctttgaatctttcccaacattcataaaactctttattatccttttgataaaattcagagatttctcttcttaaaattatcagttttggacattgaaaaaaatttagccaagaatttattaagaagttcttcccaagaagttatagttccattagggagagagtttaaccatgccttagacttatttttttaatgagaatggaaatagcctaagtttgaccgactcatcagaaaaaatttgaaatcgaaaagttgagcaaatttcaagaaattctttcacatgcatgtaaggatcttctctatctaacgcataaaatgatggaaaaaattgaataattgacggttttagctcaaaatgggtagcatcagtagcaggtaaaataatgcaagaaggagcattacaagcagtaggagagaaatgttcaagaagggtttcttcttgcaatgcattttcaacaacagggggatccattatgcttaaatttctactaacactttcaatgtcaaaccaatgtagtcttcttttagcaaaacgattctttgaatcacgtttccaatgatgcatgcaaatttcacacaatacttaaaagaaaatcacaagagtcaatttttgatgtggaagattagttgaaactgcgaccacagagcgtacttagagtgatatatatatatacatatatatttttgttccttttaacaaagcaaaaagaaaatacaaacaaaataatgaaaatatgaaataagaaataataataaaagcaagaaaaaaaaatccagagaataggaggcgcttatgccgtcaactataaaaatgacaataatataatatataaatataaatatagtatatatatatatttagacggaaaatcgacccaattatttttttaataataaatattatatatatatataaatattaggtagtaggaccgacccaaaatgatttattattattttttttcttttattttcttagacaataaagcaaaatagaaaaataaaataactagtagaagaattttactaatcttgagataaatatgtttctctttcactccccggcaacggcgcaaaaaacttgttgtacacccaatggtgtgtttttaatatttatactcgcaagtgcacgaatcagatatggaatatagtgttcatgtaagtacgagatcgaacccaaaagagttgatttatatctaagag

SEQ ID NO: 49141 - DNA, 1319 bp, Cannabis sativa
caatcagattaccagcactatttcaatcagaaattattttgaaatgtaaatgtatttttaagaagaaaagatattaaaagtatatatagactatttttattgactgatatattgaaatacaaatcttcctttacaattcagacttaatttaatacatcatacagagagtccaaaatctaatcacataatccatcaaattaggaaataaaattgttcaagttattctaaacaaaaattgttataaacgtcattttaccacttgactaatagcaatactcagttaagaaattcatcatagataatgttgattgattttcaaaatgtagattttataaaataacaaaaatgtagataattatatatgcacgtattcacccttctctgactgtctctctctgtctctttttaaatgtatgtattcaaattaaactaatcaaattttatcaactattcaaatttatttattattatgaacaaaattagtagacttgaataaaataatttaagatttaattaaaaaaaattagatcgaataatttataaagattggattttttttttataaaataaaaagattagatgaaatataataaatacttaaaatagaggacacttcattctcattaacaatgaaaaaaaaaaattagataataattaaatcaaaatagcaccacatcatttgatctagaaatttgttaaaaagacaaatactattttagattctatattttataaaaattaccgattagatttactattttaataaaattggtttttttatcaaaataaaagttaataataatctgatcaagaattgttatgacaaaattgagtatattttctgcatttattcctgttaaaaattatctttaagtttgttataattaaaaaaaaaatgtcaaaaattatgcttagggtacaattttgtactattttaaaaaatataaggtttaatttgtcattttaaaaaatataaaggttcaatttgtaatttttacaaaacataaagtctaaaatagtattggcgacaatactacccaaactacacatttagttacacttaaccccacaaatgtaatttttgtggtaaagctctctgaatctcacttctgttttgctcattacacctatatctaaaaacctcagttaagtgttatagtgaactgcacacgtgacaaatttttagtagtccacgttatattaattattaaaaaataattttaaataattataaattttaaaaatcagaaaaaaataataattttaaaaaataattaattttttacttttgcctttactttttttctttctttcttttt

SEQ ID NO: 49142 - DNA, 3188 bp, Cannabis sativa
ttcgaacccaagacctttaagctacaagttattaattgattgtaaaaataccattacgctacactcaaaaaaaaaaaaaagaccaaatatggatgtacacccctagggccactaaccaataaacaaagttccattttggtatcacattatgctaaaaagtaaagtaaaaaccacaaagaaaggaaaagaggtcaattttcagagaaagtctctctctcgctatacaattctcttctctcattcttcttctccaactttgtcagttgtcaatttgtagattagattagattcagatataaacaagagaaagagattagatagtaacatttaatatatataaatcttcttagtccttccaatccaatccaatcatagtccttgatcaactctgttctgtaagagttaatctccttcttccgtcaaatcctttgccaattaaaaccccatatctcttcttttatctttattaattttccttttttagattccttggcttttgttctaataagaagccacacaatagtgaaggaatttccaacttcattataacctgtgttctgttctcaactctctctctctctctcttgtgttttttggaattaagaaggcctttggtttgagaaaatgacagttgacgaccccagagaccagtttcctattggaatgcgagttcttgctgtagatgatgaccccctttgtctcagacttctcgaagctctgctccgtcgatgccaatatcatggttcctctctgggtctttgttttttatatcaagattcatttttttaagtgtatacataaagattcatttttatttttatttttgggttttttgttgcttttcagttaatattgtttcttttattggatgcaaaattttcttaactggtttagatttcccatctgtgttttttttgggggggttgttaaaaaatcgatcttgttttttttttttttgtttgtacgataatgaaatcttagatttgtgtacttgtcagataaaattctcattattggtttgtgaatctattatgggtttttgtagttactacgagtagtgaggcagtggcagcattgaatatgttaagagaaaacaggaataactttgacctggttatcagtgatgtgcaaatgccagacatggatggatttaagttacttgagcttgtggggttggagatggacctccctgtcattagtaagccacaaaatattcattattacatgatcatcattattactttaagttatctttttgtcagttttcaatgaaacaatactttttttttgttttccatgtttgaatgaaacttttcttttatagctagctaattctgaaaaaccccttaaagaattctgtattatagtttttgaatctcaaagaaaatttgacatctgatttgtttctagcatgagaaatcatttttgaagtttatgtttgatttctaaaatgttatatatgtttttctcttagtgctgtctggaaatggggatcctaaacttgtgatgaaaggaatcactcatggagcttgtgattatttacttaaacctgttcgaatcgaggagctgaaaaatatctggcaacatgtaataaggaggaaaaagaaagatacaaagagccaaaggaattgttcaaatcaggacaaatctaatgtagaaggagaatctgggtgtggagggacaggaaattcagatcagaaaatcaataagaaacgtaaggatcagtttgatgatgatgaagatgagaatgacgataatggagacagcgatgacccatcagcacaaaagaagcctcgagttgtttggtctgtagagctgcatcgaaaatttgtcacagctgttaatcatcttggcatagacagtaagtgatcttcattctttatcaatgttcatattgtcctattcaaatgttaatttgttttccaatgcagaggctgtacctaaaaagattcttgatctgatgaatgttgataagcttacaagagaaaatgttgctagccatcttcaggtacagatgcctgttgtgtctttctttacttcactatgatatgttttctacctattttaagaagcttactgttatatttgctttgtttgaatttcagaaatacaggctttacctcaaaagaatcagttgccatgcaaaccaacacgctaatatggaagcagccttacgcagttcagattcttcctatctgcgcatgggttcaatgaatggacttggaaactttaatgctttaaatggatcaatgcagtttcaaaatcccgcttttagatccttcccaccaggtgggattgttggtagattgaacactccatctgctatgggtctgcgtggtcttccatcttcgggtatggttcaactcagccatactcaaaatccaaacagctcccatgatcaaatgaagtttcatcagtcgacccttcctgctgggaaccatgacgggaatgtacttcatggaatgcccatgccatttgaaatcaatcaacagcacattaagggtgttcctcacattggagatctttccactggtcttgatgattcgacattgtttcccctttcggatgcaaaactaactactagtaataattctagcaatgctcttggtgttgcaaacaacatgatgatgttaggacactctcatgatccccaaggtggaagagaattcgggaatcaatcctctgtttcattaacctctttaaaatcagaattttgtccccctttgccagatcctggtagatgtactactgactggtcaagctctgctcagacatctgggttccaatcgacatcttttccattgaatgatcgttacaaacaggctacaatgcatcctggtatctcgagggacaacaatatgcctattatggccccacaaattggaggcagccaatttgatgtttcatcctttccatcagtctcgattcgatcccatgactcgcttacagatgcacagtgccaaacttctgcaatgaacaacggtgccttaattccgagctgggataaccataagcatgatccttcttacagaccaaatattatgtctagctcaatgaattctttgatgcctgttaatggtggtgctggtggtcctttggatcagagtttggacttaaagaaccagatctatcacagaaacactgatttcaattctctgggacagacaaattatgttgatcctttgatt

SEQ ID NO: 49143 - DNA, 1393 bp, Cannabis sativa
tattaccctacacaaccaaacacagtttacacatttccctataatcatattctccttcataatatttcctataatcaaattatttgaaacacctcataccaaacgccccctaggataattgcataatgaattttgaatttttacctttaaagattttttaaaaatatttttacaatattccatataaacaaaacgaaaaataataaaaagattatataaaagtaacagaaaaataatattcaaataaaataaaaaaaaaaacatacaaataatcaaaaattaagaaaaatacaacataaaaatacatcacaagactgtattttctgtcaataaaatattgtaaaaatatttaaaatttcggagttacgtatttttgtactttttttattgtttgaataaaaattttgtttgaaccttaatttcaacacggtaaaatattcagaattttttaagaatttacaagtgatcctacatagcttacacaaccggtcctccacctccccgctgcctccagaagcacgatccaaaccccaaatgcagaccatgatttccaagccaaatctgaccgcacaaagccaacgaaacaaccctaggaaaacaccaccacctcgaggccagagatcgacaaaaaagattaacaacgcagacaaaccagatgactgccaacgacatcaaactcctgcactcaagtaagaatgaaaccgagaagaaatgagaaacttgaaggccaaaagtaaaacactacaaagagatcaaaaacaatgtgggaattacactagtcctcaccatagccacgcctaaaccaataagagcaggcgggcctggccgaaaaactctgaaaaagcagcagatggggttaatgaagaaaccctatagtgtaagagagaaaattataacatgtattatctttttcttttaactattaataattcctttttatatttatcaaactatattctaatagtataaaatataaaaagtttattttatatactaattataaaatatttttaattgggctgcaagtaaaaacaaataaatatatattatttttttaaaagaaataaatatatattattgaagtgattagtttctaatgtaaaaataggaaaaaaaatatatataagaaaatgtttagtcaaaaatgaaattgataataacactaataataactagaacatataaaagagagaaagaaataaggctctatctacttctatatgtaattcagaaagaaggaaatgaataaataaacaataaaatattattaaagaatctacattaatttataaatgtggagcaaatctcataaaaaaaaataataattaaacgatgaagtagttaataaggattatttcaaggaaaattccgtatattttaatgaatatgggag

SEQ ID NO: 49144 - DNA, 1642 bp, Cannabis sativa
tatccatagctgaagttactactgctactggctggtcactcatcaccattcctagaccactgtagtggagactttcagtggggaacaagggctgctgcgctcgcccactggcaggggagggggagggggaggagttgggctgctgctgctgctgctgctgctgatgctgatgctgcagcatgtggtccaatccaatctcctttgtatcagttggtgtggttgatgacagaagagagagagcacaactagagtcgacgctgtcccggtgcagccagttgttatttgagaagaatctgtggctgtttgcacagttgttcaaggcagagtttgaatccatgagtgactgagtcacagaagaagcctcagagtgtgtgcaacttgagctttgtaagaaagagaattctttcccacctccactactactattatagctttgattcagtgatcctgtaagagggttttttcttatgtcactgaactcttgctttgtagtaactgcagccgaagccatggcagcatttggaaatgcttgtgggttgtggaatggtgagaatcttgtgcctagaaaagaataaataaaatataataaatggaaaaagaaaaccaagaatgaattcaagaacaaaacatttcaaaccttggtaactagagaaaaatcttcctgaacttaaggacatgggttctggttgaggcttccttctgcggcggttgtgcccatcaagtcttttcctgcagctacgtttttcctcatcaaactcccctaacgaatggaacctttaagaacacaatcataacaaagtttttattagattttcaacttagacacatacacaagacacaactttggatacaaagaggtaaaaaatagtgttaaaaaaaaaaactaactcatttatcttctttggtctcaacttgtctaattctattaaagataaaattcttatcaacaatgatctaaacacacctgctgcactgctggcaaaaccgttgctcgcggcctgcgatagtaacctttggagtctttgagtgagtttcacaaactttgtgtcgtctatgatagtcccggcatttggtaaggtctgaattgcagccatctacaaggcaagacgggacttgggttccattgcttgatgatgaccctcttgtcctcttcaaaggcatagaggaagaagatgactccacatctgaagccccaagctctttccacttgaatttcgatccatcatccataatttgccaaagaaatctcctctagtagtaactttttttcttactatctagtcttaagataccacaaccagcaaccaaaacaatgttggaaaatgccttatttctccaactcatagactttctcaaatactcttaataatctctttagttcatttttcctgaattttgttgaacactttgttatcatgacacatttaagaaaaaaaaaggacaaaaataactgcgaaatacaaatgggaatgggaagtagtgaatgtttttaaattgtaatggaatttaaagctaaaattatcaccaggaaaataaatcaagtggtcatagacttgagaaaggcaaaacaaagctttatggctactagtgcgttttgtctcatctaaacgctaaatactatgatacgtgcgttttgtctcgt

SEQ ID NO: 49145 - DNA, 2206 bp, Cannabis sativa
aactgggaagaaccatatcaggtggtcgaggttctagaatcaagagcatacaaacttgggcattttgacaaaaatatggaactcattctagtgccaaggtattggaatggagaaaatttaagaaagtactataagtaaaagtaccaggcctgatgaccactttaagtacaaaaccaaagaacatttacttttaagtaaatggccttctaggcggatcccgcccaagggttcagacgaaataagtaagtactcaggtcggatgaccacctatgaaagtataatttcttttttaagtgcaatttattttgtttaaatttagttaatgatcggattagatcatataatggcttttatgtaagttactacggtaacaaaaatattccaaccaatgaatgaataaagatgtctatttatattctgattgtatcaattctattagcaagttataaatttaccattaaatgcgtacaaaggtctgctcgaatccaaagaactgaacagaaaaaaattatacttgtgaaataaaagtgaccaagagtcaaaagtctactcggtcacttggggggcaattatacccatacaaagcactggtaaaagtagataacaagctcaaaaaaaaaaaacaaagcataatagttgcacatataattatcacaacaagggatagtatccattgaaaatgacaaacaaagcacagtaaacccaagattaaaggctgccgagtcagctagttatcttaaagtaaaatatataacccaagtttaaaaactgcttggacggtcatttttgtctcttaaaaaggcctacgggccgaatagacacatataaaaaaaagagaagtaaagagaaaaatgttttaccaggatctttgtacggatcggtttggtctgtggggccagaggtcccaacattctgagcagcaggagtttcagtgctctagtcagttagaactgtagaagtggctgtcttggggttttctttagctgtctgacctacatagtaatcaagatacatatccctttggaatcaccaagataatcaaaatttcctctggggttcgccttccaaaattcatagaagacctcaagggcggtcgtttctaggctttccaacactttctcgagctcttcctccctgctctgcttagtctggacgtctccctccaactttgagagaagagtgtggagattctccctctaatctttaagcttattgacctccatagacaaatcgtcattgtgtgcctacatctgggcggttgacggcatctcctgaatctccttagtcagctcttcaacccttttgtttgcagtaaggagctttttgttcacctctctgagctcgtttcgtacgtcctgaatgtcctttttaccttcatctacctccctctacaaagtattggtggtagcaaggtttttggtcattgtggactaagcctgagagtaggcacaggccatcttcagattgacatgcacgaaaaaatattaaagcccgaactaaaaaaaaagactaaaaacaaggaaagaaatactcacctaagtagcctttttcaagactcctcccatgagcagtttcgaagacagctcattgtccacaccccagaaaactgatcgctcacttcaggaaatgatccattcagataatattagagcatgtccttgcccttctttgcctctgtgctcagcgcccgttgaaggggtcttagtctgatcagacccgtccaagctcccccctctggaactctttgactttgaaaccttctagactaaagggtccacggcaggccattccttagaaaggtcaatgagctcttcgaccggccccctctctttggaagaggtctcattgcccttagatcttttgggcggaagagtctggcccaagatgtcccccactctcttcttcaaggcctgaagtaccttctaagacatttttacacaaacaaacacagttagaagcaaatgtggtgtaaagcatgttatgaaagaagtaaatgcaagttaaaaataccctgcatgtgggcaggagcatttgcccgaataagaacagacggggcatcatcatctgaagagtcttcctcctgctccaccaggacggctttcccttttccttccattggggcggatggccgagcaggcatatctgttggaatttattttaccaggatcttagatctactctggagtatgttgtttaacaccctaaa

SEQ ID NO: 49146 - DNA, 1674 bp, Cannabis sativa
taataaacattaattcacatttttttgttaaagtattgctattaattttttttagtaatttatattttaaaatattattgtgcattatagtaaaataataattattgtgcattatagtaaaataataagtttaactcctagtcacaaataaatattcatgtttaatttttgacggtaataatacttaagttatattatttgaacttttgtaaatacctaaccgttatgtgtcaagtcaatgaccatatgacagtctttgattggtccaagtcattaaaattttattttttatttaaaaattcatttaaatatagcaataagaaaataacaaatggattatgacttggcccttaacggttaggtacttcttctaaaagtcctagaaaaaataatataattattatgtatattattaccatcaaaaattaaacttaggtatttatctacaaatgagagttagttaaatttaggtatttacgttgtaaattactctaataagtataaggattttttgctcccaaactttgatatagatcaaaggttaaccaaattgtacttctcgaacttttataagtaccaaattatgcctttcaaagtttgacatgtaccaaatcgtaccacctaaactttcatccatattaaacttttgttagtaaaattagatgaaattttttgaatccaacaatcacatttgttcaagatgaatttttaactacctggaaaatttacgggacaaattttttaatatttgtttattttttgtaaaatttgatgagaaatgctaaaagacactcatggtgtctagcatccttgtgatgtgtaatactgttattggtgcaattcaatatcgagtctcactcatactttactttaataaagattataggatgccacctcatagtggtgctatagcaattcaatatcgagtctcacatgcttgtaatgtgtaatactattattagtacaatctaatattgagtcccatatactctactttaataaagattaaagggtgccaccttggcggacacaggattgaattttatggtgggcttagttatacatttaatataatccaaaacaataaataactagctaaatttaagtggaatgatggtttagcagcatcccactattctagtggtctttgaactttatacttcatttattttttctaataaataaaatgtagatgcgcgtagaaaaaaaaaatgggcaagattattcaaaaaatagtctcccatgtaaatttagagtatcctaaccaactgttccatttaactactatgtatatatgaaaataacaattgtatattaatatatttttaaatctcagggtccctcaacacccctaagtccacctatggctatatcaatattcaaattttatattgtattttaattttacattggaaatggtctaatttttttatttttttataaagccaaaatggtctaatgtttaattattcacaaagaggcaaaaacaaagtctttagtttatatgttatttaattcggttcatccattctaaatgacctttccaattcaatggggcaaagtcttcagccatttattatgatgtattttatttatttatttttatcttattttagattttttttttttttgaaagatgattaggaatatttttattttgagcattgctattgg

SEQ ID NO: 49147 - DNA, 935 bp, Cannabis sativa
acatgtcaaaggggagaaattactaattaaccttttaaaaatgccacgtgttgaaatattattagttccaactataatttaattaaaaataatttataaatgaaaaatcattattaaaaatttaaaaacattatttttttttttcgtttcttctctcgcttcctcacccacccaatcacctaccctgactgtcaccccgccgcatctcccacacacagtggtccaaacctacaaggaaacaacatataagctccgcgattacgaaaaccccaacttagaaaatctcaatccccatctctcctcgtttatgtctctttcttcgtgtctcgttcggcccaacgctagctagctatcttcggccatgctgacaatcttgcaaatttggttggaaaattaatgtaattattgttaggatgtgtttggaaagttacagcctaattgaatttatgtgtaattgaaagtaattataaaatttgatatgtttgtctgatcatgtaattagactgtaaatgtgtaattgaaggtaattcaagagttctaattacactctcttcaattctcatggcccccgttaaaattgagtgtaactacactatgtaattactaaaaactttcaattttgaatattaactactaaaaaatattatttttctgcgtaattactaattattgtattttaaaatatactgtaattattagactgtggtagcaattacactatctagtaattacagagttacttccaaacacactcttagataaatattttgaatattgtattttgcaaaaattatcagttggattttatgttttcttaaacgataattctaactttgtatttcgaaatagtacaaaatggtagctaagataattttttgttaaaataaaatttaattataacctgatttagaaatgttatcagttatgaccaacca

SEQ ID NO: 49148 - DNA, 840 bp, Cannabis sativa
cattgacggcggcggccgccgcggcaaccgcgccgaggtcgtcgacgggggcacgtttcatctagggtttgaaacggtactgaagagaagagaagtttccggaaattttagagttacagaaaaaaatcgtgagataaatctttattttctcgtgaagtttttttttcattttagggataatataagtatttatttatttttttagaaatgtttttttttttaaacatagtattaaaacacattaaaattactaaaaaatttataatattgacatccgctctcgaactagaataatttattgtctaaacgaaagatatgttttctcaaattattaattacacaagtaaataaactacataagtagataataaaattataacatcattaaacagtacacacaaattaaaaatgcaacttataacaatacatgaaacatctcaacaaaataatatatcaataaaatactaaattcatacattctaccattcaatcaagtaaaacaaaaactaatgaaaaaacttaaaaaaaaatactaagcctaaggttaagaagtaagtaaataaggttactgaagtatactaaattcatacattctaccattcaatcaactacatatgtttactgaagtttttcgaaaactgattataaaataaatgaagttaagaagtaagtaaataagaaaaagataagtagatttttacatggtatgaatgttaataaattctagagtcaatgttgttgaggtagaaaaactttaaagtatttctttaagtgtttatgccttaattgaaaaaccctaattctcgtctcttctcccatgaattcaatttccaattcttt

SEQ ID NO: 49149 - DNA, 1544 bp, Cannabis sativa
tcttggctgtggctccgcccctgctcgtatgtcaaccttgcccactgatggggtaaatacaaaaattgactttgggttcatttggtgaagcttgacccatgagatattgatcttttgctggcgtggatgccgcatcatattgatagttatcaaaacgtgtcctacctttgtggataataaagacacataaatgcttgattaataactacttcatttcctcgtttagaatatttaattgtcaaaatgatcctgtaataaagtcctaatattgtgagatttcataacaaatgagtgagatcccaagctttatatttggaggctcattaactgctcttttgaaagcactatttgatgctatttggagactggctatgctgaatatttatctcgcttgtacaagtcatctatctgtcatttggatggcttgacttcactaatggatctagtccattatcttgattaagcctatggtctggccttttgtaactgaactaaactatcttaaaattacacttgtcttctatccagaaacatggataacaatccccttctctcttactcaaactcaactttattctttatttctctctttacctgatagaacaatctcaactatataatgtaaaaattaataaagaatttattttaatttgataacaaaattaagtattgaaattcaaatttttctaataatacctattagaagttcactcatatttaatactctagtaaattataaagcttaattttattctctaatacacaaaaattaaaaaaaaaaaaaacaaatgatatgaaaattgttaaaagataataataataataaattacaatatgttcatttttgaaaaataaataaaatatttatatagaaaaagtcaatatttatgctttcttgcattgtttcttatagggctgatagggagacagtgtcacatgctgtcttgcattgaaaggtttgaaatttttttcatttttaatactttttataaacgaaataaatatgtataagttgctgactttttgtttcaagcttttcaaactttcaatacatattcgtttgaggattgcatcagattattgtaggctgtttggaatgataggaatgttgttctttttggcaacgcaataatacatcataacaggttgtttaattggatcatgggagtctttgcaggactacaaacaagcatggattagaagacttgatggttatgttcttgtttcatcttgtaatggtgctattagacagtgtctcaacaatggaacttttaaataaaatattgatgcagctatgaatactcagtcaatactagtggtcaaggtgcgatagttacaagcaatgtaggtaatgttgttggcgagctttgcagacctttattggggtaccccgaccctttatatcataaggacaagctttgcttagtgctagggatgcacacgggctaggaattagcggggagtgctcccccgtccccatccccattaaggattttaatccccatccccgcttattttctatcggggacggggcggggcgggga

SEQ ID NO: 49150 - DNA, 2146 bp, Cannabis sativa
gcgaggggctatggacgagcagacggtctagaacgccggtggagccttggttttgttttttttaattatagtaaagtattctgagctcagcgggatgtggtaaatttatttttttaaaaaaaaatgcactcaactacttattttattttaatatgaatgatcattcgtctttggcatatttatagtaaaacccgctgtgtatttctaaacagttttgagtcttttcaatttatgcatcaaagttagtattttgtaaaataaggctaaatttcggggtgttacaagccaggccctgcccagcttagggttggccggccatatacaagtaccagactcagggctggccaactttgagtataccctctcccaaggtatggccagccaggctctggccaatccaagactacaactcaaccaaaaaaggccaatcaactaggcccctaccgcaatagatcattatatgcaagcatagtaggatcaaatacgagacatgcttaagggcctagctagtccaaaaccttcagaacttcagttagataggccaaggggatcaccattctcggcatatataaatgccttacccttgcccaaattcaagatgctgacttggaagatgtacacggagaaagaagatcccctagaatacctaaagtactttgagatccaaaccgatctccaacaagtatccagagatgtgcgatgtcgaatctttctagcaactctagctgaaatagcccaacaatggtatttcaagctggccccaagaaaacttaactcttgggaagaattctcccgagaattctatattcagttctctgcttcaagataaatacctgcctgattgaaggatcttgttgaaacaaagcaaaaacgagatgaacctttgaaggactacattcaacagttcatggctgaggccaccaaggtcaaaggccagacagaagaaggccaatatatggccatactcgaaggcatcctaccattgagtgacttcaggaaagatatcaagaggatctcaacgaacaacatgaaggagttccttaagcaatcgtatgtcttcataaagttggaagaagctgtctgacaagcccaaataagagggcaagtcaacgacgaacaaacacagggcctcatagcaccccaagcactgtccaacatgcaaaccatcgcagatgatctctgtcgattttccaacattgagaatggtggaggcaagaacaacaacgatgactctcaccaacataatggcaaaagagagaaatttaatgattcccttaggccatgaagcccaagggagaagtggggggaagtgtgcatacttcatctcctatcaaaactcccaaagcaaagcatgccaagacgtccaagcaggtaagccagcaataggcactctaaaggctggcctccatctccgaaggctagcctccatctctggtcaggcatacaggcaggtgctagcaactctacccaaacctctggtggcaggacacttaggggtcatcattggcggaccccatactgcaggcaagaccagcaaagctagggagcgctatgcttagacactctgtcacgagcccaaaagttacatcatgaggcaaagaacgggactctaagtaaccgaagcttggagattcccacgatcccattctcaaaaggagatcttgcccaagtcagttttccacagaataacaccctggtcattactacacaaatcgagaatatgaatatagcaagatacatggtggacaaaagggcctccttcaacattcttttcaaatcaacatatgaaaagatgaggctccaactcgttcacttgtcaccttgcagtcaagtgatgtatggcctatttggccaaggcatcgcacccatcgagtatatcagattagcccccactattggagaaaattcaactaccagaactctaatagtgtagttcgtcgtaatcaacgttccgtcagctttcaatgccatgataggctaacaagccctatacaacctggccttatccaaagccaagaaaaggaagattcattcaccagatcaggagcatacaagcttcatgacaggattatgcctatactattgcaaagtcacgcccttcagggctgaataatgaagaggccacatgtaacaccctaactaacat

SEQ ID NO: 49151 - DNA, 1673 bp, Cannabis sativa
aaataattaaaatgtaataaaataaatatttgaaaaatatctaatttaagttgttccagaaattgaagatgatgtgtactatagtgatctagagagcaaggactatgataaaatgttgagagatatgactaagccaggtacacattacatgatggggaaggatatggttactccgaggcatatcataaataccagtttaagttatttcagcaaaatgtggaacaaatttgtgattaataacttgcttccttcttcacaacaaggggagatcaatattgagaggttgtatctgctgcactacatttgttcaggaaaaagtatcaatgttggcaaactgattcattccaacatttgtactataactagggggtctaaatctactgctcacggttatgcttgtttgatcactagcttatgttcaagagtaagtgtgcctatgtttgagcaggagcattgggaagcatcgggggtccttgatcataacattgttatgcatttaaaagctaattaccatggaatagctcgacccactgacttaggcttcgaggagcaactggaggagttttttccgttacaacaagatacacattcctcgtcctcttcacaacctccaccatcgcgacctcattctaggccatcctcatctcaagttactgagggctagagcacccagtttggtgactttgagcaacaatttgcatcgtatgaacgaaatcaacaagtgatgatgcaaaacatcgaggagttgcaacatcgtcagttcatgatgcacaacttttaggctaagttttatgctacgtttgcctatcactcggggtatcatggttatcctcaatttcctgatgagctccgatgttcatatcaaccacctgggtgtcatgatgacgttccacctactactgatggcagtaatacaactatggacccgtagccctagttgctctggtttgttttctctcctttaattttattgcacactggggacattatttattttatgtttggcgatgggaaggcgattttcatgtttttattttttgtcattttattttaattcatttttggtttatatgggtagatttaaggttttttttaatttttggatgactatatcaacgttaacttatgacttatgtgaattcgatatataatgaacttatgatgaactctttgatattatttagtatgtgtgaaaaacttttggattgtgtgcttaacctgttatgcttgcttttagtattgtgatatgatttatgtgttattctacttgttctatatgttgtgattttatgtgtctatgtagacttggtttgatttagtttatattgagataactagaacttgtgtgattaatttattgaggtgaaatcctaaatctttgttgtgtagaaatgattaaggcaattttctttaaaaagtttgagccaaaaagctaagcttaatatattatcgtttgttatcctattttgagcctaatttttccaatttgcattctttattaaaaacaaaatgcatatttatccttgattatgagccataaaataaattatccttaccatattgtgtaccataaatataggttattgtgtactgaatgaaaaatatgatgtaagtaggatgagacaatttttttctgagaattatgttgaaaagggtgtatgtgcatagagagt

SEQ ID NO: 49152 - DNA, 3149 bp, Cannabis sativa
tctgcgagctggtccagatgaccctacaacctcgataaactgataaggacttgcatgtcttaggttaccgacttattacaagatgtccgtacaagtgacttgagcaggacgcagacatcttagactcgactagtctcgaatacatcttaagcttgcgagcttatgcatgaatatgaacagccaactcgcaccatagaagtcgcatatgttgttgtatttagtgaattaaactgaaattgttcttcatttattgtatttacgttttttagtttaattattgtaattcaatgtacaaacggattgataatgaattcaatctctgtgtaaatcaaatgacacttgctttgtatataaaggagtgatccaacgtgaaatagacaagacaaagaaattcttgcaacagtggactaagcagaccgtaatctgactgaactactatactctcttgtgttctttacatttccagtttcttttcagtattttgtgtccttagtttgaatactcgccactttaagttgagtactcgcgtgtattctccttataattattattatattatttactttggtgttgttaaaattccttcaacaacaagtattgtccaacaccttttataagttgcgtcttataattagtatgacattctctaacagttacttttttaaattatatggaagctgatagttaagtacactaatagcaatgtaacatcgaggagagtgttagacaccaataatatcttttaatatttcttttccttcacgtcactatcacaaagattacccgaaaactacgagataaggtggtaaatgaagttagtactaaatgagcaaacctagcaactgatgatgaataggatgacatgtacttacggacctcaaaaacaaaacttggtctaattaatatatcactttttattaaactgggttggtttgattaataagactaattagtaataactaagccgaaagacatgtaagcaatcaaagtatgacgacattgcacttaatggcagtcaaataatgtattttcctttttgatcgaacataataatttatgatgattattgcatcatgcatgcttgctttgcttacctttcaccgtttaattaattggaatgctaaaaagggttgcttaccttgcaccatcctactaatattatatgaaaaactactaactacttttaaagcattactttatgatagtgttgaatatttctaatatttaatatcaattactcactatttatttatatttaaaaatgggtaaatatcaaatatgaattaaggtcgccttttgttgagtacattttcaacatacaatcaaataataacatatggaaagataatggggatatgaatttgcatgcttagtcaaacattatcatatatataaaaatatactagtgtcatgtgccaccttaagattgtcttatatgtagaaataatataagatatacaagggaagggactatatacacaaagaagagaagaggaactctcaaggtttaaacaagattctaagacctttgtcataaaaaataaaaaaataaaaaaaaaaaaaaacatttcctccctcatcacatgaatactaggaaaattctataaatgttcacaaaaatttattaagcttcatatacttaatttagtgtctaaaaataaacataccctcacaaaattatttatatgtttttcaacattgtattaactgtaaaataatcgagcaatatggtcattatttatagagttttctctcactctttttaaactcaaatgagtgcaacaaaaagcctttagttgttatgttgtgtgaaacggaaacaataaatgatttacgatttaatatcgaactaacaaatacgcaacacaatcaagaaataataaatcaagagatctcagaattcaagtaatgaataaagaagtaaaatagaaaacaataacaccaagtttaatgagttcgagctttgtgcaatgctctatatctcggtcggaacaaccatagtcatatttttattgatattagtgtttacaaggttacaaaaatcttcacaaactctcagagcttacaagaaaatatttctctctgtttagacctctctctctctctctcaatcttacaccatcatgattttcactcaagcaatagtggtctgattcttcctatagattacaaagatttgatagctccttataaatttgcattgttgcctaatatagctccgaaactatcatggcacatttacactatattaaatgttttagctcatcaccagtaataataatctacatcagctttgataacacgctttcagtacagacaattcagaagctttaatacggacaagctattcgggtacgtacaagagctacttcccggatgaacaaccaagactgacagtaagttatccgaaactatatctctagactaatgacaagctatccagagaaacagttcataggaggtacaagcttatctagaaacactttctggattatacaaagtcttccgcacaagactttctagattcacgccaagcttcccatctctactcttcggtttcacggcttcccttctggatggcaaaaaacttataaccataaccataaccaacaatttgaagttgcttgacaaattgttattatagatattgttgttcccgttagccccctctgggctcagctgactccaataagcttcaagtagtgctcaaacttaccactttgcactaccttggttatcatatcagaagaaccaaaacccgccaacccgtgacccgccaacccgtgccctattcgagtccgggttcagtttcacttttttgaacccgtgaacccgaaacccgcgaacccgaaacccggtaaacccgtccgatgttcaaccctatatcaaactatgatttagatcttgatttcacttttaaacctttgtgactttctcttttcgtacttctgcctctcgtaaacaatccatcaccacttccagaattctttgattcactcctctgattcagctctttcgaattcaaggataattgcacatcatcgagtgtaatagactgtctttcatacatcattgtatctttaaactaagcaaaagactttggtaaagaactgagcaacaacaaggcttgatctttgtcttcaatggtg

SEQ ID NO: 49153 - DNA, 1455 bp, Cannabis sativa
  modified_base (30)..(38): a, c, t, g, unknown or other
aaatatcttttaaaaaatatacatattttnnnnnnnnnttttaaaaataccatttatttttatagtaatgaccaaaaaaaattttttttgcctatgacccattccaacttaagactggcctgggtattaatagttttactttttgattgataaatatttataactctctttttctctttttatctctctacctaaaacatcaacaactagggatatttatggattggttgatttagtttgaattttaaaatttttcaaactaaactagcattacattttttttttcaaatttaaaaccaaaccagactagttaaacaatcaaactaaactaaaccaatccactcaaaaatagaatagtttgtatttcgtagttattttaattttttttccataataattgttaattttttcgacaatttttttacttttaataaatttataatacataataacaataaattattattatcattattataacaatataaagtcaatatcaatattttacctaaagttgttcttaaatatcaacatttcgtctaaaaaatatacattaactaaatgtaaaatacttaaacggatttttttggtttgaaccgcaaccaatatttctaaaaccgtgactgaaccagaaaatttaaaacagtctgaattgactaaatcatttacaccggattcatttagtctggtttcaaatagtttggtttaaattagttggggtttggaactacagattaagaattatataaacacccctatcaaaaataatatcctcagattgatctttcttttttttttaccacccatctctctttctctttaatcaaatgaacagatctcaaatcgatctttccattcttcttctttttttgttctctatggttttttcgatatttaagagtacaatcttggttcttcctccatagctccaacgactgccggatcaatggactgctttgattccttcaatgcctatcaatggtaggtatgcctatatgaaatttttaataattgagctttagttttgaatcttttagatatttatcatgtgttttgattttgaggtattcattaatttttctcattttatcatgtatttgacttattagaatatttctatttaatattataatatttctaatgttaatacaaaatcattttaaattgattttgttttatctcactaattgttcattgattgtatactatcacaaatcaaaatgtgataagatataatgttctaaatatagttagattacccaatataaaagactacctccaaaaattcatgattgaggctactaaaattaagaatctaacgaaagaaggaaggtacacaaccatcatgagtgacatactgtctttgggtgagttatggaaagatatccgttgacactcaactcaaaacatagccgacttgcttgatcgggcagaaggctttattaagcttgaaga

SEQ ID NO: 49154 - DNA, 1453 bp, Cannabis sativa
taaattgatgttcaataattagtttgttgtgtatttaactttgtgttttgcactgttattgtatatagtcttttgtaaactttttataacatggatctctggaaacacatttttattgctgttaagatgtctatttttaatgttttattttagtcaaatttttagtattatcacgatttttaataattagctaatctattaatattaaactagttttataaattacacgtgtcgttcctatgaaataggacattacaattattgactattatttgttagttagtagttaacttcggttcttacttgtcttggttttggttagagttagttaattgttactttcaattaaaacttcatttttgtataaatataaattataacaaatacttaatcaataatagattatttctctcttttttctcttttcttctcttctttcttttttctcgttctttcttctttctcttacaatgtcaagaagatcaaaccaatccaacacaattagccaaaatcagatcccgacattcctcttcttctgtccaagcttcctcaaaatgaaacctctgcttaattaaccaataaacaatattttcgaaaggctacacatatttcaccaaaagaaaaatgagcaaaatcaacctaataaccaaagttatagccctagacagagtacataaacaaaaattaagtacccaaattaaaatatataacactattataaatttataatcttgatcaattaacaagttcaattaaatattgtccttttattcagttcccaacttaatagaaatggtataaattactactccatttaactataataataaccttaactaaattaaaattctgttccatacaaatattattaatttatattttcttttagtacttatatatatacatatattgcataaatataccctaataatttgtggccacatggtacgtatagctagctagctaggttgtccacactaatctatagaataaattttctaaaaagagacaaacagttaaattaaaacacataacatgatttgatattttttttttgctgttgttgatgatgatgatatctcaaaaaacagaatagtagtcattataatttaagttagtcaatgataatttgataattggcaaagtcaaaaattgatgaaacaacaagttgtaatacacttctagaatttatatatatatgtataagtttttccattaaaggtcaaaaaaaattattgaagcaacgcgcatgcactagtgagaaatagtgatcaataataataagtcttcatcatcatcaacttatacatgtttggctacgtaaattaatatgtcataatcaaaacataaatatatatgtcaaataatcaaattatattatatagttcccattgcaaagtcaaaaaattatataatatatatagggacatgattttgtcccgtgatgtacttt

SEQ ID NO: 49155 - DNA, 1548 bp, Cannabis sativa
tgtatactcattttattttatttgttttaatttttacctttatttctatattctttaagatgtaaattatgtgctaaacttaagtgaaaggtgagcgtatattgggcaaccactcataaaagtgggtagattttaatgaaatataatatgagggtatttttaattaatggatgcaaaaaaaaagtattcttcaatttatcccttaaaaaaaatatattttacaaatatacaaaaacaacaaaaataaaattataaaaatacagttatatagaaaattaactcaaaaaagtaacaccatcattttatcaaaaccctatttgagttgatatacttagtctatataccccaaataagaaaatatggcatcccatatagtgtcaaacttcttttaaaagaaaactaaaaaatgattcgaaaaagaaaacctgaaatgttactatttatttttttattggttttttttttcttcaaaaaataacattattttcatataataataacctaaaaataacattttaaaaatacctaacgaaaaacaacatccatatatttgtgatgaaaaagttaaaatcaataaaaatattaaaaaaaaaaactatatattcatatttttgtattatttaaattattttaagtatttatgaaaaaaagatatatatataaaaaagctaattattgatagcatatatccccataatatccttgtcatcgtaccctcacattctcccttagactcaatttctttatgtaatcaaaatgtgatatttttttaaggaaaaatatgtgatattttttaaaattaattttttttttgaactcggacctcggtgggtcctaaacacaaacttaagtagcctatacccaaagccgggctctctctctccatatattttgtataactttaaattatgggtcaaaattaacgtgtatatttagattttttcttgtgaacaattaagcaacacatatttagattgaaagcaagcatacatgccatgtgatgtgatgtactattattaattattgtatatatatgataaagactctattcgtatacatttatataaatatatatatatctataactataacttggaatattattgactggcatatgtcgtcgatcgaaattagaaccaaatgtttctgtattagcctgcgtattttgtcagtaactgcaagtagacatggatttgaattcaacaaggaaaatttgaaattgcatgcttaaactactttataatttttcccctaaatgtataatttttccactttaataattttcctaaactacccctcacatttcaaaccatccctctctctttctctctctcagccaaaccaagaaccccatcccaaccacactctcagccgacgccacccattctcaacccagctcaccgacggccgtccacggtgtacccagctccggcgtcgacgtcaatcccaaaccacccaaacactgcaccccatctcagcccccttctctcttcatctctttctaaccgaaagaaaaaaaaaccaccaggtccgatggttggaccattg

SEQ ID NO: 49156 - DNA, 3606 bp, Cannabis sativa
agaagattaattttgctcgagattttgatggtgccatgtatagctgctctagtttgttccacaatccttttgcagtcttttcttgggttagctttcttctagctccattgggcaggtacatgatgatggtgtagtatgccatctcctccaattctgcaatttcctctgccttcttctcagccaacaacttttcatctctgagtatctttgccaccttttggtgctcaagaatacccttaaaactctctcgccatagtgcaaaattagatcaaacttctctagttcaaaccttaccatcgacatcctccttcaatctttgttcttgtaaaattccttgatgagttcttggtacggaagtaagtgatctttgaatctcccttgatgattaaagaaccatgttctgatttgtaagaaatttagctctgatacatagaaaatgatctctgtaattccagcttcaagatcacacttaaataagcaaaagttaaatcaaaacaaacaaatcaagaacaaaaaaccagcaaacacattaaaccaaaaaatataacacagatgaatctagatagcttccagacacaacaacacacgatatttatactggttctaatcctaagttcattgtgaacttggtcatattttagtttggaagcattgccaccaatctttattgataataaaaattagagatatcaatcttaggagctacaaggaaataatcaccaataagtcatccatggtgtaatccctcaacactcattaactcactaacttgagccaacataatcgacaatgttgctcaatacaattatctaatcccaaccctctctctatcagatatctctctccatttctcactctaacttctctctctattttgttgtgtctctcttgttcttgcccttattcttatgttgtgaaatgagaggagtagttctctatatataggtcaaaagacccaataatacttactgtcctttttaacagttaagttagttaaagactaactaactaactgaatgtaagttgggggtttaaggaataataccacattttctcttctcaactcaatttgaaagattaatggaacttttatctaaccatttttttattttcattttttcaggtaagctaacatatctactatatcctcttaattatttttgatgattttcttgcaaaatttattggattatttttttaaaatacattttggaggagtgttttataattattctaaagtgagtaattttgtttatcttgaagttttgatttaaagcataactatggcaagtaaatgttgtgatatgccaaaagctgtattggaggaactattttcatggctacctcctaaggcattgatattttttaaatgcgtcagtaagtatggtcttatcaaattacttatgaaaaatccaatttttgtgaaaaagcaccttcacaatatcgacaagaagatgttgtcatctaatattggtttagttgtatcttgccctcaatctgggtacattatcatatggttatcggagacccttgctagcaccacaccccaatatctacgaaggcaatttttcaaccctttcaatcccttcctaaaaaactattcccataccccatgtagaaatgagactcaatatggcaatgtaaagtccaacttcccaggttattagccacaaatcttaaagtcatccacccatatggattaactggtaccatattcttctcaatggagtcaatcaaattttatttataaaaatgcggtctttttatgttgtacacttgttaatttgttgttgattttttattagcggtatgttattttttattgttgtttaaatgttattttaatgttattttcatattatttttgtgtagttttttttatttattttcgtattatttttatagaaaattataaaaatataaaaaaaaaaaaattaatgtaaaaatatatatattctttttttacaaaaaaaaataatcctttatgtaattatcccatatatatataattgtatcatgttttattattttcttttatttttagcattaagtagaattagatatgtatctattttatatgatacatggcatcaatgtattggacaagccacgaatactaactctcatcgtaataaaagacgacgaatttccagagaaaggtgaccaatatatagacaatagacttcgcaaagagcattgaagatacaaaacttgatcacctacacctcaaaccagagtctctaatgggggaaaacccagaaacactgacctccagctctcacccttcttcttcgtcccagaaatctccacaagtatctcccaagcaaccgcaggtttttgtctttctctcattttctactaatttcacaaatgtcgttctcaattcttacgactaccgcattttatatttcattggacgatttatgttcttccactgctataatttctattttttttcttcaagatttggattttagggtttccttttcctttttaggtgaattgttattttacttttgttttgtatatgcgtctatttgcaaattctttgtttagagcgataaatattttattgtctgatgatctatcagtatattggagatcaaaccatttgggaagcttgagaattaacattttttttttcttttgggggaggagtcagctcaattttgaattctgtctattattgctgttgcttatcttttaggtatcttcagattaattttattggttgctatactgtgtacaagtatttggtccaaagcttttcttgaagtaatcgataactctgatttctcaggttccagcattcactggatttcctcctttcccaaatggagattttcagatgtttccagtgatgtaccctgcacttgttaatccatctcaaaaccaggaaaatataaatcgaggagcaggcatctatgctgttcctgtttacccatatactggtcctgttgttggaattccatctaatactctaattcctctcacttacaatatacctacgtaagttttattacctattttagtttgtgattacagagtgatagaactgttttgtgattctgttaacggttttccattgatctgtaacactataacagtatctccatttatagctggatattcttactctccataacttagattatgtcagttatttaattgatgaaaagagcatttgaatggcttctacttagatgggtttagacaagagtaaggacagagttgaaagctgttcatgattgttttgtttatggtctgagactctaagttaagtctgttgtcttatgaaaatatatttaggtttatggaatttgagttaggtttataaatttcgtacaagttttttggtttacgactgtatgaaagttagagcagacatgaaaggattgaatgcacaaacaagaaagaagagaaagaaaatctaagtaaaagcataggcaaatgtgctttggaaatagttatagttaattcatttttccttgagtgtaatggatcgtaattattggtatatttatctttataacattaaggattacagtgtcaaagcttagcaataacaaactcaaaagccaaactatatttgccaaggattgaata

SEQ ID NO: 49157 - DNA, 876 bp, Cannabis sativa
gtcgggacacgtttacccacacgcgtttggtgtgtcactatagattaatattttttttaaaaaaaaataaaaataagaattacgggtattgctttttagtgacgcctcatacatttagtgacacacattataagagactaatactgaaagtttagagtctaattatgtgtgtcactaaaaatcaatcctaattatttagtgacatgcacaaaagtgcgtgtcactaaataatgtcactaaaagtccaaattgtagtagtgtgtggagggacagtggtgcttcgatagtggatgttctcaacacatgactaggaacaaaagttgttggttaactagaaaaaggaaaaagagggttctgtaactttggtgataaaaacaagggaaagattgttggagaaggagatgtagacctaaatggtttggctcctctaactgatgttatgtacgtaaaatggcttaaggaaaatctcataagcattggacaatcatgtgacaaaaatttctctgtaagtttttctaaaactcagtgtctagttcaactagttgatgtgtagtcttaatagggaacatgactggagatcaatgctatgctttatgcaatacagttgtgtgcaatcggactttcctagataaacctaacttgtggcactataggtcggggcacttgaattataaagacctacaaagactaatgaaacttcaagcagtaaaagcaattctagagatgaaagtatccagggataggatttgtggaccatgtcagctaggtaaattgaccaaggcacctcatccttaaatcaatagacttttaacttctcgagtgttcgaactaatgcatgtggacttgattggtctcatgcaaaatgaaaatttgagt

SEQ ID NO: 49158 - DNA, 1296 bp, Cannabis sativa
ttttatatttattttggttttggatttctattcaaatatattaggcattaatttagtgattaggctttcaaatattatttctttgattggtttaatggcgcttgtccaattttttgttctcttactcttagcctggtgtggaaagtaatcttttcgaatgagtctattaatttgggactttattgtaattttttagttgaattttgtttggacctctttgtaaattttaaggtactattgtttgctctaattttgtagctttaggcaataaaaaatttcgtatatttgatgcatttataagcttgagtaggattagtgtatttcttaatttatgagatatgttttattgtgaaagtctttgagtgaaagagtaaataggttggtgagtggatgattggatcagaaaatagatttctatatggtgattgttgctgaattttgatctttaaatagatcaaaaatatatatttttccaacattgatggtggagattggttcatttcagtttttcattcgtcaattgcgattggtcaagggcttgtctacgacggggatttgtcaagggtagcatgtttctattatggtatcttcttctacatttccatttttactttcgtgtataattttgatgacttttgtgctaataaactcaaccatctatattagttcatctttagtttgagtatcattaagcattcttagtggtactttgtgatgctgtgtatgtaaaattgaattagactctctattaatatcattatataaaataaatatgtacgatagtgataatataaaggagtattgcttgttcattatggattttattgacaagtgagcatgattttagagtatgaaataatttgaaataaagtatggttcttaaattcattagaagtagtaatttaatttattttcttgggtttagttcacatttataatgttaatcaacattgttgttttttgtgttaaaaaaaagaggagtttaaagaaccatcaaggttgttgatttatgattgcgcttcagtgttcattcatacatatgactctcagtttttgaattttgaagcctaatatagttactaatttgagattatatcattttttttaagattttttgctgaaagttagggattatatcttggttccaagttttttctatgtcgattccgatgtttaatataatttttatttgatttctacatttttttttgtgatgttgcttgtgcaagtacaacgactgttttttcgttgttcgttttgtgtgtgaaaatagtgtgtggtggtgcttaataaggt

SEQ ID NO: 49159 - DNA, 997 bp, Cannabis sativa
tatgttgttatggctaatgataatgttagtgtgtgggagtgagagaggtttgtgtataagaaacccagatcggatctctcaaatcaaaatctcccaacaatacccatctcccaattcccatttcaaaaccgctgtttttgctcttggtagtttttggagatcggaagccatttttggctgcctgaatggggtcacacgcaccaccgcaggttactccggtggatcaaagatcaaccctgagtatcgaagcttggccgaccatgccgaatctgttcaggttcttatctatctatttatcgatcacatctctttttttggttatgaatttaagggttttttattagagattgtttcttgattttcgtgattttgatttattgggggaaaaaagattcgattttgaaaggaagagttgccaaattaacaacatgaaaatgttaaattagcaaaataatcagaatttcaatttcagttatattcatgctatattttcatctgggtatcactataattttgatttttgttattacaaagattgaatttttagtgggagttcatgctgctattttgttcatatatattgtttctgataatttagtaatctatcttacatggttgagttgtgtctctaatgactgcaataccattccattacttccttatgactattattaggaatgtaattagtttagtattaggattagcactctagaaagctatataaattttagggtaaatataataccattttgaactctgtctttgcaaaattgattctgttttgttaaatgacttattggactctctattttttaaaatattactaatagtaccttgaactgattttttttattaaaataaaacttaataataactcgatgtaaatgtgttatgacaaaactggttatattttttgcatttgttcgtgctagaaattattttcaagttggttatataaaaaaaattattgagttcagagtttttttttttcaagcaa

SEQ ID NO: 49160 - DNA, 1312 bp, Cannabis sativa
  modified_base (1260)..(1270): a, c, t, g, unknown or other
aaagtaattgtgattatatacttcaaaagataatgtctcatgattcacaatatagtaagtctataactaatgttgatagagaattgttaaaaatatactattagtgtctagtactcttcggtatcactattattgtaattaagtattgagtctctcatatatcttaaaataaataatttttaaaaaatatcagtaacaaattatggagtgccatttataaaaggtattgaccaccactagctagtaccctaatatattactacaaatttccatataaggcacgtttgaatttacaaacttgtgtagatttttactcagtttggctttatatataattatatatgtagtgtagttgttaatgaattataattgatatttaactaattaatggcgcttgtgatcatgatcatgatgtgtgacaagtagatgataatgatgcatatcagaatcctcttaccatttctaaacgcttactcattcgcatgtgatagtgtgttgatggatccacatatatatatcttgttacaatatcgttgttaacatattttatatctatgtatattttacatcaagccctttgaccttttaatgtgtatcaataataatcataaaaactacatgtgtgtatgtatacgttaaaaaaaaacgaactatatatataatttttttagaaagaagttatcattccttcaaaaaaaaaaaatgatgtatatatctatatacttttttctttttggtaaaacatatactttaataaatatatttatttgtacgcgttcataagttgtagatattaatcattttacaataatatgcgcatgtttgtcaaggaaattttatcatatataccctagcagccactggtagatcgaggattgaattttaaggtaaatttagttatatatttaatataatcaaaatcgacaaataattaattaaatttgagtagaatgatagtttagcagcatctctctattctagtagtcataagtttgatcctaatttgaaccatatacttcatttatttttttaataactaaaatgtagatacacctagaaaaaaaaaagtaagaaaattcaaaacatggtctcccatataaatttaaagtatcttaaccaattattctatttaattactatgtatataaaaataataattgtatattaatatatttttaaatctccggtccgcctatgctagcagctataaatatatatatatatatactagtaaaaactacgtgcgaggcacgtatactnnnnnnnnnnntagtttttttctatgttatttgaaagtgatacaataaaaaat

SEQ ID NO: 49161 - DNA, 1967 bp, Cannabis sativa
acaggtaaaacgattagactgagagtatcaaatgttgggctacaaaactcgcttaatttccgaattcaagggcatactatgaagttgatagaagttgaaggaatccacaccatccaaacaacttatgactcacttgacatacacgtgggacaatcctattcggtgctagtcacaggcaacaaggccccacaagactactacattgccgtctcaactcgcttctccgaaaaggccatgaccgccactgccatccttaaatacaaaaactcggcccgtaaagtgtctggcccaattcctgccgggcccaatccgggcatcgattggtctctcaatcaggcccgttctattaggtaaccacaaaaaaccatttgtagaaaatatcacttatcttacacatacagataaatacaactattgtttgtgttgttgaaacaaaatgtgaattggtaacaggaacaatggaacagctagtggacctaggcccaacccacaagggtcgtacccgtactggaatatacccatttcaaggaccataacgctagaaagctcagcggcgcaagtgggtggaaagcaaagatacgccattaacagtatctcgtacaagcctgctgacactcctcttaagcttgcagattactataagatcccaggtgtcttccgggtgggtagcatgcccgacaacccgacccgaaaacccatgacccttgacacggctgttctaggagctgactacagggcttttatcgagattattttccagaatcacgaagacattattcagagctatcacattaacggatattatttcaggatcgtcgggtaaatgcttaaacataattcgtaactcaacaataataatcatataatataatacaccttctcacttgtatagttattgaaatttcagaatggataaaggagtgtggagcaagaatagtagaaagcaatacaatatggtagacgcagtctcacgatacactacacaggtctgtttctagttaatctggaccaataaaaatgcatacaaattacatgaaactaataagttggtattatgtgtttacaggtatacccaaagtcttggacggctgctcttgtagcactggataatgtgggtatgtggaatgtgaggagcgagttttgggcaaggcaatatctaggacaacagttttacatgagagtgtttaccaattccaactcaactagggatgagtacctcattcctcctaatgctttgaagtgtggcagagtttttggccgcaagccttgatgacatttttatttgtatttacttttggttctggggtaaacttttgtgtgattttaagtaattaaacacgtctctacatctctcaaaattggatgactagattattattattattattcgtaactaacacaagagaagagagagaggaaaatggtgtatgagatgtagaggcgttacattctcaaataattcattgcttaattcttttttggggtgtgttgaggagggcacaaatgtgacaaaatttgtatgttgtcacatatagggtgtcattcattcgttctatgtttatttgttgaactcatgtttcatttgttaagatatatattggcatgaaaattacagtacttctctgttacttagttatctacgtgcttattattctttcaagttttctgcttttaattgtttttttattattattttattttacaaatacacaataacagaggatgtgactgaccaagtctaatatccgtcgttgagttcaaagatattttatgtactaagatgacaaactttagtcttattaagttattaccttgatgatacttctttgctttctacatcttcaattccatctagctgtactacaatcaagattcaagcaagcacgtccaattaattgatataatatataaatgggaaaaagtaaaaaagaaaaagacaggtgaaacaatataagagactatgaacc

SEQ ID NO: 49162 - DNA, 932 bp, Cannabis sativa
caggctgacctcaagaccttccgcttctcaaggtggctctccatctcttggtatttttctctccttcacttttactactatttaaagtcatggtatctcaaatcatccaccatacctacctagaccatcacctgtactgaatcgcactctactcctatagcttcttcttctcacaatccttctcacactctccagctcactggcgaagaaaacctaattcactattttgaccatgtctctttgcattcgggtgactccaacccctccttttgtcttgttttcaagattctcacaaccaaaacccctaaacccatctggattaagaaggctgtgaaggatgcctggacacttcgtttccctgtggaaatctctgattaccattcaaggctcttccttgccacattccaatgtgaaggagacagatgacgtgttttggaagatcaaccttggcattttgacaaatgccttatggttttcacgaaacctgagggtcttgacactctatctcctaatcggttccgctttgtcccattctaggtccaagctcattatatctcttttggacagaagtcccttcagcttgctcagttcattgctgatgaacttggcgatcttttggaaagtcacccattatctctcctggaaagtttcggcccttacctttgtctccgtgtccttcttgatgtcaccaaacctctccgtagaggtatgaatatttgttttagaagaattaccaagactaaatggattgcgttcaaatatgaggggctccaaacttttgctatttctgtggcactatggaccatacatataacaaatgtggtcgatatcttatgagatgtgataattttgctatccccccggttcttggttgcaaggaagagcttcgtgcttcttccaaaactctgttaaaaaaacccctttgatatgtc

SEQ ID NO: 49163 - DNA, 1804 bp, Cannabis sativa
agagagagagagagagagaccttaagaatgttttccgtaaactgtccaggacctctcgatgaaaaattagccaccactggtgcaggtttatacaattttggaacttcaactgttggataaattgttgctgttggattcctgtagtgttacaaacaatatatatatatatatatatatatatgttaacaaatatgttattattatggtaaagttgaattatatatcttacgacatattattgttagagctttactaccttaaagatatccaacaccatgtagtagtttcctatattatatataaaattaaaatgtgtgaatcgatattaaattgtaccaatgttagagaaactaattttgttacttaatatcttgagctagttttgttagtttaacagaattattggttgcaagttgtaaattttattacagtgatattttgtatatcttcatctcttgtaaatcctctttatatataaaactcctcacaaatactcaatatcttttacaagtctacgatgaattgcattctcatagattgaattctgatgagactctgtattgataagctccttcacggtatcagatttcctttgtacaatgtctgctatgaatccttctcgcccagaaaacccacctcgctccacagttcaacaaccccccactgcaacttcgactcctattttggccaatcaaccatgtaattattttttagaattccatcaactcctccctcactatcaaattggatggctccaactttcttggttggaaatctcaggtcatcccaattgttattaggcatggacttgatgatattctcctcacttgcgtatctacacctgaacgattactcaatggccagataaaccccaagttcaccacttagagaaggaaagatcttctcctcagctggctctaatcatcaatgtccgagatagttcttggccttttagcttagtacaatacctccttcattgcttggagagcccttgatacaagattttccagtcaatcgaaagctaggtgtttaccgggaaattgaccctggtgatgtggacatcaatgtttaacacatggcaagaaaaaaacatctcagagtagttaagtagtcccgaatcgtagtagtcaacctagtaggggtccctagccccgcgtcaaggttgactcagagaactccagtatgggtgtttggatcccgccaaatttttccaactcactatctttaagtattttgaaccaagaagacaaaaagaatccaagtccgagacctggaaattgaaaagaaatgaaacatcacatcagaagtcaacccagacgcctaggcttttcacctagtgcccaggctcacattcctaagtaggatttcagttttcgggtccgtcttagtaaacatggctcaaaatttgtacttagacatgcataagacctgtcgcaaccatgttataggcatcagaatctaaattggaacactttccgtttagagcacctggtgctcgggccacctggtgttgcacccagcgcccaggttgacatattgtcaacctggagcatttccaaccacaataagaagtatgctaatcattttatttgtctccatccaaaatgaggaatcaagtgttttcgggaaagaaatggatcaacttggaggtcaaaattgggacccaacgcccaagttgacctagtgctaggtcttagtgcccaggttgacatattatcaacctaagccatttccaacagtagttcaaataacgtcttccaagaatattctttgttttcatcaacaattaagatttgggtgcttt

SEQ ID NO: 49164 - DNA, 840 bp, Cannabis sativa
ctcaaagcaaggtacaacacttgttggagtcatcatggtacgtacaattgcaattcaaagagaatcataaaacttgttcacttaagtagtgattcaatttatatattgcattatttattataagtagtagattttattttagaagggcttctctgggacaagcttgagaggagttctcttggagatggtaagagaaaaaccagcaaactcatccatgttgatatcttgctctttcattccatcaggcaatttccagtcaaagctgtataagagatttgcaaggcctaattgaactattgttgttcccatgtacatggcaggacatgtccttctcccagatccaaatggcaacagctcaaaatgttgacctttgaaatcaataggactatcctcaaatctctctgggatgaactcttcagggtccttccagctgttggggtctcttccaatcgcccaagcattcacttgaatcattgtttttgggttaatatcataaccattgacagtgaagtgtgacatggtctctcttggaacaattatagcagctggagggtgcaatctaagagtttctttcattatcattttgaggtattgaagctgctcaatgtcacattctgagacttttcctttgtttccaatgaaagttctaacttcatcttgtgcctttttcattaatttaggtctcctcactagctctgccattgcccacaccatagtaattgcagcagtatctatcccacctacaaacatatcctgcaataacagacattagtagtcaagccatgattggtgaaactgagctgagctcattgcaaaaaggctggtagttatgaagcctat

SEQ ID NO: 49165 - DNA, 995 bp, Cannabis sativa
agcatgataaacagggtttgatgctaatgggctagctcccatgttgtcacaccaagtgatgggagtgttgggtagaggaaattttagttcttgaaggagagattggatccaagctatctcagctgaaacttgagccaaagctctgtattcagactctgtactggatcgagatatcactgcttgtttctttgaggaccatgacacaagagtgtctccaagataaacacaatatctggctgtagaccttcgatcatcggggaagcttgcccagtctgcatccgaaaaccccatcaaattcaatctgtcacagaccttaatgtgtaaacatgaaaaattgttccctttaggtacctaagtatcctttttgcagcacaccaatgtacagttgtaagtgcctcgagaaattgactgagtttattaacagcaaaactcagatcaggtctagtgtttgttagatattgtaaggcttcaataaggcttctatactcggttggattatcaagaaattcaccatcagaaatagacaaggtttttcccacagtcatgggagttgaacaaggttttagatgcagcatattagttttctccagtagctcacgaatatactttgactggctgagataaatacctgtgtcgtctcgatatacttcaattccaaggaaatagttcaactctccaagatctttcagggcaaatctttgattaagtttggtagcaaactgctcgagtttggcagagttgttccctgtgatgataatatcattgacatagattaggacgaggatgatatcaacaacatttgaataccaaaatagggaagaatctgctcgagaattcatgaatttccagctgacaagtgttgttttcaacttctcaaaccatgcacgaggcgcttgcctcagcccatagagagatttagtgagtaaacagacatgatttggcttggatggatcgacaaaactctctggttgtttcataaaaacttgctcttctaa

SEQ ID NO: 49166 - DNA, 1830 bp, Cannabis sativa
gctcaaaatgactctctatagctttctatgtttgtttggtagcgatagtctttgtattaagtgtgcagatcctattttatgtaacacaacatgctatatggagatcttatttaatgattattataggataagaagaaccaagaggagcaagtcaaaaaaactaggtctatgatttgctccattaagtcctaggcatgagtccctcttgaggtcctgcatagcattgggtatatagttttcttgctacccaaatattgtgggttaggtgggaagcggcactttcaaacttaggaatgctaaacgagtttgggggattttagggtgtatgaaaaagaaaaagaaaacagtaagttgaatttggaagaataatattcaccagtcctaacctgaaggggtggtcttgtggtaatccaaggattgaatccccacacactcaaaaaaactttggggccatttggaggtctcctggccgaactggcaggtcaaaaaaagaaggaaaaaaacttgccagtcatatatttgagtcctgtaggttgtagtttctgtgatctctcttttatatgtatgtttttttatcttatctttgctgtcagtatatacattccagtatccatgctaagatgtccatgtgagtgctaatttgaattactttaatagtccatgcttaatcactatgaaaatagttgaagtctatttctattcagaatgttttgtatgtaccatgcctgctgatttattaatatgtgctataaatgttgaactattttagactttaattctgactcgaagctgctttctctggttttcctattatagcacaaattcattgaaaaaggcaaatatgactcgtatgcaatgctaccaaagattgacaaggccaggaaaataagggcaatgatggctttagaagcacaagatgttcctccagctgtaccagaagagaatgtacggaattacttgttcgctctttcctctctctctctctctctctctctcaatatacgtgtgtgtgtatctaactgttgtaacttgaaacagacaatagaagttcctccagtgaatgatgattatggagatactgtaccggcaaaacctctaaatgttgggcctcaggcaggagatgaagtagcctcgtctagtaccctaagtagacagcatgctctagagggtgtagaacggactggggaaggtatgcatatcttgattacatacatttgactgaagcataagtcagttagtcttattactggtaacacctggcatttacatatccatcttggttgatggaatgtgcatattatttgcacttaatgtttaaaggaaaatttgaacactcgattgagggacttgggagggtttgatgaaaataagctgatacttggtctgattcattgaaatagtgttggttggactgagaataaaataaagctttacttactttttcttctttctttccatttgattgattttttttagctttagtgtaagtagacctgtattttcatttactatcttctgacctgggtgacactgcagttcattttggcactgtgataattcatggtggtgatgagattgatgaggccaattctttttcacaagtctccgatgctagaggatcttcaactgctccggcacttctggaaagcccttatgtcaatgccttgggagttgaatcagataaacacaggtgttgactttaatattgacctacctaccctttctgtttcaaaaaatccctacgtgataaaaatgtattctatatgtactcaattaaattgatattctgtcagggcgcaaactacaggagttgctgcctcaaataacaat

SEQ ID NO: 49167 - DNA, 2335 bp, Cannabis sativa
aatcctcgctgtatttctccccaattgtggagctcagggatcaaactttgatttccgacttcatgcgaatcccggtccgctcctcttttgaaaaatatttgggcctcccccaggatatcgttcgatcaaaaaagcaactattccattaccttcacgacaaggtctggggtcatctccacaattggaagaacaaagtcttttcaaaagggggcaaagagactcttctaaaatccgtcattcaggccatccctacgtactctatggcctgttttcgtctcccggtggccacctgtcattccctagagtccataatggccaacttttggtggggtgttagtgacaacaaccgccccaaaactcactggcaaagttggactaagttgtgtaggtccaagagggacggagggttaggcttccgctccctggtccattttaaccaagctttacttgccaagcaagcctggcatatcttgaaacaaccaaactcaacggtgtccaaagttttatccgctaggtatttccctcactcttccttcctcaaaagttctctaggtcactctccctcctttgtttggcgtagcatttgctggggaaaagagttgctgcagaaaggaattatttctaatataggaaacgagcagaacacatccgcgatttgcgatcattggatcccgggtatccgtcagttttgcctctcctcccagtcccctacaaagttgcttctttcatcacaccttctatgacctgggacttaacccgtttacaaagctgctttccgcctcatgttgttgagcaaattctctccatcccccttcccctcaccccttgtcccgacgactatatctgggaatccacaaattctggtatctatactgtcagatcgggttaccatcttagcctctcttccacttcccctcctgatatcccctcctcctcctctccttcaccttggtggaaacacctctggcatcttaacatccctgccaaggtgaaacattttgcttttagagccacaaactcaaccctccccacagccaagaacctatcccataggaaaatcattcaatctccagactgtgaacgttgtgcaaaaatcagaagagtttgtgtcacatgcattgttctactgttagagtattagaagagtctagaaaggtacgcaattttatccctatattttttcttgctcttctgagattatgtttcatgatttagcatatatgatatatacatccctcaccaaaaaagatgtagagttctttctttgcactgcttggtttatttagttcaacaggaataaagcactgaaatgtcaacccagcgatcaagctcatgcaattctcaatttggctcaaagctttttgacagactaccattcctccatgacgacctcaacacctaccgaccggcccagtcattctatggccccctcattttggtctcctccactgctgggtcttctcaagctcaatgtggatgcttcagtttccaaggtcaatggaaaagcaggttttggtggaataatcagaaacagtgaaggccttgtagtagctgccttggcacatccttacaatggaggaggagctgtcgccacccttgaagcgaaagcttttctcacccttcttcgatggtgcattgacgagcattttctgatcaacgaagtagagacggactgcaaagctattactgatgcattgtattatcaaaaagaagacatttcagttttcggagacattattcgtcaaatcaaggatactttgtctcatttccccgctaggctctctcatgtcaaccgtgaagccaactctcttgctgacaaattggcacaccgagcctcggggttagacgaagttacaatctggattggagatgacccctgcgatctcattgagttcctttcttcctagtgggcaccctttctttcaaaaaaaaaaataagtaaataatatatcattaatgtgtgagtctaagttcttatatttaatatagatattagtttatcattgttctttcaaattacattttttttttcattatattgtatggtaattgagttttattttttgttattttgtagagagtttacaattatagagaatttacccttaattttaaatataatttatttgatattgattttcagccgttttaattagggtgttaggatgttgttaccagccaaagggtaatacatttaactagctatacttagaaattttgttagttttatagatttttactaatgttgagctagtgatatgggttgtgtgttaaattctaagtttgtttattaatttttaggctaattagcaatttttcccccaaaactttgaca

SEQ ID NO: 49168 - DNA, 1301 bp, Cannabis sativa
  modified_base (1145)..(1147): a, c, t, g, unknown or other
tccaaaagagaattgcttctctttttaagaagttttcagcaaaggaaagttcagctgaaagtgcaactttcctaactaggaaaagagcaactataacgaatatacaaggtacgaaatcgggtatgatgcacaacaatcttaccataaaagaaaaaattattttgtcaactagccaaaaaaggactttacaatttatatgaatttggttataatttttgaatagagctatgtatattttttttctctgtaagttgacaaaggcattgggatgatttaggggtttcatcgagcccatgacttgggttgtggttcccaacccctgatttggtggcactgatttcgtccgtttgctcaaaatgcaagtgttagaatattgtcataatatctgtgtaaaaaaaatgctagtcattattataacaaaaagattaattcattataaaattcacttattatccaaataaattaatatatgtagtaacattttttattattatgacaattaataaaaattaattgtttgattaataaatctatgtactaattgctacaatagtaaatatgtgatataacattaaaacaaaaaaattcaaatgagagtgtacataatatataaaataattattaaaataaataaatgaataagtatagtggctctttttgtgtgtcactatatctccaaaaatattaataataataaaaaaagatatagtgacacttcatgtaaccgactctatatgcatatagtgacgcgcaaaaagtgaatgtaaaaagggttcagtgacacgtgtgaagtgtcactaaaagttgtttttccattcaccctcattagtgacgcgcgttgaagtgtcactaaacagttttagagttactcaatgtgtgtcactaaaacccgtttttctagtagtgtgtcaacctcttgttacaacctcttaatcaatctccacgcctgaaaacacatattggaatattttttttcaaaacttttttcacagcagtattcgtcatgcttacaacatcatccctgtaaatttttgaaaatttttgaatagtttatagtgccgaaaatacatttgaagttttttgaacaatcgtagtaaattggaatattaggaactctgttttcggtacggtaaactattcagaannnttcaaaaatttacagagataatatgtaactataatataacgactaccactatgaaaagaaaatgaaaaaaagatatttcggcatgtgattttaaacgtagaaattaactaagagattataattagcactcctctccgttgttagcaaattacac

SEQ ID NO: 49169 - DNA, 1129 bp, Cannabis sativa
atatatattttaaacaataaattttatcaatttctctcaaaaaattataaactaaaaaattagggggccatgcaaagatggtaccgcccctgtcccttgccccaaccattgacatatgtatatatactacaatacaagagaagaaaaacaagagcacaaaattaattactgtttaacaataattttcggaataacatacgcgaaaatgacatatttgtaatcataaattatattataatttcaagtagtattttttgtagcagtaagctaattatcagagattcgtataaagttaatatacatacatacataatacatatgtatctatattatagtttcttttgtactaaaaaattttagtgaaaggaattaatgaatattttcatcatttgatctagctttagaattgggcgcatggcatagtactacggtattcttattttgagaaaaagttaaaaaagtaaatttgtatttcaaatttcaaaaggcagatatagcttcttataacgatcaaagtacatagaataaaaatatagaaaagccaccacaataaagcaaaagaaaataactggaatctgaaattttgatatatatataaatatatatatatgccgctaataagccctttgtcaatcacatggcaatattgcagcttagcatgactgtctattgattatccaagcaactttttttttatctttcaataaacgaacaaaacttttcaaatattcttaatggaaaaggacctttctagcctttgaatttcaacttgtactaacacttagatatagatcgaatgaaaaaaaaaatggaatggaaaaaaagagaaaaaaagtctgacataataaaattatatacattcatatgtaattacaattatcaatataaaaaatatattttgtttgatagaaaaatagttgcaatatattagaatttatggactattataataataagaattttcataatctatgaaagaaaataattagtgacagatatatggattatgaaaccaataaatttatattgatcaatacaatttttacaggtacaacttagcagcttgaatcatgaaatctaaaaacaatggatagaaaaatcaattattactacttgtattttacacaca

SEQ ID NO: 49170 - DNA, 2552 bp, Cannabis sativa
atagtggttcagtcagagtttagtttgttatgaatctatttgatctggatcacacctaaatatagaaagcaagtgtctttttaaattacataaccggtcaaacatgaccgttagtgcattagttatacaaattaataagaaaaatgtttaaagaataaattagagaataatttcgaccgttcttgattaattacatgaatgcatgtgacttactaagtcacttattggctatccatattccaaacatgtgagctcgcatgttctttggtgtttcattcgcatattgggactatgggcttataatctcgattagataattgaatgcatgtgattaccattgatcgtatatccgagcactcatgcattgacaacataaaacttgcgagttcctaacaattcatcaaacacattagtttttcagaataaacgtatgtaaagatgtggtctttacgtatcgcaggagagatatacttgctcatcgcatataaatcgatatacgcgcgactggtataaacttctctcgattttgtttatttttcatctatgctgggcatagtgtgggattagacattgtctcggtcgcacattctcgcaagtttatgtcatgcgaggttagcttaactagagctatatgttgacatgtcatcatttttcatcgggaaccgagtccatgtgtcaactattgacgagattgtatttgcatttttaagcaaaaaattcgcactataataggtacaaaatagtaccatgaactcaatttttataaaaaaaatatataaaacttaaaaatagcttcatctcgaggtgttaagaccagactgattgtattttacatctgttcttactaaaaaataattttaggttggttatattaagaaaataattgacaaaaactgagtttagggtattattttgtaccatattagaaaatatatacatagtccaatttattatttaaaataaaaaagagagtcgatctgattagtaacttttgcgaaacacaagattgaaaatggtatttatctttttcttttatgtggttgcttaagtaatttatgattgaatttccttgttataattctatgagcattgctattagacaccttaaggtgcctaacaccataccgatatgtagcgcattgtgaataattatcatatcgtgttcgtgttgacacgtttaattagtaggccacacaacacgaacatgatataacacgattatgacacaaatatcattataaatacaaaaattttgagctttatttataaaatatatgaaaattaatttgtgttatagtgtcaacacgattatgacacgacgcgattactaaatgtgtcaacacgactatgacacgacacgattaacacaagtatgacacgattattaaacgtgtagaaaacttaaacataaacactacacgattattaaacgtattagaaaatcaaacacgaacacgacacaattattaaacgtgtcactcaaacccatttatttcatgtcattttttagcggtgtcatcgtatattgccaaccctacagtcagtgtctttcccgttaaatcacgtgactgtaaaatcttgtgtacacctacaaattttcaagagcacggtgtaatttgttgcgatgccaaactccaacgagaaccggtgtacaaagaaccttttaaaaagcaaaaggagaagatcaagaaacgccttgcaaggcaaaaaaaaaaaatcaacaaattacaagtagtgatgcgcctagcatccttagttgttgatttttgatatgtgattactcacacttggttaattttgcagaaatgactttcttaaagagtgtcccctcgtccacaaaccaaagtccaccaaagacggtgcgactccttccattgcgagtcctagagtgaaaaggaagagtgatgtccttgattcgtaggtaatcaacttgtcaaaaaagcagccaggagccacacagaacaaaggaaagaaactcgtggtggatccagccactaaaactcgtgacttggtagccctacaagagctttacttgaatggtgacttcttctttgatcttgagagtgctttagtcacgtatatttggagtcattggtccgagcatataatcaaagggatgatggagtatgctcactctttcatggtgacgtagcaaatgctgaaggattacgagctccttaaaaatcaaaatgtcgctcttcaagagaaaatgaagcatgctaagctctcactgattaacaaggaaaaagccatctcataagtggggatagagatggtaaaaacaaataaggagatcaaagagctaaaggacaaagttactgctctccaactcgaggtagtagaggagaagaagaaatcatatgaccaggggctcaaggattatatctacaccaccttaaccagcgtcccttcatttgacttcgtggtattcattcaagaggttgttgacatggccaatactttttgcactatgtctccaactaaaacccaaggggttgtggggactccttttcttgagaacacgaatccaactgtgaaggcgtcgagggaga

SEQ ID NO: 49171 - DNA, 1452 bp, Cannabis sativa
  modified_base (1128)..(1138): a, c, t, g, unknown or other
  modified_base (1418)..(1427): a, c, t, g, unknown or other
tcttttcaggtgtgttttgataggttcgcgcggtatagtcacaactgtgtatttcgggtcgaaccgggttcgggcccgaaatgcaaattggattcaattatttggcattttatctgatattggataatctgaattttgtttggaatttaatgagtatgaaaagactaaattacccttgtatgtgtgaatatgtgtgcattggccctaggtgcattttggtcttttgacctttatttcctatatttggtaaaagatgggtttttggaaaaagaagaggaattttttggttatttgaccccttacccaatccccactctctctctctctcaaaccttttccttttcgatcatgattttgggaagaacttgcttgaatttggcttggatttgaagctttgtgtttgtggaatcttgagcttgcttttggattaaagttgaggtctactgaatttagttaaattcttgctgattttggttgtggaaaaaggcatgaaattattgagatgttcttgtttatggatgaaaggaaaagatgtgttgtttttgatagatttaagtgtaaattccatgatcttgttgtgttttatgttgtgaagctttggatggatttttctagggtattctctaggttgaaatccatgttatttttggtatatggctgctggaaaatattggaaataaattggtttgaagctcaagctttgagcttgatgagtgatgagtttaaaggatgatttagtgatttatgcgcaagctgtttttttgggttattgttaagaattgatgcatgaaatatgtttatttgagcatctattaattgttagcaaccctacttgttgatttggaagtttaatcaacttttgggttgagttggtgttgatttggagctgataatttgtgtttgcttttggtttttctaggtttgaaaccaaggtgccgcggcatggtctgagcatgttgcgacctgcccctgttggtggaacctgggattttgtcccaggtgtcgaagcatggcttgggcatgccgcgacccaccctcgagtttttggccagttttgagttcgaactttgaaaatgcatctcttttgattttgaactctgatttgggagttctttatatcgttggaannnnnnnnnnnagctctatgtgattatctgaattttaaatgccatgaatattttttatgagattgaaatcagaggttaaccctagttgtgaaaatcccaaattgtgattaccgacacctggtcaggagcacccagggatttggaatatcttctattgcgggacaacagataagacaatgattaccacgtagagtatgcacagaggcgcttatattgaatatgatatgtgtgactgtaaagtaaccgggattagggttattaccctgacatgagcggtttaatagcctaggnnnnnnnnnntagtgatatatgtgtataaatgcca

SEQ ID NO: 49172 - DNA, 756 bp, Cannabis sativa
aaattaaaaaatataaagcccaaatatttttatttactcacaatctctaaatagcttaaaaccgatcctattttaagtaaagtgatcgactcacttagacttaaatagcttccttcataattaatattaaatttaaataataaaaaaaattcagatattgatgctaaatagaaagtcttaattagtatattctgattttattataggtaaataaataaataataataataatgaaaattgagtaataatgtgtagaaagggcaagcatttataagccatggagaccttatcctgtgatgcggcggcaaatgacatgtgtcggctgagggaagtgggtatatgacgtggcacccaaacaaaattctggtcagaacgcaaatacactatatataataataccaattaacgccattcttttaacgccgttactgtgtttcaattctctttcttaccattttccttatcattcgttacgccgttacgtggattccatccattggcacacgctgacttttttttttttttgctctctctcgccactgtcttatcttatctcgcataaagtttcaccattcatatttcatattctttttcttttttaattaattaataataaaaacattattttttaactgtcactatagatcagaattaatttagttaaagacaatgagatgagatgaggtaaattgaagaattactatataataaaatatgttaaaaagaaattcattgaatgggattgaaaaatatata

SEQ ID NO: 49173 - DNA, 1427 bp, Cannabis sativa
taaaataaaatagaaattattgtttaagttgtttaagtatcatacaataataataaaactgattttatacaaactaaaaaatatacaataatatcataaaatttgagcaatcctattacagaacagttaaaacctatgaaatctgtttcgatcctgtgaaaccagttttgacgctatgaaaaattataacaaaatataaatgttaaataataaagttaactgaaaccaatttcaggcaaccaaatttttttttaaaaaaaaaaagaaaaagaaaaacacacacaaaaatacagaaaaaatactaattacaaatataatcaaaacaacacacaatgcataccaattatctaataataaaatatatgtgtaagtttcgagcctataaacagaataataaaaaagcaacttaaaataaaaaatatatgcaataacatcataaatggagtaaccccattatagaactctcaaaacatgtaaaaccagtttcgaacccttaaactcaatgaaactagttttgaccctatgaaaaattataaaaaaacataaatgataaacaataaagtcaacttaaactaatttcaccagtcaactaattaaagaaaaacacacacacacacgcacacacaaaaataaaaataaaaatattgatcacaaatatagttaaaattcaaaaacaacacataatgcaatatagcaaaaaaaaaagaaaaacatcacacgatgggctaatcaatttttatggagtctatccatagtcgacacattttagaacggaaggtggggctcgaatgcaatattcaatgagcaagagctcagatgttctccctgtaacagtctcttgaaatttgaattagttcccacatagcacctccactaatcatgtcttgcatttacttagaaagctaatatttaagaaactaagctataagaaaataaaaataacttagtgttaacgcctagcaacatttattttataatttttaccagtaacctatatatttccaaaattaaaaatgagctatgttattaaatttttaagagtaatctaaatattgttaaagaaaaaagtgaactacattttatatttatatatatataactatataaaaagtgtttaaaattttaaattatgtaacatagcttattgtttaatttaatcaatatttatatatttattattgatacacacaaaagagtatccaaaaaatcgatatacaataattattgacatcgtaaaattttaaaagtaaccgaagtgttgctaaaaaaataatttaaaatatcttcaacacacaaaaaaatccaaaaataaagttttataatgtatatatatttaacttctttgtatatatatatatttatatataaactagtatattgttacgtgccatgcacgtatgctatgttttatattaagtattatatta

SEQ ID NO: 49174 - DNA, 2027 bp, Cannabis sativa
aatcaacattaatttgacagctacgtgccaacatatatgtgtttttctttattaaaaaaatgcaaaatatacttaattcattcatgtatagttcaaattcgatcatagtgttttaatttttaatgatcataaatacttagtcaaagctaaatttattatatgttaattaaggcacatataatattttatactatacataagaatctatgcaaaataattctatccaaggaaaattttaaaatgtatcataatcttttatttataatacaatcatgagtagctatagtatttatggtgtaagttaaattaaatatttaactatgatagttaatttttttcattaaatcagaactaatggttataattaatttaaaaattaactaaaaataattaataaattacttataacatgacaaaaatatatatatacattaattaaaaaattaatttattttaagtatataattaattataagtaattcaagtctaaaaatagaaatatcaaaatttaagggtcataatttagtacatgtacaattatcgcattagtaaaattgaacaaaattagacagaagtctttaaatttaataaatctcaatagctcttaagaatttttaactaactaaaaaattcgaaagacataatttagtacatgttaaaatttaaggacaaaaattctaattaattatttaataacaataagtacaataatagaatactttaaccataatattattgaaacataatttaaatatatatatatacattaatattttagtaatgaaaaatgatagtacttacacatatatattgttaatgaaatgaagcttaaagacaactaagttctctattgattgtttgaataagatttaaattcaaattaatagactttatagagcccttggtaaaggactattaaattatcaataatttagtcaaattcattcaatttgatgaaaaaaaaaagagctattaatatatgttgacataaaaatttgatgaaaaaaaggattaaatgatttttttatcataaaaagctattaatattgaaaaaaaaaccaaataagagaagtaaaatccaccacacttgttcttccaataaaaaatatgagtaataatataaataattgtaaattcatgtttgtcgtgttggtttattcatatttttccgtactttttaaattataagtcatattgtatcgtgccaccaattttaaaagataggtccagtattttcatgcagtccttttctcgtgccaacttattttctttaaaaagatcagctcattttcacatctaaactcaaattcttgctttacttttttatattttattattaattagttaattactactttatattatatattttataatttcaattatatttatttaatttttcaataatattttacagacaatcatataaattaaaattatattagaatttgaatatttatttataaaatctcaaattttatcacactctataaataaattaatatatagttttaattttaaattttttaataatttaattataaaattataatattcagtgttatttattagtataattattaaattatagggttttaaatgtttttttaaactaagagctatatataaatagaaaataaagggtttttaatgttttgtgttgtgttttttcgacttgtcgcgtgtcatatctttcatgttagattttttacttatgtgtcgcgttttttgtgcttctcgtgccgtatcgtgtttaatcacgtatttttcgtgtcatattgtactaatttatagcatcgtaccatgtcgcactcaaatttatattttttcttatctagtcgtgcttgtactttccagaattgtatcaattcctaaagtattaaaaaatctaactcatatttacatcattactctcaagtcaatcactaatatctttagttagtgattataatatatttaaattacaattaccccaaaatataaatacttgtcattatttttgttaagaaaagagcagcagcttttat

SEQ ID NO: 49175 - DNA, 1200 bp, Cannabis sativa
ttcattaatttgtttgatgagaaaaagctggttttttgcttctgtctggtctcaatccattgattatatccaactattatgtctcaatcctaggtaacttttttgcttcttggacatttttgttgcactattatttgtataaaattaactttagaattttgtgttttgtttggttttgttttttttaaggtaaatgaaatttttattaataggtaaattggacatagtttgcaaatattgtttatgagcaaaagtaataaaaataagctaactaagtcatttacattaaataggataaaaaccctaacaacaccttcaactaaatgactcataagtcgtcagttcgtggaggtaatcctagccaccaaacttgggaatctctaaagataaagcaacacgaggaatagaatgagccatgacattgtttgcccagttacaatgaaaaaaaaaatacttaaaaaagaaggccaaacatgtttgatatcattaacaatagtagcaatgactgtttctcattactagagatagctttcaccaaacagagacaattagaaaaaatcgatagtcttgtgtaacccagtcagagacataagaacaacccctcgagtaaagtcgccgcctctgccacatgaggatcgaagacaatagttattggcgtagccgccgagcaaagtaatgaactcgactagttagaaacctacctcgaggccatttttgcaatcatctgcatgaatactagcaccaacaaataaattgacatctcccaacactatctcatctgcatgatcacctctagaaggaccaaccacgtctcttccactcgccaactcaaatagagaagatgacatttgtgcatcttgataacgctaaagaaacttcattggcacaccatatcatttgaaagcaatttatgatcatgaacaaaggtattctgcctatccaaaattctccaacaaagtacatcaaattcttccatttcttgattagagaggatattaattaaaagctttttaagatttatatattcatttaaataattttttattctaaagaggatttttgcctcttgaatttttacatgtatcaaatcatgccttctaaatttttgtggtcgttaaaaattcttcctgaactattgatattatttgatttaaggacttttgtccaatttcattaaatttaattaatttggtgattgtt

SEQ ID NO: 49176 - DNA, 1247 bp, Cannabis sativa
  modified_base (1192)..(1222): a, c, t, g, unknown or other
tcgcatgcgagccccccactcgcatatagccctcacacacacacacgcacacccgactcgcatgcgagccccgtacccgcacacgacacttgcgttcccacacttctatgctatcttcgtgggattcccagggcgattcttgtgacggtgcggacgcgccttgacatgcgggtactatttttaagaagtaggactcaggcaagtatgctaacttggcgcacttttgcgggtcttttttcctttaggccaataatcccaaaaattaaatgtgccgatttttggggttaacacttgcccccagtccactagaattcttttaagtgttctggtagactgttggaatgagagaacttgtgctgctgcaaagcaattactgcccgtcacgcttatcaaggttgtgtctactatatatagagggcttcccttgctttagttatcacttcacaccatccctttggcgtagtggcaatccttcttccctttgtccaagagctcttgagttcgattcttctccaagtcgcttctcatactctttatttctattattttggcatgggtacttttctttgcttttgctattagggcgaggctccatcatccttgctttgtctttggtggcaaacgtgtttcctatcttgaggcgacccatctatcctcgtggctcttcttgcacccagaggtacgtcatctccccttgttttttttacttttgttacttttattccacgggccttggattctagtagtcgtaacccgagtgctaatcttgtggcactgattgcattgtttgcatcactttcgggacgcgcgtcctagtgaactcaacaccttggttttacctcttaggtggagctgtcaaggcaacgcgccttctttgattcattttgtcttgggtctcgcctagtgtcagctacttagagcaatgttccccactgccgaaatcattaatatctcgtcctctgattcagaagacgcttcacatagcccgttcactagatatgctagattaatgtttgagagggctaaccatcttgaacacatcatcgcctgtcaagagcgcgccgagaagattcaggtagaaattctttaagttttgaacggagagagacatgacctggttgccgaccctagtgagtacctttccagacttaaagcttctcttgtggaatcccaactgttgggttttgtgccnnnnnnnnnnnnnnnnnnnnnnnnnnnnnnnttactaataaagatcagaaataaca

SEQ ID NO: 49177 - DNA, 784 bp, Cannabis sativa
aaattatattacctaattttatattattaattattattgtagccaagtgatttcacttgttgtggcagggagaggacggtattcaacttctgctgaacttcgagatatggtaggttgtttcttcgttttctaggagatgatacaatcacctaagaagatgcaaaaacaagtggttgatcttcttgtgattgggcaagatgcccaatccgaatccaagaagcctcttagatgtaaagaagagtgggaagagtgcaatattccttgtcctaggcttccttttttatatcatattaggtgatgttaggcctgtaagtggggagtgcgaggagacgccatgaattggctcaagacattgactgcgtaggtgatatctggcctagataatgtcagatataggagtttgccgatgagctgcctatagctggaaggattggtgagtggctctccgtcttggtcgttaagtttgtggcgagggtccataggtgctttagctggtttactgccaatgtaaccagtttcttcaaaatgttgtatagtatacttcctttgggaaagaaataggttgtctttggttcgggcaatctcaaagccaagaaagtatttgagattgccaatggttttgagcttgaattggtgatgaaaagactcttgaagctgttgcaggatgttgaggtttggacccgtaattacgatatcatcgacatacacgagtaaggcaatgaaattgtcttcccgtcctttggtgaaaagggtttaatgagcttgagactgctgaaaaccttct

SEQ ID NO: 49178 - DNA, 1849 bp, Cannabis sativa
tgacgtaatgtactataactgcataagcagttgtgcacttaacaaacagtaatcaaatgagtaaaacggagtcacagtgctgaagcttacgaacaactgggataaacagaaaagcacgcaaacaaggtagaatcggtaacctcggggctgagatcaccaacaaaaatgttaaaatgacctgtgcattataacaaacattgtcataaagcagatacagagataaatgctacaccattcgaaaaccagttcgacaatcaagcatgatagttaaacacaagcataaacgaacctgatgtatcctccctctgaccactagcgtatgcccaatttactttgataggctgaccaaacctgaatcacataataagatgtaagagaaaatgatcaccaaattaacaaacatagattattaaaaattcacttacagatgccttccattgagagacaatatggcaagggcagctgatctacgatcgaaataatgaacaaatccataggatgactgcatgaaccaaacaagaaaaccaacaaagtgataaagcaaacaaaacagtaaaacaaaattaagaaactaattactagataatccaagttttaaaatatttaatcaacaaagaattaaaaacttctacacgagatagaatgaaaaaaataatgaaaatcaaataaaaatttaggagattaccttttcctttcttataagcttgcagccttccacagcaccagtacttgcaaaaacctcttgaagaagtggctccgttacctgtgtatgaatgttaccaacgtacctgcaatttctcaaaaataaaaaagctggaagttttaaagaaagaagagagaaaaaggggaaaaaaaatagattcagccataagtgattgccctcaattgtgaaaaaacaaaacgtaatgtaagaagaaacattacaagagatgggtgatttaataacaggtaaacataacaaagaaagcgtgtaactatggagaatatggttataataaacagatatgtgaaattaagaataatgattgtgatttgtgacacttaaattacacactttatacctacaataatgtgtaatgaatctcaactatacattaaaattgatatgatccccacttaaaattatatatggctaaaattgaatacacatcattgtgtgtaatttgattgtgcctatagcattactcgtaaaactaattacaatagcatgcgagaaaacccacaacatacaaggaaacgtcgaacaaataaaaaggaaaaccaaaaaaagattaaacagacactcacacactgcggcaactacttggatcaaaaccaggaggcaaatttccactaggaattggctcaatctgcaaaaataaattaataaataaataaacaaacaaacaaaaagaaagtatatatatattaatggttcctactttatctatcccaacagatgacatatttcactgaacttatcggcatgttatgcatttactatgtatgcaaacaatacataatatttccttcaacaaaatcaccctagtaaaaagagatcaatcaaaactcataatttagaaaggtgaactacaagtctacagcagacatgttacataaagtgatgaaataaatatgaattaaacaatacattctcaaattagaaagtttagctaagctaactatcatttagtagaagaatcattacccatgtagatatacaacgtttaagtcttgaaatccattaataataagacagttgtttgctcaacagtataagctaacccagcaagaaaacaataaaataaaatatttttaagatttaaacacggccccctcattagagaattataattaattcttgaaatcc

SEQ ID NO: 49179 - DNA, 2168 bp, Cannabis sativa
tggtcttcaatcgaaggctcatttcgatgtatacacaataacataggacacaacaatatcttaccatgtcaaaaaataagacttcatttacacaatttaattacaataagcatggttgccgggtcagtcactcagtctgtttttttttttttattctttttaattagttaatttggaaattattttttaattaattaaagtgggatgaagcaagatgcaaatattggactttgtcctcctagtcctgacaacatgtgtgtgtatgagaaagatcatcaaatgtgcaaaagggagagatagataattagatagagctgagttcacaaaaccacaaaataaaaaagtattgattttttacaaaattattacagattcaataaatccccaaaccctcaagctctacctctctccttctccgccatcgacgacccatctccgacgcccatttcttgccgtcgacggcgcaggcggaccacagatcaagtttagtactcttatggaattcaatatctacttattactctatttcttctccgctattttcaaatttcaatttgataaagtattcagaattttttttaaaagctttgctccctttttcttattgatattcatgttatttgttagatcattattagtgctggtcctccacaaaagatcattatttcattttttttttcttgtgattttgggggttgggctccctctgtgtcgcttttcaatttcttgtaaaagcaaagattttgatgttgaaaaattactcaatcagccagatatatcaattataaattctgatttggttattatattgtgatatgctacctctgattttgtataagccatgcatgcatttctcttgatatatgcttgatttttaatctgggcatttgttttagtgcgcattcgatgcttgaagtaagctgcttttgcataagatttatttatcattgccagtattgttctcatacaatttccttgaaaatctcctgttctgtttccactagtataagtttataactgatattgttatatacttatactgaaacaggttgatggcaagaagaacaaagtttatgagctgaacctttgttatttagcaaaactgattcttgatcacaagatcattgttggatacttttccaaggtaagtcaactctacttagttgttgtccagaagcttagagcaataatctgtgcaacctattttgtatatgttatacttgtatgaatcttgccacttgaggctagcttaaattgttgtgtgactaaatgtgtcagagtagtctgggttaagttttcgacagaatagtctggtcttgctgctctcttttgtttagatgttagtagcaatgagatggtgatttttcttacaccatctattgtactttttaaaatcacttgagattaattattaaagttaatattttttatgcaaatctgactaaacacttccataaaatttgaaaaacatgatatgagatgtaggagttttttttactggtttctgccataaaatttaatagttttaagcacacaagatactggtattggctcaagcttgtacgactataattttagcatgttgttcctgaaaaaacttggtatctgtgtgttcttcatatttcttgctagatccatccagcttgttagagttttatcaaggttgaatttgaacaggtgtcaaattaatatttctttggagatatcttttcatttatgataaatgctcagatattactaattgtgtagatctttgtttagcctaggacatgtctatttttttcttaaagctggggggatgatattaggagaataagtacgcaagaatcttcagttttccaaggccaccaatttatgagaataagtaatttcacaaggccgtcaatttcagttttccaaagtggtttatgatattgcttcttgaatcttccagaatgcaagaactttataattatataaggttttttggatgtctagaaagaagtgtgagaattgtgtttgtgtctcatgtccatcagagtgatagataccactcgttttgtggtttgttgtagtgcattgatttttttttttttcacattcatgttaagtcaaatttatgtgttgtacgttaaatatattaccttaattttctatccaaataactctggattattgtgacatcatgt

SEQ ID NO: 49180 - DNA, 758 bp, Cannabis sativa
aaaaggatttttcatgtaaaaatttctaaaatatatattagaaaattaaaaaaatttgcggttaaaattcttaaggtgatattttttgtaggtctattaattctaaatttgacagatttattatgttatttataactgtcatatgttgaactattattggactaaataataattttaataaaaaataattaaaaattaaaaatatattttaaaatataattttttttttctttttctttttctttttttccttcttcatcttctacctgcagcagtccatccacactacccccacatcattttcttcctccgaccacaccaccccaacttcgttttcttcctctagccacaccccgacccccacccaaccccatctccagccacactcttgtccttgagttcactggagttccaccgcgcacgacgaccatctatcgtcgatggcgaagcttgcaaaaaccatcgacgagatctaagatatctttacaagtattacgtttcttaaagtcattctactcaatgaatctcggatgcgactagatcgaacccaaaaatttctactttggagaactcttaacggtgactgaatggcaaagggagctacaagaacctcagagctcgtagtttgaaactcgacaaaggccatgggggccttgactttagagaacgacgttgaggcctgtggtggcctttattttcaacggcgagacttcgttgacagtgaaaaaacatccagccccgagagagagagagagaga

SEQ ID NO: 49181 - DNA, 1027 bp, Cannabis sativa
  modified_base (62)..(74): a, c, t, g, unknown or other
ttttaaaaacttcagaaactattttttgttttcatttctaaaaataattttttgaaaacaannnnnnnnnnnnnataccaaacatgctctaagtttttcaaaatttaagactgactcgagcctcagagtgtctaatcgtaagaaatcacatgagtctttaaacaaatcctaacgaagaagagacacaagaattgggaaaagttaggatattgaagtaagctcataagttaggatattgaagtaagctgattgagtacagtttctatttttagggacttcacattgaccaatttttcaatattaaaacaaaaataatgaaattgaaatgttcacttaaaacttaaattatgcacaaaaatattatacatttaatgtaacattatgtttaaaaattatgaattttcaataaatattagaaaaaaaaaaccactgtcgcatatcattactcataagatcatatttatcatatatggttcccataataaatgagcaatatatataaataccttgacaataaatatattacaggttgaaagttcttctacatatttcttatgaatcgaatccagaaacaacacatcagaaaatcctcttttctttgctctggttagtgctttcaaacactgtctcatgtgaaaacacaacaatatataaccaaccaaaccaaattattttgtagtgatcataattagttataattttattattattgttttattaattccaacttactggggaatagtttgatatggctttcacatgtccagttccaccaggagatgctctatgaaactcatcctcaacatatatgtttaatggagccaaaccttcctgttaattaattttctcattacaaacaatatatatgtaaaaattaataaagaacaattctctagcttgtggtctccaggaaaaaaggagattcattataaaaaaaaattaattagtaattttttccccctgaactttgacatgtactaaatcgtgtctctgaacttttttggttgttaaaaatttctcctgaact

SEQ ID NO: 49182 - DNA, 1442 bp, Cannabis sativa
atccacataattattaatatttataacaatggggacttatttagtacctcacttgcatttgaggtgttacatacttcaaataagacaaaaaataatttattattgcaacaagtaatttttgttacttttacttagaaaaatctgttttgtgaccgaatacgaaagaaattgatactttttaattgttataatgtttatatttaatatttttttatttgatttgtttgtctagtggaaaaaattgtcaaaacacatatttgttgaatgtatctatgagtaataaaaatgtattttctttgaagcttgttgtactgagttggtaatcttttttttattttattttattttttacttaaggaaatctttatgagttaggcatttttagtttcaatagtaaagtatattattataccatcattttaaatatttagtgaaactatttgagactcattatgtctatataaatatacatgtaaatgtaatatatttatattgccacatagaaatttttataaaaatattgtcattactttaatttttttttaatattgtagacatttcaaaacatatacgaagcctctatttttaatacttatgatccgaaccaccagagcatcaccaaaacagctaaaaataatcattattccagtcaaaacgtaagtatttaagattctaatcctagaataataacataaaaaataaactaaaacaatagtaaaataataataaaactacaaaataaaataactaaataaaatcacaaaaaaaaaatattacacctcaatatttcttttaccagtgagaacttctataacatcacaagagaaccttcaccttgcaaaatttccccttaccctaaataaattaaaaaataattcagaacaaaaaaaaataatcgttaaaaaatataaaaatgaagtatataatacttaacaccgaatagcacatactgaacaacaaaacttataaaatttaacaaaatcagagagtgatgaacaaaatcccaaaatgatatctgacactacacatgaaaaagaagcttaagaacctgaagaaaattttgaagatgatggagatgagaagagcaggaagtaatggtaaccacaattgaaaaaacgtggatcaagttttcaaacaaatgaagaaaaaaattgaaaaaaagaagcttaagaagaagaaaattttgaagatgatagagacgagaagagcaataagtaatgagtttggggaaacgtatactcaacttttttttttaaaaaaagtctcaaaagaacaagctagaacaataaaaaaaaataaccgttaaaaatataaataaacatgcacacaataagaaacaaaaaatatgaattacataacaataactaaaaaattaaaataagcaaaaaacatagattagagaaaaaaaatccaaaatatctacagcaaaaaagaaaaaataa

SEQ ID NO: 49183 - DNA, 2484 bp, Cannabis sativa
catcattaggatcttaggataggtaatcttattcattatgatcatagcatagcattgctattcttaaagctttagttttaattcgtgaattaaatagttcactatgtccaatactctattaataattgtatatttctttggtcctaattatagctttataagaggattactatgtccaaagatccacctacttcaatttgaagtcgtttttgacacttgggccaaaatggataacactaccacttcttagttaatgctttcaaaaacttttgaagttgaattcttgtacgaaaaatgttgatttatttgtcaaattagcatatacaagaaatggcaaggtagaggtgataccgttatagtataactttgaattaattactatagttctttctttgtgttaagtgaacaaaacttactcaagaacaactcaaacaaattgagcttttgaacatatccaataaaaatatttgaaattaagttacttttttagggtgggtacttaatattgttcaaatgtcaaaagatggagacaaatttgatagaaaataatgtttggggatcaatttactaaaatttatatatttagggactaatttgttagaagaaaaggtttggggactaacttacaaagcctgcaacacgaaagagctacaaaaaatctataaaacttattaaagcgttttttaatttttttttaaaaaaagattagtgaaaataaaatatatatttattatttattatttttttttgaaaaagtattttttttattttataaagatatgataaatatcttattcaaattaatacaatatttatataaaaataatattgatgaaaaatgtttagattaatgaaaaaaaatgttatatattaatgttaatggatgttcaaattactttttattttattgatttaatttctcattttttaatcatatttttgtgtaagtaggattcacctagtaaactagttgacaattctccttctcttcgtctatatgtttctacatctttttttttttcttctttattttatactattcaaaatagttttataacaaaaaaataattgctttattacttcaattttttttaactagtgaggtgctttttatgtatacaggatgcaaatataattacttagactatacgtaaataataattttttattacttaaaaatataaattataagtaacatgataattaagttgtttttttattgattttttaaaataatatttaaaattctagcattcattaagataaatatgattaaatattctcatacacaacaaaatacattttacaagtttttttacaatcatattcttcttaataatattcattttaataagattatttttaactctgggtaaacaaacttaaattacgcatactattttacaaataataatgtgtgtagaggctaaaattgggcttagcccaatatcacatgcgatgttttcaaacaatgttcaaataaaattggattgggctattaaactaattgtaatagtacaatcccggtactaggcctaacagacccaaaacaatatagtcatgttagatattaacgttgcctatgacctaacattgaggtcacaataatctgacccgtttataagattgagttgttactcacctaacaatttcagaagtggtcaatcaaattgagcacgtaactatcagttctctcataaaatgggagaagagaaattccaaaggagaacggtggttcgtgagtaaagtctttccatgaacgcttataagagctactctcagtcactgggagaggtagatcaatctcagtcatttcaacacttctcacttattgttcactctcttattttctctaaaactacgtacttatttccgcaatcaagataggtggtaacttagttcggtcatttttctcgtctttttactacattgttaacagctttgttgacttgaccatcagggtcccttcagtcgacaccatttcgatgtcctaaggttttccgattactctcttctttgttttacaagttgtcggtgtccacgtacgatcatcctcgattgattgtaaattttagcatctacgatgtgcattcaactttagctattgtagcggatggaatctacaattacgaaattcaggcaaaagtaaccaaaaagaataaaggagacaagagttctattaggaggaagtgtcaaagactctaatttgattgtaaaaagttaatagaaataatataagtaaatgatgatgggtgagtgattaactagctagtgaaagttggatgactggctatgacaagtggggggtacacatttacacccgaagtccaaaattcactcggcctgaaacctgaaaaacccaaaaaaactggattacaatttagtaaatcgggtctagtttacttttgttcatcactggttgaattcaggttttcttaatccaaaactcgaaaaaattgagttacacctgaactcacccgaaac

SEQ ID NO: 49184 - DNA, 778 bp, Cannabis sativa
tctgtttctttattgatgttgaataaattttatttagggcataaaactaacgggtacttcacgtgttttatatcttcctctgggaatacaataggaggttcttttattttagctttcttttgtggtttcggagcaaacatcgattgctcattcttaatttcattaatatatctcttctgggcgttactactttctccagcgagatgcggccctcccgagataaccaatatatcctcgccctcaatagggggaggttgtaatctttggttatttgggttgttgggctgaacaagtcagttttgttcgtttccttgacgcttcaaatattatccaaaatatccacgagaaatcaggctctgtatctcgtcctttagtttccaacactcttcagttgtatgcgttatgtctttatgaaattgatgggtcgcgtttgtgtctcgcgtgtctcattggctcaggtttgcagaatgcaaccctgtgctcatttgcgagaaagatgttttctcgagtttcattaaattcggtgtaaacggtgtaaattggcacatatttgtcgtgctttttctattttttcttatttttttcttatttcattgaataagcccaatgctaattgagactaaataaaactattaaaagtgacattttattctagcaacctagtccatttaaaaatctataaataaatgggtttcctatatgcatctaagcccaaaagcaaacatataggctcacacagaacaaattgatttggatggagcctatcatgttactaggt

SEQ ID NO: 49185 - DNA, 1086 bp, Cannabis sativa
caaatcgatttcccatattgcaaatgggtacggcgaggtcataattcttagttatgttggtggtacgcgaggtatatgtgaaaatctctaatatttatcgcactttttgaaaaattcatgtgtgtctttatttattgttggccaatagtatccttgttggattatcttctttgacaagctttgccaacttgcatggtctccacaaaagccttcgtgaatcttttttattatctcgcttgcttctgtggagagcacacactgtaggagaggcattgaataacctctcccatacaatttaccttctattattgtgtagcaaggtattgaatataacagttttcatgcctcgtttttgtttgatggaagttgtccattgagtagatagttaagtatgggcgtcatctatgtaagagaggcatcaatcatctcaacatcttcctttccacatatacttgattcgcttaacacttccagcagtaccaaatttaagttatcaagttcattttgcgaggccagtttcgccaaggcgtcggcatttgagttatgttctcttgggatttgctcaattttaaagtaatgaaactattccaagttcttccgaaccttctccaaatagtttgccatttttaaacccttcgcctggtattttcctagaacttgattcacaattaattgtgagtcactgtagtacataagattcttaacttttaaaactttagctattttcaaagcagctatcaaaggttcatactcgacctcgttgtttgaggtgtcaaattagaatcttagggtgtagtgaaacttaaagttatttggcgagatcagtatcacccctgcacccgagccattttcattagatgctccatccacgtataacttccaagtttctgcgtctcgttggaaaagtggattttcatcttgaactatcccttctattaggaaatctgccaaagccttgcccttgattgatgttcttaggtgataggttatgtcgaactgccctagctcaatagaccattttatcaaccttctagaagcgtctggttttgacaaaacttgtcgtagtggttgatcggttaacacctt

SEQ ID NO: 49186 - DNA, 1648 bp, Cannabis sativa
ttttctcgacatgtcgcgttgcgagcacctagtattttctcgacatgtcgcgttgcgattggctagcaatactccctaaaagttattatattaaattatatgggacttgatacttaattggaccaatagtgatattgacacataagaggatgcccatttcacctttgttaaacttgaaaaggtaggatagactatgccacgtcttaggacccaaaacttcaaccaaagaatgtaactagtggactgaaattgatataggtagatatgatagagaaaatgttaatcttgcaatatgattggtggttgctagaaaagttattttctctcatatttccttttttccttttcctacgaaattccaaggtccaacgatatccttaaggatatggtaagagaaacaaatctacttaaaaaagactaagcccagtccatagctaataaagcttgtgaagaaaataatagtaagattaggccttaagggtacaaaagtaacaaaaagacagacaagctctcacaagtcacgagtaactaaatggcactttttttttttttttgaacatgcactaaatggcactttactaagctttatagctatatatcttagaaaatgatgtatcgtcaggatataaatttgtatgtaatttaaagcacaatgatagttgataataattaggaaaaggtacctctatagtaatattagatttctaagattatttgataaatcaaaagtatataattttttatagagagagaagaaatttagttatacaatttttattgcaaaggtttctgtttaataccaaaaactcacaattctgttttatttaaatttcacataaatattaaattcattaactatatgtggtaagaacaaagaactatctaacaaattaaattttaataaaaataacaaaatgttaatgtaatctcaaataaaatttaatattctcccacttgcactacattaatttttaatacatatcaaaatagttttatttgaaaacgattcatggattaagtgtaagaggaaaatatttgtgaccacttttaaaatcaatagttctttgatagtatctcaaataaccgatccaatttaatcatagatattgcactatgacaatcaatttgtttcttaatgtaatgtcttactcagagaaacaacatgtatcatgattacaataaactaatctcattaatcggggttcataagccaagtgatttaagaccaatattaaacttaatttaaataaacatcttacagtattacaaactttatttcaaatcaaaatatttaaagttacatatccagaatcctataaaatttaattttaaaatattacaagtcatttctcacaggtcgacctaagcgaaaaaattagaatttctacacaattcttcgttggaccaaaacctcgtggtctaccttggctggaacatatataactcatcttcaaaactctcgaacttatggctgaaccgacaccgctttactattgcatggacattagagcactcgtgcgccaaggcccatcaagacaaaataataatactacatgaaaaattataataataataattacacttcatacagtacgctactgcatatatactgtgatactccactaaattacattattccatatgataa

SEQ ID NO: 49187 - DNA, 1812 bp, Cannabis sativa
aaggagaccaaatcagtttaattgtacaaagaaatcacacaataaataaaaaatattttgacacctaaattgccaaaaaaagactttacaatctcctcccccctttggcaatttagatagtcaaaatatttttaacagaaatgtacatgcaaaacaaagttagccacaccatacaattctccctctgagaaacactacaaatggtcctccaatacttccaggacaatataaattgaaatgtggatgttgccttagacaaccgaaggcagtgtacagggttaggagcgattgttttgttactgattaggaaggaaacatgatagcaggtttttcatctctcatggtgggttctacctcacctctttacgttgaagcacatgccttgttttacgctctcagatggtgctctttaatcaagatgacaatcatacacatagagacagattgcctctagctggcattgaagatcaagcacaaatggaaatatcgttcaacgaccttagggttcatctcaaagattatcgactctttatttacttttcttaatgtatctttgtaccatatttttaggaatctcaatgtttcagctcatgatattgctagagatatattatgacaagataagtagttagtttagagagcttagctcctttttctctgttgtaattgtaactttgtacccattttccctgttttgtgtagttacaattactactcagaaaaaatcttttatgtatacactcgtggcactgaagtcaataatatatcagttattttcatgaatttgggtccaattctaagttataaaattcatatttctttcaacaaaactgtaaagttgttctgaattttatttcacaatgctcatcaaaataaaattgcaactcaaatggtttttaaattcattcaagtgaaattaaatatgaatttcttttctaaacaaactcaatgtctctaaagaatacaagattcaaaatcttgaaagtacgttcgatttgatttattttaaaggatatgtaagtaacctaattgctaagattaggtacaatcatactccacaaaaaaaaaaaaaaatctaaataaggtcattcacctcgacaattcccgaatgaggtcattcacctcaacaaaaattcaaaatgaggtcattcacctcaaaattctcaaatgaggtcttttacctcaaaaatttcaagtgatgttttcttatcttaaaatgctaaatgaggtcattcacctcaaaatgtcaaagtgaattaactttttataaagataattggaattaagtttgacttgattcctacaaaaagatacgtagacaacttagttgttaagattaagtacagtccacaataccacaaaatggtataaaacacaaatttcaaaattccataaaaagttatccacctaggaatttttttcaactttttaaatgttaaagaattcctaaaaatggtcacgtaccggaattcttctatttaaattctaaaataccatactttgaactaaatgtggcttgatctttcacaaaaaatgtatgtaagtagcttaatcaactgcaattccaaattcactccaatttgctcgaaattatttcaaataattaaaatcatcataattgaaattaaaaggtgtttcatttaaataaaaggattgtaattaagaagttattcttataatcttagatgagtcgaacttaaattaattaaatcttatgctataatttagcataggtaaaattgtactttgtatttagggcattttacaattttgtatatattattttaattaattacaaaatatgtgcaaaaa

SEQ ID NO: 49188 - DNA, 895 bp, Cannabis sativa
cttttttgcattgtcattatacaactcagttcttttttcaacatatataaatatagaataattttatgataggtacccttattttattcttatagcataggaatattttcttaactattgatgtatatgacttttgagtgtacacaataattaatatacaccttcatgtacccaataaaaaaaattaaattattgaaataatgaaaaaaattctgacatgttatctattaatctttatttctaaagccttttattttttggaacaagttcattaaagactaaaaataaaaaaatagtaggatccacaagggaaaatccaaataacagtagtcaacccagcaacaccgattctagcttgggaatccaaaccatcatcaaaggagagtaaatctctcttaacaaagataaaattacatttcaaaaaatgacaaatagagttgataacataaagttttgtatatgtattctgcaaagctggcaactcaaaacgcttggttgttcaccaatcgggtgtaagagaattataccatacatatactaaattcagttatagaattagtgtccaaaaataaaaggttgtgaaatattaatgcaatagattttaagttgagattttgtgaaatgaaaatcaaacaaattcaagtcgagaaacagtcaaattcgtcctcaccagaagtgaactcttcaagcccacattctcagctagtaaggaaaaaatattggggaaacaagctatattctccaaccaatgtgattaccacaaaaaatcgacaaaggatgttttaagggctttcacactatacgccagtgaattcattgtctctgatattgagaccttagccaaagactcttttcagtcatgggaaggtcatttgatcaatacatatcaagaaat

SEQ ID NO: 49189 - DNA, 1604 bp, Cannabis sativa
  modified_base (1303)..(1308): a, c, t, g, unknown or other
ggggattactttgtaaatccttaaggacagtgtcttgtttgcacgcctcaggtgttatcgttttattattataattatttttctaacaccttgtgccgcaataacctcatcgacatgatttcgaaccaccatcagcctgatcacaatttgcaacatccacattaatcaacaattctccaatctcgggaggcttccatttgcattttggcttagcctaatacaaaaaaccaccaccatttttatcccaaaactcataaatattcagccacccaatctagcgttcgatccaccaacgatacaaaagaattacgtaacacacagtttgggatataccaagcctgccaagctaagacagcaaagaaatcaaacctatcttttggcaccaaaatgtcaatgtagcataaaaacgctataggatcctcaccatcacaccttttactggcctttccaaaaccagcagctttcaacaaacttttaatatgatcacaaccctaaatattagaagtgggaagccactcgtgataaagtcgccacataaaatgtttaatctttgttggagctttcaaaccccaaacccacctccaccatttctccacctcgccattttcgacccttcctctactttccttttttgattgccacatgatacccactttgcaaggaatactcaccatttttattatagtgccaaataattcgatattcaaattccaatgaatcaagcaccataccaaagatacacgagatatccccatgataaaaattaggtggtaatacatgcttataactagaaaaaagaacctcgagatcttccacaatacaaacttgttctcctgacccaatatgccatttatattcatctaaaataatctcctgcccccaatgtaaactcctccaaaccatcgacagacaagaacccaactttgcactcaacatatcaccattccaaaaataagaatgtttgataacttgtgctactaaagaattaccatttcgcaacaatcgtcataccaattttgccaatattgacttgttaataaacagttttagatttttaaacccaagaccctatctccttccttttacacaaccattcttacttacactaatgaatttttcattttttttttcagtaatatcccaccaaaatttaactattggactatatgaacactcgttataaaaaattgtgtgagcctaaagcagctcataacataagcattggcattctttgaatggcaaccttcaccactaccaactaaagagagatttttaaccaagtcattaataataataataatannnnnnataataataataataattgttattattattatttgtagtattattagtagtagatattgtatgattaatatagaaataaaataggaaatatgtaagtgtggtcccatttttcgaccttttagtcatcatttttagctttacttataaaacattaataaaggtaatacaaattaaggggtgtgtgggactgagttccttaaataatagatatattatacagtatgttagaatacaaagttagttagcagctgttagttaaattcttcttctggtttttctgttttcaaacagttgta

SEQ ID NO: 49190 - DNA, 1461 bp, Cannabis sativa
ggggcagagagccatgagttggctcgtaggtgcttagagagggcccttccttctatggataatgagctttagagctcggtgacagtgagccaaataggctctgctctgcttgcctttgagatttatttgtggtgagtgtcacacttagctttgctcatctttgtggcattttcggaggctggccagccaaaattatgttgcatggagttggccagccaatgatgtgtctttgaggggctggacagctagtgttgtgttttgacactaaatttgaccttgttttgctttcagaccttgatgaaactgagcattttgcatgacaactcccgggggttcttgagtgctcttcaagaggaggtgaagaccttggaggttgccctcacggtgaaggaccagactatatctgagatggaggctcttagtctacaaaattggagtatgatttcttgtttcgagaccatgaatggtactaggaagcaagagaacaccacgcaagcttctactatcttcaagttggaggctgacctcgcggggtatgaggagaagctgagagcagccattgatggctggcaggccataagggaagagtacgtctaattatctttagaactcatctatgagttcaagttgcgcaactccaatgctgacctttcatacatgggcgatgaagccttcctggagatcacattggctcaagggaaagtgttattcgagagtaggttggaagtgggttagagcaccatccaaccagaagggtcatccttgaggcactatgatgaggaggtggtcggctgacctatggaggctatggccgtcccacactccagagatgcagatcttgtagcttcataattagctccatgtacccctacacacatgtagattaagtttattagttttcaacattatggttttatagtatagacagtattttcatgttctgtatggcttgtggccttttagtttttgaacactacttatttttagcctcaaggccttcatgttcgtacttttggcctatatcccctctatttttgaaaattactattgcttggtcctcttgctttttatcatggattgtgtgaccaattaggtggtctgtaatcctggctatcttcttatggctttgacatgtaagtatcctgatttactcttctttatgtcaagccaaagtatgcacgcacctgacttagaagcaggtttagtaggttattctaagcgttaaaatttctctccataagttctctatgctagttcgatgcattgtacggtgtgggtgccccccaagtgcacacccagacttacggtctcttggtcacttacaattcaccaagtttcatagacctttaagaagttaatcttgttagtaagtggtttaaattcctctcctttggaccttgtgtgagagttaggtggccattagtagtgggtacgacatactgaactcaaccctccctcaca

SEQ ID NO: 49191 - DNA, 2545 bp, Cannabis sativa
cttgaatacctttttgaacataaaaggactttatattaagttactttgcattaacataccttacaactttaatatttttagagaattgagtgaaaacaaggttatagaattgtggaattaaatgttgcacatcagatttggattgtaacatgtaaaccaaagtatgtctgcagtggtcatccacaaaagttagaaaatatctataaccttcaatgctatgaacatgaaagggaccccacatgacaagatgaaaaaaatcaaaacaagatttagcaatatgattttgagaattaaaaggtaatcttctttgtttagctaaatgacatatagaacatggggaaataacatcattagtagaatgtaattgtttattgagtaatcttgttgtggacaaggaaggatgtccaagtctagaatgccacgaaaaggcactattacaagttttattaaaccgattacaaggaaatgaaaatgtgggagtattggcaaattgcagcagaaagtataaattgccaattcgtttagctgtctcgatcctcttgttctgagtaccctataatgtgcaagagttagtggtaaaatgaatattgttagatgtattagtgagaaaactggaaacactaaatagattgaattgaaagctagggacatagagtacactagagatgaaaagatcctgtgatatgttgaagtcacccgagttatgaactctaataatagaaccatttggaagagtaatagtatgagcaatagtattcttatgcacagtagaaaataaagaaatatcacaacatgtgtggtgtgaagcactattatcaacaatccataaataattatgagaagatttaccagaaacatgagatgcaaaaggtttagatgcatctatagtaggtgttggctggagcttctgtgtgagcagtgagattatggcctgaatatgttcttgctttgtaagattagcaggaacaccatattgatcgactcatgtggaggcattatggaaagagggttgattagatttcttttggtcaccataaccaggaggaaaaccgattaggaaaaaacatttttcttttaaatggcctggtttatgacaattagagcagtagggtctcatctttttattgggacgaggattagtagatgctgcagaagcagagggattttgagcaagagcagcagggggttgagtggattcttggacagaggccagtagtgggagttgaggatttttgagttttctttgtctttcttcatggacaaccatagagaaaactttcgacaaagattgaaacggatcaatgagaaggatttgtgcacaaacagggaagaaaatttcatttaactctgtgagaaatcagagaacatgttcttgattcaggaaagctaaattataaacagaggcagcacaagtacaaggaatctgaggtcccaattcctgaatttcatcccacatacacttaagttttgtagaatatgaactaacagaatcatcgccttgtcgaagagtgataagagtttctttaagttcaaagattctagggccattaccttgatcaaagtaggatttgagctcagtccacatctcagccgaagtatcaagaaacctgatactactcttgatttcaggggtgactgaatggagaatctaagacatcaccatttgattgcagcggagccagtgatgatgaagaggatcttcgattggaggttgaggtaatgtaccattgagaaacacagtcttgtttcttgctccaacagaaagtttgaaatcgcgtctccaagcctgaaaattgtgatcagacaatggaggagtaaccaagattaatctagggtgatctcctgaaatgaggtaataaggactcaaactatcttcatgagtagggcgatgaagaagattctgattgttgttgttttctctagtaatcgcataagctggaggaatgatcggatcatcgtttgttggagcatctgggattgtcgatgaagcatgaggcagaggattttggctagaacttcggaaccagtacgagttcaaaccatggtgaatatcaatggcagaacagagtttgaacgatgaagatgaagaagaagagagagaaaattttaagcatttgatgtcatattaatgaaagtaaaactgaattgtctttattaatgaacaaagggtatttatacagagtgagctgaggatatcagcaaccaactaacaaacaaagttagttatgaatatcacgaactgtaactaacatgatatcatgatgacaaacagtgtctaagagaaaagggtaatgaaaatgaaagggataagactcggtggtgatggtcattaagttgaccacatgagagagagagagagagagagaaagaggatgaggattgagttaaaaggagaaagggggatagatatagcattattaatatttcgaaataatatgaataattaggataaaattaatagggaaaaaaacagaaaagtactaaaaaggaaaaaaaattacaaaaatactatgggtcggcccattaaacatttatacagtccaca

SEQ ID NO: 49192 - DNA, 1812 bp, Cannabis sativa
  modified_base (510)..(520): a, c, t, g, unknown or other
tctatactattgtttgagataataatttttatatatactaagtgaggctagtatgtgcaatggacatgcctaagaagaagcctagatcttcttgttccattttatttatatttttttaggtcaagttttatttcataaaaaatttcttaattaaagtgtatattaaaaaatatatatattttttattatattggaaattcaagagtaaggatagatttcgaaagagggcattatagattatttgaatactattttttatacccactacaaaatatagctacttttagtgataactttttagttacaacacaaactttttgtgactaaatgtgacttttagtcacaataaaaaatttcttatgattaaatcatagtatttagatacaagttatcattaatttagttttagccacaataagtatagtgactgaaaatatatttagtcacaacaaattgtgatttttgtaactaatacctttagccacagactttttagtcacaacataggannnnnnnnnnntaattagtcacaacttttttacttataagttttggcctgactaaaagtaagattttttgtagtgactgtaaattatttaaaaattttaaaattttataaaatgtcttaaatgactacaacatacacgacatgaaaaaaaaataaataaaatattctcctgaatgctgaaatagtagaaggtgcaccatagatgcctctacaatataaaatattttaaattttcaaccaataatcatttaattttttttataaaaaaaaataacttagggaaaatcattagtacacctccctaaagagatgttcttgtccatgagacttttttagtctattttttcatgatcgtatatgttgcagttatttaggaccccacctgtaaatttttcaaaaaattcttaattatttgcataaggttcatacagttgcttaccacacgtgtaagaaaaaacagtcacgtgcgcaaaaaatatttaaaacttatttttgaaattgtaaactattcagaattttattaaatttacaattagtcctaattaagtacgacgtaaatgctcatgaaaaaaaattagagtaataaactcttcgttatgtcaaattttgaaacatatttattttttcttatacaatcacattctaaagcttaacattagcggatgaaatataaattaatcattcatgttataatattccctatggactttggtcattaaaaatttgaagcaaaatcgtaatcttaagcaaagttaaaaaatgacgtgtttctaaaataattttttttcaaagtaatttaaaattaaaattattattactttgcaaaaattatcaaaagagtgtcactttaaaataataatgaaaagagaaataaatttttcacttattactccttctttgatggatattgactttcatacaacactgagttttataagagttcttatgctctaaaatgtgttttttttttctaaaaaaaaaaaaagttggtttcatcttgaggaacaaaataaaagtgtaatgagtgcaactttgtataattgtaactttggttccagatctgatccaattataggtgtcaatacatatataattgatccaatacaacatccaatagatattgaatcgattggaaaactaaaattagttagatcagatcggatagtaaaatttatcattcaatatataattggataaaatctgaatatgtctaaaaatatttgatcatgtggtccaataaatacctctaattatactattaccacacttacatctacaagtaaatggtatattgtaaatatgat

SEQ ID NO: 49193 - DNA, 1650 bp, Cannabis sativa
aaagcttcaacaaaggttggttgaacattcccaaatctcagcggactaagtgcttctatcaactgaccatcagaatctcgagccaccactccaatgccatatgaaccatcgctttgaaaaattgcaccatccacattcaccttgattttatttatttttggtttagaccactgctcctccttgctatgttttgcatcgggttgcaagaagggctcaaattgatgagattgagcataactccactgatcaaggacagaacgcgcactagtaacaacttcagcagcagtacgcactttactttttcatggcagctcatttcgggcattccaaatgaaccatgcaatcattaaactttactcaacactacctgtctgtcctctatgcagcagactctcaaaccagagagaaaagtcactaccaacaacagcagcagagttcacaccagtttaaaccttaaaaactttgagcaaaccaacaatcaagaaagacatggttaattgattcctcgtgtgtttggcagaaaaaaacacgacacatggattggaacacgcttggactgaagctgcaatctcgtgggcaagcaatctgtaagggctttctacataaaatgcaaaactttggcagggactttgattttccacaattttttccacacttcatcttccatagcagcactccaacttcctttgagcaatcgcaaatatttatatgtactcttcactgtataaaatcctaaatgttcatgcttccaaaaataattgttagcaatgccagcatttattggtgtattcaaaataatgcaagcatctcgactgttgaacaaatcttttaccagctcttcatcttaggcttctccattcatctgccttaattgctttgctttacaatggtcaagagcaggatgggtagatgtgacaaatggattactatcatatgctagctttggagaattgagcacctctaattcaaccaaaccaactctgacttttgcaccaacaagaagaattgcttgattttcaaaaaggcttctccaaataaatctaggattggctccaagagaagcagttaacatagagccattagggaaatatctcgccttgtacacacgacccaccagagagtcttcaaattgcagcaaccgccatgcttgcttacctaaaagagacaaattataatctctaagatttcggaatccaagtcccccaatattcttgtgacgacttaaatgattccaattcatccaagtgattccacatgattgttttgaggatgacccccaccaatactttgacatcattctttcaagtaggctacatgtttcaataggaagaaaaaagatagacatagcataactcgaaatagtttgggcaaccgtcttgagtagaatttcacgaccggccttacaaagaaatccaccccccgaactttcaattcttttttgcatcttctcttgaagaaacccctgtatagcctttttgcttctacccagaatacatggcaaccccaagtataagctttgatcattagctggtaacattcccagcctcgcacagagtctatctctaaggtggtgtatggtttacatgaatgagcattggaatggacttgctattccttaagaaagctcaatcaagtgtttggtttctttat

SEQ ID NO: 49194 - DNA, 1496 bp, Cannabis sativa
agcatagaccccgtaatccttcacgctgtcaaatctccaagtaggaattatatcactagcctaatcaacctaaaatgtatagatacaatagtaacaatggaataccaaaaacaacacttatgtgcatgctttaaattacaaataataaaatgctttgtactgaaaattccttgacacaatttctgtattactagttttacgtaaagctttgtctatcggatccagtgcatcaaaaagtgttacattctaatttatgtattcgtcgtgcaaagcatcaaaaagttaatgattaaaacaaaaatttgttgcattagtttttcttttcttttttcttttgctggggcatttgttgcattaattgatgatagttaagagttgacaacatagtgaagtaataagggaagacttggagcagattatcaatttaatgaaagcacaagcctgcccaatcaacaatagattttactcacaagtagacgtcatttggatcaaattcgtagaagaggtttatataaaatcggaagccatcagggctcacatctctgcacaggatacctgaaaatgaatccaatattaactcattttcccatcacaactacgtagaatgacaaatcgaacagcacaaaagcatacctctactttcagcagtaagaagatgctccttagccatggctggtgcaatacctaaggtcattgcagcatcactggcacttatcccaattcgtagagcatcaggttttgtcacaagggtcttgattctagcaaaaacctacatgtgacaaacaagctagctataacgatgctactgtaaatgattatttcagacaagagaattatatagtttacattgcaaaagtacaaaatgaaaacatataagatgtcaaagatgtatgtcttgcgcagattatgtttgcttgaccacctcatatttctttcaatgatgaaaatatcaaaacaactgaattcataaaaagaatgaattcaatttaaggcccactgacttcaatttaaaacatagcaactagttgttaattataaagccaaaggagaagaaatacttaatgaaacccaaaaaaaaaaaaagagagagagaacacaggatagaactttcttgaaaataattggagtctttagaaattaaaaataagagcaatcacctcctcatcactatgggacttattctggatgaccctgactccactatcaaacttgcgaagcattactggtctacaataggaaacaagatgatatcaggattaaactatattgtcttgatacatatggccgtgattttacataaatacattcaatattccacttacacgtcaaacttctcccatagagagcatgcttgcagcaaatcctctggtgagatcagttctgttttaaatgggaaaaaaagaagagaaaaacagtttcacctttgaacatatgcttatgagccatcaatattcttaaagtaaatatcaagactcctaacttttacaaagaagtaa

SEQ ID NO: 49195 - DNA, 1269 bp, Cannabis sativa
caaccattaaaaccacttgttaggagtaaatcacaggatctgattgcaactaccgacgttttaatctcccatgtcacactgactttaaaaaaatcacatgattatggggcccaactttatcaaacccagccgctcataaataaaaaaataaaaacctctctctctctctctttctctctccactaataagtcaagaaaaatacagtagattagaccgaaccccgaaaagcaaaaaaggcaagaaagaaaagtgaaaacataattaaagcaaaatttaataatttcttcaaacaaaagaaagttttcatcattttctttgtgccaatcactttccctttttttttttttttctgaagcattagttacttccaaacatacccccaaatcttggcaaaaactgaagaaaaaaaacagaagacagagcacatgcaaccacaacatgtcatatataatagagccaagagagcttttttgcacaaagttttcacaattataattaaagcggtaaaagtaatcatgggaatgtaaaattggcaaatcaagaatggtaaaatttggcagaaagtgagaaaattttagtcttgttcattatgagaaacattatccagaactggaaaataagatgagaatgaagggtccaaaattataataataattataatccagatctaaggagcagaaaagagaaaacccatcagaaacagactcaaatacaaaagaaaacatcaaaagagccgagaaacagagtggaaaaagagatctacaaccataacatcgcagaaaaaaagaaaaagaaactttatagagaagcatacatcacaaactcaacatcataagaacacccaataaagaatgagacggcttgaacagaatttaaaaataggaaaggaaagtagatagaatagatggatagatagatagatatacctgtctattcgttagtttctccacaatctttactaggggaagaaaaaaatcacaaaagaagaaaatgggtcagcttaaaaaaaaaaagaaaaaaactctgtaagatctgatcaggatgaaaagaggaaaaaaaaaaaatagagagataatggaaaactacgagtgtggaaattctcgcagttccaaatatctcaaagcttcaaagaaatagggagctaaaacccaaatatataacataacgtactctctctctctttcacacacacactagctagtagctctctcactccttccttctccttagcggtccccaccccacctttttttttttcttttttctca

SEQ ID NO: 49196 - DNA, 1164 bp, Cannabis sativa
  modified_base (1092)..(1134): a, c, t, g, unknown or other
tgggtcgcagtttcggttctaaggcaactccagttatcataagaattgggtttcctcaattctgaaagagcatttcatcaagatagagagaaaggctagtagggagagtatccagatatctttaagtggtactttcaaaagagcaatgaaagaggcgtccagaagacaaggctgatataacactccattaatgttgaatccctttaaattaggaccttattccctgcaacaagtcctgaaattgcgtgtaccataaaaagaaacgtgccctttgtccaacaaccattactctggcaaaattatatgtaaaaacggcgcacacacgccacctgttaccgtcaggaggtctccacgtgtacagacgaccattgcctcatgagtagggcacaccaaatgggcccaatgttaatatattacttgtatttacctcattagtgagctagatttacatggaaactcttgcgggtctgggtatactattacccgaccctagcctataaatataatatgttacgttcatgcaaagggattgatttttcttctaacaactcaaggccaaaagctaggtttcataaacaagacaagagtacttatgtaatacttgaagtattttctagccaaatcatgttgactcgtggactagggtgtgttaatacacgagccatgtaaaaatccccatctcaatttttatatttcatctattttcttagctttaattttattttagttagtattatcctaatttttgtcctcctggcgtggcagtacttacgtggatagaatcagtgtcacgtggcaatacagctcaccggtaagaataccaagttaatacctgagaaatagagaccccgacaatcaactgcccatcaaacacaagaccaacttctactgggagcatactcccattgactgaattctggaaaggtatctgaaagatctctaccaataacatgaaggagttccttgatagatcagacgactttatcaaacttgatgaagccatatgataggcccaagcggggcatgtcaacaacaatcagtcacgaggcatccagtagtctcatgacccacctgttggaatttattttaccnnnnnnnnnnnnnnnnnnnnnnnnnnnnnnnnnnnnnnnnnnnatatgaactttctaaaacgaaaattaaaca

SEQ ID NO: 49197 - DNA, 1742 bp, Cannabis sativa
aagttaaatgttattgggctttcttccaagttgttgaatgaaaatgggctaaaaaaaccctaaaatcttgtttttttaggcgtgcgcctcactttttttttacgcctcaaaccattttccactgcctcacacgtctgaggcgtacgcctctctcccaaatactgaggcgcacgcaatagtgcgttttttttccgcttcaaaatgaggcgcgcaatagaaacgtaattttaaacattggtttaaactgatcttggcaaagaatttggacccttatacaaaatgtttcaaaatctaggggttgtcaaaagaaattcgtgccctcacacccatcaacaacaaggtcgagttgaaagaagacatagacaggtaattgatgttggtctcacccttcttgccaaagtttcccacattttggtggtaagccttcacctttgcagcttacttaattaacaggcttccctccactatttcaaactatgcttcaccttttgaaaagctatttcttcaaacacctgattataacttaaagttggatgttcttgtttttcactcttaaggccttatgaaaatcataaggtctccttcaggtcatccaaatcaatgtttaaaattgtgtttctactgcgcgcctcattttgaggcggaaaaaaatgcactattgtgtgcgcctcagtatttgggagagagtcgtacacctcagacgtgtgaggctatgaaaaatggtctgaggcgtaaaaaaaaagtgaagcgcacacctaaaaaagtaggattttagggtttttttagcctattttcattcaacaactgaaaagaaagcccaataacatttaacttgagaaaaaggtccaataaaacacaataaaaacccaataaaactcaaacaaatatctaaaaaagagtccaactaaaaactaaacctacaccatttatattaaaaagaacaaaactatatttctttagggttagcagtcgtgagacacctcctccttcatcatcaaaagagagaaaactgctgttgctgccttcctcctccttttcttctttctagctgcttggtgaagttctctctgctgctcccttcttgctgctcttaggtaaatgttatttagtttttttttttatctacatttactagttaaatacttaaatttaagtatgtattttgttgtgtacatagtagaatggttaaaagatcgaaaaggaattgtattggaggaactagtggtaataatgagagaggtaatgttagtactagtagaggagggaatgacaaccatggaaatagaaaagatctagcttggaaacatggtagggaggttgatatttcaggaggagatgctgaaagaaaagaagacttatgtttatcttgagtgtaattattgcaagcaaattattaagggtggtatgacaagattgaaacaacaccttgctcaaactagaaaagatgttaaaccatgtctggaagttcccaaagaggtaaatggtgaatttgtgaagcacttgaaacaaaaaactttggcaaagcatgtgagtcaaatgaattttaaagagatgattgggcagggtgcttactattctcagaaggattatgcccccatgcctagtagaggtgtaagaggcccaatggataggtttatgggtagtgatggtggaggggcagcaactgaacaagccaagtaactcacaaaaatacgaaagaattgcgtaataaaagttgcatgaacattgggaggtgtttcttt

SEQ ID NO: 49198 - DNA, 1005 bp, Cannabis sativa
cacccttaccatttctttattcttaatatacggtgactcactatagtctctggcagagcacgaaacatacttttttttttttcatgaaatgggcacaaaaaaaactttatataattattttattatttagtgtcagccaaatattaaaaataatgaaagaaaaactgtttttttcaagcttgtagtactggtagaacagctttccattaaagctcgttagagtttgacagacaacagttgaagtgactaaaaaggaattaaaagcaattaaataatactttgtgttattattatttttttttttttaataataataaactgaaaatcctttgtaagggaaatctaaactgttgttctactattagtgcagtgactaatcataggattatgctatgtagggaaagaagaatgaaataaataaataacaataaacattgctagctttctttaggtcaaacacccaataaaaatgtttgaacaatctatatgtgtaaatgataatttcctttgatttttttataatattgtcaatgctcatgagcttatagtgttagagattatgcaattgacaatattaatggaaaacaaattaagaaattataattttattgtaagaaataatataaggactaactattgattataaaaatattagagcgatgagtctaagagtacactctcttaaaatagtattttaatagattttttatctatttttacattgaaaaatcttttaatctatttctttcatgatcgtgtatgctagcttgtaaatttttagaacattctgagtagtttacaataccgtgaaaacaaaatttacatattttgttgtacgcgcgatttttttcttatacgcatagttaataattgtttaaacttaatttttggcattataaattattcaaaattttctaaaaatttacatgtagtcttaatagctatgtaagcaatcataaaaaaaaaatagattaaaaaagtttttttgaatatcaaaacaaatat

SEQ ID NO: 49199 - DNA, 2333 bp, Cannabis sativa
tccgatctgaaataagtagaaggtgcatcaatgcatccattttaaaggggtgcattgtagaattatcctaaaaaatatattttttaattattttagttattttatttatttttggattttcttttaattttatttttttttaatgatatttgaatatgtataactatttggactaatatgaacgtgacacatgtatatttatttacacgtgggataatccatgttggcacataaccactcttatagacgacacctttaatttaccaaaagaaatagagattggcagattttcccatcaaagtttgaggttggaagcttaattgcaagtgaattgagagttcggggagtttaactgtaaattactctatatatatactgagagtagtgaagaccccaagaaaaacaagtgcttcctactcttttattgtctaaggaaatatcccagcgagtttgcgaactttgcttgactccccaatttgtttgtgggcagtgggagacccccaatatttaacaagaccatagtgtactttgatgcaatttttgtttatggtccaagggctagtgctgttgtcatccttgatgatcagggtagggtgtgctcgaccaaaacaaaggtgtttgggctactttagtgctagaggctgagacttgggctgaaattcttgcagtgtcttggatcattcagtttggaatagggaaccagtgttcttttgaaatcgcaagaagctttgttgggctacgaaaaaccgaagatggcctagatggaactcggtgttttttttagactgtaatttcctttagatttttagagacgacaactgtttggcagataccttagcctcttgggttaggaggtcaaactttactgattatccctcttccaaagagttaacactcgttgttgttaacagactttaaggtccgttggttttaataaatttttgtttagcaaaaaaaaagaaaaaccaaagacaatactaaaaagagaagtgttagtcaacttcagtgtctaaaaatacatgtaagaatatttatttttcaattttttttttttatgattgtgttcgttatagtgacaatgtcatccttataaaatttttaaaaattttgaataatttacaatgccaaaactaggtttgaagttttttgaagacgcatggtaaactgaaatatcaagaattttattttgagtaatataaactatataaaaaaatttaaaaatttacagtaataatattatagctataacgaataccattatgaaaaaaaattaaaaatattttagcatatgatttaaaatataaaattaactgaaaaattgtaatatgagataagaaattgtaattaaaactctaccagaaattagaaacaaagcccaaataaaagtataatttcaccaaaatgagcaagattcacaaaataccattaaaaaaatggagcagacacgcaggcataagtattttaactccactagagagagagagagaaaaattattggaaatgaaaggaggtaaaatatatattaatatatatgtaaaatatattaaaattccactaattatggatgggaataatgattccaatgaattgtttgcattaccaaaaagttaaaagtccaaaccaaacaaaaaagaaatagtaattttcattccattccatgtcctttcctaaatcaaacatgcttaaatatggtttcttaggtacccaaagcaaagagtattaattaatattcctgtctttatcactcccacttgatttgagttattcaatgttttatatattatctatatgtattcttcaatcaaacatgttctactgattttattcatttgaataaacttaaatctcttctttctttagggataatctcaaatcatgaaatttggttgaacaaacttttcaagtaaccatctgatcaatccaataatgattgtttatttgctttaaggaggaaacttctgccttagttttatggttctaaaattagggaagttttaatatttttgtgagaattaatttcttagtggaacagaactaagcatcctcatccttcatcaatggaggattttgtgttgccaaggctgtacaactgttacaagtgccagaacccagtatctcgtcatgatgatatagtttctaaagattttcaggtcaatcattttttttttcttttaacccaaaattgaattctggttaagtgatatatttagcatagaaatatcatgtgtttgactttatgattgttctattattcctttcagctttcataaatgtctttttatttgatttttgttttaattaatggtacttaaattaaatggcttatatgtatg

SEQ ID NO: 49200 - DNA, 763 bp, Cannabis sativa
  modified_base (726)..(735): a, c, t, g, unknown or other
atgtatatatatagcaataaatagttataatgtcactacgtacgtacatgcaagccctagagtgatatatatataaattaaatctagctatagaatgaaataaagagtagagcacttaatttatatgtgtttaattatactttatattttattaattaagcactaactataatattactactacatttataagcagatctaggagatgcattaaaacaatattttgtttgtcgccactaaaaaattttataatcgtccttaaaatttattattgtcaacaattcacctctaaaatttcttataatgatcgtccttaaagggtattatctctgctaattaataatatcgaccccaaaacttctttttcttgtagtgtactatggtagtatttttttaaagaaaaaaattagtaaactatatatattgaaatgataaatatgatcagaatattttagggtataatttgaaatgttgcaatttctagggttgtaattttgtgattcgatcatcgagaaaccaacaaacttgcttatactacaagaaatgtcacttttaaaatgtgctggcaaaagttggtattgtgcatagtaaaataaaatttacttgtgatgtgttggcaaaagagagttgacaaatcaatgttggtattagaacttttgctagcataaaataaaaagcattggcaaaaatgacgtttcccagcgcgtaaatgcgctggtaaaagtnnnnnnnnnnccactgcaaatgtacgctggtaaaactt

SEQ ID NO: 49201 - DNA, 3220 bp, Cannabis sativa
tgacatggacaaaatagacacgtcacccggagacaagttaaaagttgaattgaaagagcaacaagtacggttcatgtcgtcagctctcggacgagttcaaaaagctcaccttcccttctgagagtcaagatataggaaggcacctccgggtcaggagggctctacttgaacagtcattttgcatttaatggagcatgtagaaaacgtctgggaacgcccataagaggatgtgtcaaatatcgtaagcttgatttagggcgattacacgataatcaaatgggctagtgacggctccattatgaagattcacatcaatcaagaaatgatggaggctattctcacctaacatctactctgcttactacgtaggcagtgcatgccctattttgtatcttttgagaacttgtgcctatccatagttggctcccaaagaaaaattactccctttttattattcccaccattctctataaatacccctgagaaaatgaagaatgggattggaaaaaagagagagaaaagacacactaaagaacattttttgtaaggaatactctcattaatacaagagactcgtggactatggctcattaatgtctgaaccacgtaaaaatcacctgcattaattaccctaaagctctcattattatcttatttaatttgttgccgaaaacctcggtcaatattttggtgctttcattgagagctgttggaagggttgttcaaaaaatgacaataaaaaatctaagctgcaatggtggaaactcaaaaccacacacgccaacctcgtccctcccatgatcctcaaaacctagagggcgaagaggcggcctcacgagtaaatgtgggctctgaggaacgagatgaatcaaacgacgaggaatacgaagaaaatcctaaagggtgcgatgcttatgacgacggtagctacaccgagttactagtcttaaggtaaaaaacagctgatcaccaggccaaactggtcgcccaaaaagaacaaaatagaaggatgcaagaaataatagttccatgtaaaaggccatggagatagctggaatccacgtgcatcccaaagctatgcctacaggactagaggagacatctatgatattgcttctttcctctggttctaggttttttcctaggcagataattttagtggagtcgaggtcgcacatacttacttcctcgatgtcctccatagattctatagttgtttcggatcccacacggggatccaactctcttgttctgtcaccatgggctcgtcgtccctttgtaccatcaaaactgacagatgtactacaacattgtaacattgtctcacctctccttggttccccctcaccgttcccactccggcctctcgagtagggaacttaaggcataagtgtcgaatggaggtaattgctctaaaatcaaccaaagtcggtcggccaaggatggcattgtaggtcatgggaaagtctaccacaacaaaggtgcaatacttgaaagtgctctgtggggtgtcaggacactgggtgacgaggagccttacttttcctatcgagattagtgtcatcccgttgaatcctgtgagctgtgagccactaggcgacaggtccctgtctgtgagccctatggtcgtgaaggcttctttgaataatagatttacagagctctcgttgtctactaatattctagccacaaccttattggcgataggaatttctatgactagaggatcatggtgaaggaaacgcactagtttctcatcctcttccgtaaaagtaataggttggtccataagtctgggtctttgtgctaggagttgagtgacctcccacacttcatcgtgttttagggctccaacgtaatgttttaactcattcctggtggttcctccaatatgaggcccattagaaatcatggccactctcccattctgctggggtggtaatccatgcgcctactgaggaaggggccctctgggaggtacttggccttcgggtataccccctgttcctccctgaggtaatgggcctcctgctggatctgtgtttaggtgcggtaacctatttttgatccattcatacaagtgacctaatcggtttaggttctcaatttggtctttcaagtttttgcactcatttgtggtgtggtcaatgtcattgtgatattcacatctcttgttgggatcttttcgggagctatccctgtacaagggtggaggccttcagtaatgtgtattttttcgggtggcaaagtatatacgctcctgagtatccataaacttcatgtattatgtgtacagggggtatacccccttcactgtcgcttgtcctcagtttgggtactaccctttgagaatctcttacttcgggagctttggagaactcctgtcttactgttggctggtgctaattgtgacagagtttgggtacttaggccagcggtattgctcatgggcgctccaaaatgtgacaatacgggagctaaagcgagactttgattgtatccttgggtggcggagaattgtatcccgcttgtttggggagtggcaggagatggagctcctggaagttgtgctcctgtcacatatttcgacaccccattcgggtaaaaccctccataagccactatttgggcttcttccaaaataatgtatttttggactctttagaaaaacctggaggttagctgctccctcttgttgcagctcgttcagtaaaagggttcccgtacggattccagcctgaagaagggctagctgctgtccgtcatccaccttcttagtctttgaggcctcctttttgaatgtttttatgaagttctttagggtttttgagggcaattgttttatattagtcagggtgctgaccttgaggttgatctttcttgtcgcgacacattgtctctggaaagtaacatgtaacttgttccaccagtccactgatcctggctccaactttttgaaccattcttcaacagattcgcccaacgttagtggaaagcataaacattttgcgttaattttgaccctcatgacggtcatcaccctgttaaatcgggacagatggtcactggggtccgaatctcccgtgtaagtttccatttcgggcatcttaaaatatttgggtagcttcgcttctaatatgtgtcgggcgcatggttcccgatcctcgcaatcagagtcggagtcatcccctttctatctccggggagactttagcgatgt

SEQ ID NO: 49202 - DNA, 1028 bp, Cannabis sativa
agcatcgtacctaataacaactcgaagacccacttacactaagtcacataggctagcatctgaattaaccttgaagaaccctacaattggcaattgccaaagcaatgttgcaagcagtttatcaacaggccttactgccaaagccaatgtactcttcttccctctagtcgatgtgttcctcaggtagtagtcgtgagttatttaccgagttttctagaaaaataattattaaaaataagagctaaagaaatatatgaagaagacactcagaggttttacgtgtggttggagcgttaatgagccttagtctacaagtcagtattattatgaagtaggctagaaaagcttaagggattacaatgagtatgaacactctatttttgtcctaatcaagtaagctaccctttgaatgaaggattctatgagtatttatagtgttatagagttcatactagttagtcttttccctctaatagaaagtttacaaataatacattggctttggacttatctagtgaagcctagcccatgaggtaccttgtgtatgctgacatagaggccttatcatgaagctaattgttcatactgtgtcttttaattatggataattaattacatattaattacctggtttctaattatccaattttcctttttggcaagatattattctctgttcgagattttaggaaagtaattcctgatcttgtgcgatttggtagaatatatatataaaaaaaaaaaaaaaaaattaactcaacacttatcactaagggcttgtttggcacaacttttgaaaaagttaaaagttgctttttaaaaaagctatgagaaatatgtgtttggtaagtagttacagaacagcttattgaagaatttatgaaaatgctacagctaaaaggtaaagctggtatagcctaacttttagaaaaaaatatttttattaaaaaaatagaataaattattgtttactaaaaatatatttaattattttttgtatattacaaaaaaataaaaaaaatatttaa

SEQ ID NO: 49203 - DNA, 811 bp, Cannabis sativa
taaaatttattttaacataattgtttatttttttatattttattatagttaatttaattttataattttattaaatattaaagtccacgaaaattaatattgctattaaactataatatttagtgtcacgagttgatgccattaacattttactataaaaatagataaattaaattacttaatatattcaattgtagtacttattaaattacttaaattactacaacaatttttgaaattaaaaagtttttctaatgaaatattgaattttccttaaatattattttcatcactatgaatgtttacaagaccaaaaggtcaacatttttgaggtctatttcaacattaaaaaaaaaaaatcagtcaaaagtcacactataataaatttgtttgagaaaatgacacttaatatatattatttttagaggtgaagaggtagattcatccaattgactacatattaaaatttgatttcaatgccctctaatttaattttcaaaataaccggtgaaagtatatgtactcccatcaaaatcaatcttcctatatatactaaatgttcatggcaatagtgccattaaaataaaggtcaaatcaagagctagctagaagcaatatatttatttacatctcaaaattttgaacacatttaatacctataaagtcataaaagttatagctaagaagtttgaaaaaaaaaaacactacacacatccaaattacaatgcactttttatacttagtgttgtaaatataggttgagtttttttaaggtggaatgaaaatgatatgagtctgagaggtatgagta

SEQ ID NO: 49204 - DNA, 1113 bp, Cannabis sativa
ctgatctgttggagtgaattaaagctgctcagttaactgatccagagttagtgaagatcaaagaagaggtttcagttgaatctgcaaataaacatagaacaaaaaattagtttaaaaaataaaattatgtgctacttgcaaacacatcgataaatatcttgaaaaaagtaaattccacactttctaacatacattgctaaatgtatcacaaaccatcaattgtcattgctaaaatttacttagctaatattagtggaacaacatcgataaatattgctaatttttaataaagaaatatgcatggatctacattgctaaggacattgctatatatcggtaaatattgttaaacttcgtccctagactcgtttgcaaatatatcgtgaaatatcgctaaacacatcactaaaattcactcgactaatataaatgaaacaatatcgatacgtatgtccccaaacatcgataagcatcgctaatctctgataaactaatatgcagggatctacttcgctaaggatatcgctatgcattggtaaatatcgttaaattttatccctaacctccaattcgcatataaattacaaaaatatcgctaacatgtcactaaatatcattaaacgacaaaaaacctggaaaatacaactatatcggagtttcatttcagacacaaaatcaacaaacaatgtgcatcacatgtgtagatctattcaatacaaactaaatacaactaaacccaacaacaattagtaaagaaattacatatctagtttttgtttttattttttgcaagaaatgtgttgctacagtgtgtgtttgtggtggtctaatgcacttgttgtggagtatggtggtccagctaactccggcaatgggtgctctgatgttgggtgctccggttagactcacttgagtatgtgtgtgagtgtgccttttctagagagagagagagacaagaaagagagaagaaaaatgaataagtgtgggttttattatttgagatgtaaaattggaactaaattaatacactagtataattattttatgttttaatggatggtatattagacatctctaatgagagatgtaaaaattgtgctatatttggtacaa

SEQ ID NO: 49205 - DNA, 1624 bp, Cannabis sativa
atttcattactacataagttctataaccaacaatgcagtccataaatttgtttaaaatgctatattttaactttattttttgtgtagctcaaggaacatgtataataaaactaaaggtcgatgcaatattggtccaatcacagtgatgactctagtaagtccacaatagccagatgatatacaatgtggatactatgttatggagttcattaaaggttacatgaccgaaccagatgcaatgcaccgattaagagaaggggtaaatcaattaataagtagtcttaagtttgttttaaaaactttattttttgttttgtttcaataattttgacggtactaactaataaattattttgttttacaagtcaggttttgcatatcgtgcactaatgatgtgataaatgctaggggtgttcatcaaatcggtcaaacagcccgcaccgtaaaaaaatacagtttgaaattctttgtgatgcgatcgcggtttgaatttttcttaaaccgcgtggttcggtgtagtttgcaattttgaattattaatatgcggttcaaactgcactgcaccgcacattataaaaatactaattttatgtttatttaatttcaatatgtgaatgtccaatccaaaacccactaattattgtattattaaaacttaaaatattttttcatatttgttttcaagtcttatggtatttttgacaagtattgctcaagttttgttgtatttgtgatagcttatttattggtgatagtacaaactgtagaaattgcaaaaactgcactgcaccatattttgcggtgtagtttatgcgtttttttagtttcacgatgcgagtgcggtttggaaaaatagaaaaattgcatatgcgggttggtttgaaaaaacagtcaaaaactgcaccacccgcatcgcgaacactcctaataaatgctatacaagattagtgggtagactacgtgaaagtagaggtggtacgtcaagaaaacttatgagtatatctcaattcatgtgtatacttttcattaaataattttttttttgatcaatcagtgaatttcaaaactccaaaaaatatacgattacaacctattaataccttcatccgaaggccttatattttagtctatacaatttgcttgcttttctatacctacttttgtattacaatcataatagctttttgtattacaaccaatgagtaccaaaaaacagaacaaaacttatcaaatcaaaccaaaacgcagtaccagtttcctggtttaatcagcttctggtttacagttttgaaaaccagtccctgtcaatcggcttgggtttgcttggcaagcaacacattattctattcttcacatcctccttaatcgtcctcacaacctgctcagtagacatagcctctgaattccacaaaattccattctgaacctgccatatctgatacactacagcagcaacagcaggtgttataacaactttccgaaatgagttaattttttctctttctatccacctaagcaacctgttcagatttgtagtttcagctctccagttcagccattctttaactttagataagaaattatgagagaaagaacataggaagtgttggatattattttacca

SEQ ID NO: 49206 - DNA, 1102 bp, Cannabis sativa
  modified_base (775)..(780): a, c, t, g, unknown or other
tctctctctctctctctatgtctctccttatgaggcatccctactcccaactatctttggtggagctgtatctcatcgccaccagccaaaggtaaggctacggtggcctttctcgtccgcaaaaccactgttggaagaatggagaccatagttgaactcggagtgcctcgaaaccctaggattttgtgatctttgaggtcttcagctgctccttcttattttcctatgtcatgagctactgttcagtcgtcgttcgtggagcggtgattcagtgaggaaggaggctgcaatggcggattggaactggaaaaaaatgaaatagaaaaaaatagtgaaggggatcgatttttatagagaaaaaaaatgaaaagaaacgaaatgaaatggataaaatgataaagaggttcggactttaaaatcattacgccgcaacatcactaacaagaaatttgtcattgatggtctgttcactgatgacatggcagtccattaataacgaatttatcgttagtgttgtttgcagtgaaaaaattctagcccactcattatttttttaaaaaaataataacaattattgaggacattatcgtcattaatgaaattggcatgtcgccactgatatttaattttagaaaaaaaaaagaattggtttttattagcaccgacctttaaatgtcttcactgatactctcacctatagtattagtgaggactttgggccatcgatggttacaaattttaatcacaacaaaacttgtaactaaaagtaaaaaannnnnnactaattataaattatgattcttacattgtgactgaaaagtctgtgcctaaaattattagtcacaaaaattacaatttgttgtgattaattatatttttagtcacaatacttgttgtgactaaaactaaaatagtgacaatttgtaactaaatactatgttttattcataagtaatattttgctgtgactaaaaattacatttagtcataaaaaaattacgttgtgactaaaaattatcactaaaaataacagttttttttttttttttttgtagtaccttcataaaggctattatcatgtgtagtgtatattttatttgta

SEQ ID NO: 49207 - DNA, 1273 bp, Cannabis sativa
taacaatcttaatagtttagggaaaatttttaacggccaaaaaagtgcaggagcatgatttagtacatgtcaaagttcgggggaaaaattgctaattagtctaaataaaaagtcaccgaatttttcctaaattaaaaattctggtatataaacacactttatatccaatagatatatagatagatatagattctttattctcatcttattcaataaaatccgtgaattttctctcaaaaaaaattataatataaaaaacctaatcaaagtacacactaaatattcaacaacaaaaaaaaaaaagtagagaaactaaaatacgtaaaacttttgaggtactgagggccagcgcgaaaagtacaaatacaacaacagaaaactgaatactgaagagagaaagagagagatggagaagagggtgtcaattccactcttgctgctggtgctgttctcactcgaaatcactgttcaagcatcgtcatcctcggcagagaagtgggtcgtcgatggaaaggttttggagttggacgattcaaactttgattccgccattgccgccttcgactgtgtattggtcgacttctacgctccctggtgtggccattgcaaacgtctttccccccaggttcctctttctctctccctcaattttatttgataaagcttcactttttatctcctgtgttatttagattagcgattcatttaaatttgactagcataggacttgaatttgaaacaattattctagatctagttatattttatacatatatatatataatatattaatcatcatttgtttgaatttatgatttcgagaagaacaactacaccgaattcaatatgtaaaagtttagattgtttttgttgaatcgctaaattctatccctggcaaatacaggttttgtggaaatattaaattaaatttccttctttgtctggagtatggagttaacattaggttggatttttttgggcattattgtttagtgtttgattagcatttgattatgtttttgatgagaatgaatgatgtgatgaaaactatttattatacatcttatttttgctgcagttggatatagctgcccctgcacttgctgctttgaaggaacctatagtgatagctaaagtagatgcagacaagtttaggcggcttgctacgaaattcgacatagagtataaccttttccccaactccattttatttattttcattcctctgtgtttcttgttatcgaatgaaaatgttatgttaccatttacataa

SEQ ID NO: 49208 - DNA, 720 bp, Cannabis sativa
gattcctactaaaggtaatttggcccgccatgctcttttatttgatggtttatgtcctttatgtggggtagaagaggaaactactcatcatgttctttggggttgtctttctttgatacattgtaggaagatttgtaagtttgtgttgggtgactcgaggagccattgcgtagattttctggactttattcataggtttgttgatccccttcccaaagagatgattgaattggttatggtaattttgtggcaaaattggtttcagcataccaggatagtccataacaatgttgagttgactcctgagctcactattatctgggctagagattaccttagaaatttccgcaacaaaattgcaggtagtggctggcccccgtcacagttgagagtgattggttctcaggatggtgcttcagttgcacggttgggttttgctcttccaacatccaaatgggcttttccccttgtagatttttgaaagtgaatactaatgttgctcttaatttggcaaattattgcggtgggttggatatggtgatttgtgatgaattgggtgtggctaaagccttgggtgtttgacacttggaagattgttttgatctagaagttgttgaaactttggctatttaaaatgctatctcttaatgtctctcttttggatatgacaatgtcattattgagtttgattgtctaaatgttatgcttaaaattaaaaat

SEQ ID NO: 49209 - DNA, 1078 bp, Cannabis sativa
atatatatatatgcatgtcacaatcacaatagtgtatattgagaaagagagattaattaaattaatatgtgtaataacccaactaatctcaactaatccataccttactcctactttcttctatgatatacataaaataaatatttatatatatattatatatagtacacttggtagctcacattaatggttatactacttcttttctttcccagaagccatatttataaatataattatgattatgatgcttgtttagttgtataaacgcatgcaattccttgcttacaaaagaagcagattctcctctaatgaatattatatatatttataggattaaaaggccttgttgttgtcattgtgaaatgtgataactgacataaagaagagaccaaattaatacttaaaaatacttttgattgatttcatctaaaccaattataattcttattaattaataagtgatacaaaataaaaaaaaaaaataatgtggtgcaaattttttctttactctttcaatcatttaagatcaatttcgggaatcatatgtcagtaatgagggtcttataccttaaccaactttaattggattatcggtaccacctcaagggtttccacagatagcaccacgccaacaagcttaacctttcattcctctaatataaaggggttgaagtgagtttcgaatctttgacccaaataagagaagatgccagtaaagtaaagacaatctctatcagtacaccacacaacacatgttaaagcaaaatgacacttagtttcctataattaatttgtcttgtctattctacaacaaatacactatacttttttatttttttttaaattaattattagttcattttatttcctgttttttctgaaaatctgcctgtgtggggtatggtgatgaggttgtaaagtatttcttttattattattgttctttcacagtacggattataaatataatattagtattattattttttatttcccttaaaatatcatattttagtacaacttcttttgtaatgttttatataccttcccataattagaaaagaagaaaaaaaca

SEQ ID NO: 49210 - DNA, 1295 bp, Cannabis sativa
tgctttcacacgggcagggtccaagggccttctcttttgtcggacaagatcattgtatatgttcaaagcatggcagatgatgttgggactgatcccactcctatccacatgactccatgcgaggacatcttgatttttttttttcagtttatgccactatcctttcttttacctcaagaggttggttttccttacttcgatcatctttgttgggtttgtgtcacctttatatgttttttgcttgtgggtctaatatatcttcttaccgaatcactctcggtgttggctaagctagtgatataagaactatttcttccacttccatggcctcttcgcaaacaatgaagattattcttgtggatacattataacatttcctgacactcttttggtcaccctttacaataccaatgctaccattatcacttgggtgtttcatgcacgaatgacgtataaatgtaattgccccaaactcgacaaggatgagatatctaaaaattgcactatatgtagtagggaaatccacgactaaaagttataatacttagaggcaataagggtatggcttctagctatgcccccacttagagtgactggaaattggatctttctcatgggtattagaatctccattgaaccattatagttggattggactcaaggaaatattggtttcaactcggccaatggcctagaatgtgacgttaaaaagaatgtttacaaagctcccatcgtccaccaaaacccatgacaatcttttggcgattttagcttcaatgactaatggatcatgatgtgggaagtggacatgtctgacatcttcctcaataaatgtgataggtaatttcattattctatactgttgagttagtttttgcaccaatgcacaaacttcttcttcatgttccaactctctcaaatacattttctaggtattttggctgcttccactgatatgcggacctccggagatcatgaccacatgaccatccacaggtggtggagcaatttctagtggataaggatctcttggtttcgaagcttgtatgttgtatagctagtgtcccctcagggacttctactcccaaagcttactattaaactatatcctgagggatcctagtaggtccttaaagtttagttgccgcttattgcctttgcactatcacttgtctcaggtaaacaatctagacacttatccgttgatgaagatggccgagtttgatgagaatttccatttcatctttcaattggttacacccattggtggtgttgcctatgtcaaagtggtttaa

SEQ ID NO: 49211 - DNA, 948 bp, Cannabis sativa
aaggctctgaatgccagaaacaaaagcagggagagaggtgaatcaaatgtttttgaggatggatacaaatttgcagatgcattagttgtgtccagcaaggagtctggtcagaaatggatattagattttaggtgttcatttcatatgacaccacacaagaatctattttgtgagttcaaggacatacaagaagagaatgttcttctaagaaataacaaagcctgtcaaatgaagggaatttcatctgtgttattgtcatgtatgatggcatcaaaagaactgtgaagaatgttaggtatgtccctgaataaaaaaaaaaaaaaacatattgtctcttggtgaattagctgtaaatggatgctccattaagattgaggagtctcttagagtcactaatgcctcactggttgttatgagaggagacattaaaagtggtatctatttaatggtaaggcagtgatgggaacaaccaatgttgctgtgaatgacaaaggtggtgaccaaactagaatgtggcatttgagattaggccatgtgagtgaaagaggtctaatcgagctagaaaaataaggtttgttaaggaaaaattgaatggtaaattggagttttgtgaagaatgtgtactaggcgagagttgcagggtgaaattccctatgggtatacatgttaccaaagaaccactcaactatgttcattcagatctatgtggtccatcaagaacacaaactcttgggggtgtcagctacttcatgagtaccattaatgattttagcataaagatttgggttttcatgttgaaaaataagaactaggctttgaaaactttcaataattggaagaaactcatgaaaagctaaataggaaggaagttgaaggtacttaagacagacaatgaattagaatacttctcatatgaatattctttgtattgtgctaaaattggaatca

SEQ ID NO: 49212 - DNA, 1124 bp, Cannabis sativa
ttattaaaaaccgatgacaatacaggggattacaatcaattactttaaaaggtcggctaaccctttgccgtcagttatgaactgctagctataattagacgaccaactttaaccaacacctattttattgaatagcatcgattccagttcaacaatatgctgcaggatatggaaaatgcaatttttcttctatttttccctgtgttaatttttgaatttttacaattttatatatacagctacaataatatcccaataattctttatatacaattacaataattaatctagcaatgtggttaagttaatgcaaaaatattcctaacattaagaaattaacttaataatcatggtgtttatcgagattttcgaaaagcgattaaaacgagagttgagggattaactagattaataaaaaattacataattcaggtgttaatgaatcttagtccacaatccacttgtatttgaccgaatggccttgatgtattacaatgagtattttacaagctcaagaaccctagttttttgctataatattttcacaatgatttcatacactctccagatttctctcccttacatgagggtatagtgcagtatttataggctaggaaccagacctgggttcacccatgacctattagggtttttgtctcaacttggcacactcagcgccgaccctaggcataggcgggctaggcctgtgcctagggcccactcttcctgtgcctagggcccactcttttgggggcccagaataaaaaataaaaaaaattaattaggctttgattaaataaaaattaagtgtattataaacaataaatagtcatagcttagctggttgaggtgtatgacatattatataatgtcatgtgtttgaatcccataacacttttttcaattttttttatttatatttttgagggccccaaaatttaatttgtcttaggcccatatattttcagggtcgtccctgggcccactaattgggtaaatacattagataagtgactatcgacccactggttgaggtccagctcgtgggaggaggagatccaaaaataaaatatatttgtgttttcgggcttgtcatgccgggtcatgcttaagcttatattttt

SEQ ID NO: 49213 - DNA, 872 bp, Cannabis sativa
cccgccagaagggtaccgggttgaacacgacccgctcgaatatattttttttaaaaaaaaaaaaaatttgcaggttcaccggtttgggttcaggccggttgctcgagttcaggtcgaacccggtttaaaatgttcagtcattgtcatatttataagttgggaatcaagttttcagcttgacctggacctgttacagttgttttatgttgatctaagatccactgataggataaatacaataaaatataaggaaattacatggttatccactttattttatttgttttaatttttacttccatttttatatcatttaagatatactcacttttatagatgatgtcaagttaatgtaaattatatactagacttaagtagagagtgaaggtatattcagcaatccactcaaaaatataagtatattttaataaaatataatatatgagagtattttttattaatagatacaaaaaaaaaaaatattttccaacttatcccataaaatattgacctttgggcttagtaggtgaggcccggctaacatatagtcgtcatccgtacaactccaagtggaattcgtacagttgccgaaggtctcgtgacactacaaaaaataactatttttagtgacaaacttttagtcacaacatagattttttgtgactacatgtgacttttcatcacaataaaaagttacttgtgactaaaattaggggtgtgcagaaagtcatccgatctaatagaattggatatccaatcataattggatcggattagatgcaaagtttaaaaatctagttggatcggatcagatattggatgagacatccaatccaatggataaccgaaccgatccaatccaatatcatcca

SEQ ID NO: 49214 - DNA, 1058 bp, Cannabis sativa
gtaggccttgtttattcataccactgttgtgttatttctaacaacatggctagaaagattcagcatggaatcatctcgaatatcttgcagatcggtctgcacttcagaattatgtatgtgagaaagaggatctccctttctcgtatacatactttattttggcatcctgaatttcaaaatgaccaatgccatgacccatctcaagagtggagacaatctatctctattaaaactcttgtctacgacacctataaaggcaggtaggtctctcaccaacttgcgtaagctatctagctccgtttgtgtgacctttagagggatctccattatttactttgcctgggaaactgcttcttcttcaacgggttgctcttcctgagcaagcagtttatgttcattgccttcaaccgattgcttctcttgagcaagtggttggtctttattgcctctatttccacgaaatggaatggaagcgttaagcacacatgggtctcaatgattattagagttgtactaactatatcagtactagaaccatcattgtggattttatttctggcgctaaacctttaccaatctttaacttcctggtcagaatggtggggttgatttctacatcttctaattcctataccagtccaaaactctctacaggatccgcaaagtaaggctctaagtctgcctccccactttgggctaacttcattgcccttcgtcggactcttggtaagagctcttagctggcatcttttctttcttggctttggacaaagccaagttgtagcaatgcggggcatattttttatctccccttaagcactctaccccatgtcttgctgggaactttaggcataggtggtaaattgacatcactgccttcaggtcgtacaagactgaccagcctatcattgcattgaacgctgatggcacatcgatcattatgaactgagccattattgtcctttttgtaggaatttctctaattgtgaaaggcaagcagatgttgttgggttttatgccctaaataaaactccgtttcaatgtaatccagattattc

SEQ ID NO: 49215 - DNA, 2067 bp, Cannabis sativa
tttttcttggctatccacaaggtgtaaagggatatagattatatgatataaacactaaacagatttttctgtctagaaacgtggtatttcatgaacatattttcccattttcaaaactaaatgaggacaatagtcacattgatcccttcattactactatcctacctactgctgatgtttccaatactcccataaatgattatcctcctgctaacaatgtcgttcctagtgataatattccattacaggaagagaattctgatgtaccagatcaagaaatggaacctgctgaaccaaccgtagcaccagaaattcccaacaatgcaccaaccgtagcacctagaagaactagcagaattacaaagccccctgcctacctcagggactttgaatgttactcgatattaaaggataaacataccactccccattctcttgataaatacatgtcttatcataaattaactgaatcatacaaatcttttattcttgcagtcacttctcttaaggaaccacaaacataccaacaagccatacaatttcagcattggttggatgctatgaactctgaattggcagctttacgcaataacaaaacttggattgtcgtacctcttccccccaacaaacgagccattggatgtcgttgggtctataagataaaattaaatagtgacggctctgtggaaaggttcaaagcgagattagtggctcaaggatacacacaacaagaaggccttgatttcttcgatactttctctccggtggccaaaatggtcacatttaaattgttacttgccatttctaccatcaagcaatggcatatgcttcaaatcgacattaataatgccttcctaaacggagacctcaatgaagaggtctacatgactttacctcctggtctaactttatctgcttctgattccacaggtaccaacctagtatgcaaacttcaaaaatctatatatggcttgcggcaatcttccaggcagtggtacaagaaacttactgaagctctcattcaagaaggctttcatcaatcacaagcagactacacgttattcactagaggaaaagatgacaacttcatagctttacttgtttatgtggacgatatcgtcattactggtcccaacattgccattctccaacaaattcaagcttctctacatgacaaatttaaactcaaagcccttggtaaactaagatatttccttggctttgagatcgcaagaacaaaagacagcctatttctttcacaacgcaaatacacattacagttacttgaggatagtggttacataggcagcaagcctgccaaggctcccatggatcctagaaataagcttgatgatcaacaaggtgagccattgaccaatccatcaacctacagacaactcataggcaaactgctttatttaacactgtcaaggccagatataacatatgctgtcaatgttctaagtcaattcatggcctctccacgaactcctcacttacaagctctccaacatctcattcgatatctcaaaggcagccccggtcaaggtattttatacactgcaaactcctcccttcatctcagaggtttttcggattcagattgggcatcttgccccatcacgagacgttccacgacagggttctgcatcttcttgggagattgtctcatctcctggaaaaccaagaaacagccaacgatatcacgaagttcagcagaggctgaatacagggcacttgctgctacagccagtgaggtaacttggctgcaataccttcttcgcgacctacacattcagcaaccaaaccctgccttcatctactgcgacaatcagtcggccattcacattgccaacaacccgacattccacgaacgaaccaagcatatcgagttagattgccactttgttcgtgacaaaatcaaccaatccaccattaggctcatacctgttccaagcactctccaacttgctgatgctttcacaaagcccttacctgcttcaacactcttgactcacactagcaagatggctgtacagaacctatacagtccaccttgaagggggg

SEQ ID NO: 49216 - DNA, 1575 bp, Cannabis sativa
accaatcaagctgaaatttccaatggctataggtagtttttgcaagaaataactgagggtaaacgtcgttatctgcgagacgcatcttggcctgaacccgaacctttagcttctattcttctagctaaacctttgtttttaccttgagtcactattgcttttttgccaagtgacttgaattttaaaatcatgaccactcaagctcgtaaatcaaagaccccccaggatcctacagtcaccttcgaggcaaaactgatcgaatccaaagtcagatcgatagctccttttgttggaaatactttaaaggcttgtggcatcaaatacgagacaggatttcatgttaggtttgtcactccaggggagtttagctattgtccaccaaaaagattaatttgagaagagtgctgtggtgcttgtactagtggcttgtctgatataggtgcttggagcctcgagcacattagggttggagcaatactccccctgagggactagtatagggaattttgtaattatctcaggtttactccttttcaattaattctgagttcttatagaatcctggcctgcttaaaggtcttatatcaaattatgggggtgggagtgtcccacccctcgaaattgtatacttttattctgtaaaagttgttcccgcaaggaagtgaggatcatgagatttttactacctccataccgacacaaatgattgcatgatcattttgagattacccaataaaatagaattcaaggatgaattcttctagacaactggtctctcccccatcaacacaacaacattttgcatcatacgtaagtatcatcttttctcaaaagcttggttttgagtttcttcatttataaattgaagtaatttatttattttgcttattgtgttgagagcgatcacgagaaggccaattcccactcccgagatagtcgagcggtataaagctcttttgggtcttccgtttggactgtgatcaacagattttctactgaatgagaccaacttgaagaccgtcaatcttcttggcactgagcaatctacctgtgactacaaaaatccaaaattctctaagtggtagcaagtccccattccacctgacaaggaggatagagattatgtggctcgcatccacttcctcaataaagtaacccctcaggaaggtgaagatgaagcatcctgaggttataattgtgggtggtctccaactgtacataggatcgagtgtacctcgctagtcacatttaaggataaccaatataatttctatacttgggataatgtttgtattgagcgtatgacacataagtttgatagttggtaccctgagtttcatgtccaacttagttgcaatagttcttactttagaattttcgaacaatatggtactaatttggatagggcgagccatctggattcaagttgggacttatctccaataaacccctacgatatatatgatcactggctctagggagtttagtagttatcatagttattcttcctcatcatctaataactatggtaaatttctctaagtgggagtttattccccaccttttcattattta

SEQ ID NO: 49217 - DNA, 907 bp, Cannabis sativa
aatcatagtttagtctccgtataacacaacaacgatgtgagttcattaattttgacaaaatcccattagagaaacaacgtatacagtaagacccatttcagatgcagaattgaaaagattcaatacggagacaaaaataccaaaatgttagaaaaagaaaaattaatcataaaaattgggggagaattttcgaataaaaagaagacccaaattggatcagaacctgaaatggtgatggatgaattataaacccaacaaggaggagagatggagatagaggtggattaggctaaatatacaactgtggagaaagaagaagaagatcttgcctacgtcattacctgtcttgggtttttgagttttggggttttggtacagctcctctcttcttgagcacccaccaattgggactcgcagagctcttaggccctgcgctgtctgcatatacctctcacggctcacagtgccttcataacaactaaattattttttaattatttttttcctcaaataaatggaaattaatatattttaattttttatcttaaaaataaaaaataaaaaaatgagacaaaagtgaaaaagaagaatagtatgaaaattggggtccagtaaaaaaaaaatcaagtaaaaggcatcttagtgaaaaaatagacatcatagaattttatgtcgttcgtgttgcaaacgacatgtttttgtttttcgggtaaaatgtagtgagtgagattgttactgttttaaattttaatattagtttggtttttttttgcttaatttagtttggtcttcttcaaacaaatacattttttatttttatttttaattttgggttgagtagttgaagatacttgctgctattttggttgagaaccaatcatatttttagtaaaaagaaagggaaaat

SEQ ID NO: 49218 - DNA, 1937 bp, Cannabis sativa
tctagtcactaatcaccaataatttaattagtatgaatcatctattccacttttttttttttttttttgaaagtcaattccacctttttcacaataccaaaattttatgtttcaacaacaattttaccattatgtttacccagaataaacgttcaaaatatgtttatatttgtgtttcaattattttatttgagtaaatacttctttagactcggtattttgtaaaaattattaattgaattttctattttgttaaatgataaaataaacaaggtattttttaaaattatacaaataagattctgaactaatttttgttcaaaataaaatttaataataataatctgatttagagatgttatgacaaaactgattatattttttttgtatctattcgtgttaaaaattgtcttaaagttagttatattaaaaaatagttaaaaattaagctcaggatcttattgttatcattttgaaaaatataaaatttattttatcatttaataaaacagaaagtccaattaataatttttacaaaacacaaacttcaaaatgatgtttaatcattttactataactattttacctgtagtaaatataaattattataactattttcatgagtatagtaaatatgtattttgttaaaaaaaaataataataaaagcagtgtacacactatacaaattgaatgggaaagaaatctagaaagttaaagattcatctttctttctttttgcttcttttttaaagcatacataattttaatattcacaatattatattccaagaattttatctatttttgtctgaaggatatagatgtactttaaataaaataaattagagaaaaaaaaaaaagaaaaaacaaattcttaaccgctaagcttcccttctcatttctcgaactctcctatataaacctctatcaatcgtgtcacaaaatcaacggtggaaaacaaagaagcaaaaagcatttcatgggaactgtaatgggaatcgaaatggaaggagaaacagccaaagtcggtggcgacgtcggcggtggtagcaacgttgaggcggtggattacttttacatgttgccggaaggctgcatagcgcatattgtgtctttgaccagtccacgagatgcttgccgactgtgtttggtgtcgtccatattcaaatctgccgccgaatccgacgccgtttgggagaagtttcttccaccgggataccattctttcattgtcgattccgattatcatcgtcgtgctctgacgaagaaggatatctacttctctctctgtgatcagcctctcctctttgacgagggtagaaaggtcagttcaatgaaatttcgattcctttatatattatttttaattaatttaatggttgtaaaatctgtacttttggactgaatcgctttttgattcacttttcagaacagtgaaattgaaattttaattttgataatcaatcaatttatggtttcttctcgattacttgattgtgcccttattctgttatgcaatactggaagatttctctctctaacaagatgaatgtaatttattttgtatttctaaatatatgactttattccaaaatgtttagaataaatattcaaaattaataaaagaaatactttaatatgaaagtgacaccattgtagtgttatagatgttttgcaatggtattagaaactaaagaagagtactttttgagttggaatagtactgtagttcacatctctatccgctaccactacaaaatctttttttttttggggtggaggtgggaacacaactgactttagttattgtgttttctttttctgcatgttttgtccacctttaactagcttattatgtatgttttcttccattgttgatgaaacttttcttctgtttttattctctttggattgatgaaggctctttcactgtgcc

SEQ ID NO: 49219 - DNA, 941 bp, Cannabis sativa
ttttgtatgtacaaaaacataaaaaaaaattggtagcagatttggtccaatgtagtccgatgggtccgatgggtggcccgatgggtggtccgataggatagcccaatgggtggtctgatgggtggtccgatggtgtaaatggggtgatgtaaatggggggtattttagggatatcataaaaattgtcatatcttacaaatattagttattatttgtttagaaatttttttttaaccaaatgtaagcataaaaaaatcaaattttcttatattatgactaaaaatatactcaagaaaattttagctagtactaaatttttaaaagctaaaaatatatataaaaacctccccacatgaggaagatgagagatcctatttcattcatttacttccaacttattctaaaaagaaaaaaaaagtatatacgaaagacataaataaaacacaattgacatgggaatttataacatactatatattaacttacaattataatttataaatttctaaatgattttcggttaacatataagtactgcgcctaattaaaaccatatatatatatgcattatatatatatatatacaaaccatatatatatatgcattatatatatatatatatatacattcatgtaaaaagaaagaagcagtagttgtgatgatgaacaaacctacggcatggactgtgttgagctgcatcatcatcagaattatggaagccacaagaagaaatatgccagccatgaaaccaacaaaatgaaccatactcacatatacttaattatttataatctttcacttatttattaatagcaacacaacttcatgaattcttgcatgcatcatgagattatatatatacatacatgtacgcgtggtatggtactgttgctatagtatttaatgacagaaagaaaattatatatattattatgataaa

SEQ ID NO: 49220 - DNA, 1131 bp, Cannabis sativa
  modified_base (691)..(691): a, c, t, g, unknown or other
tttaaaatttcgtaaaaccgtatgtttgttgtttttttgttatttttgtgcatttgtgaaattaacccaaaataaaaccttaataaagaaatcctaaaaaattattatcattattttttgataaattctaaaaaattattatttattctagttagctctgtttacattacacttcagaaaacaatgaaaaaagaaaatatcaatacaatacttaactaactgacatgttacaaattttaactaataaaatccaaaacaggggagaaagagagagacagaaagattgctatagcatttctcttaagaaatgatcaaaattattctctctaaacaattcattcaaaaattaatatttggaccctttatttgttcttaacaaattttcaccttaaaatttgacaaaacataatggctaattaggatttttttccctccgaagtttgacatgtaccaaatcatgcccttgaacttttttgactgttaaaaattctccctaaactattgagattattagatttaaagacttttgtctaaaccatgctctccaaactttaatatctaccaaattatgtccctcaaactatgatatgtactaaatcatgccatttgaacttttatccatgaattttttttttactaaaattagataaaaatctttaaatctaacaatctcaatagttcagggggaatntttaacggccaaaaaatttcaaggagcatgatttcgtacatatcaaagttcggaggaaaaattactaattaaccatatttaaatgtaccaacaatgtcttgcctaagaatcatatcttctcttactctctactgttttttcaacaaaagaatcatcgcaacatttccatacagctacaacagaacaagtaaaaacatttgtgtagtaagtaaagaatgtttttgttttattatttgtgtttagcaaaatgttaaccctcagccaactcctttaggagagtaacaacatcatctgatgatgcgagtagatacctagcactagaacgctttcttccaacagaacaagagaagtaattctcacctttgagatcaagaacagatgatccctcgtgtagagacatcttgtcgcgccatgttggcttacaaggattcgcaccacta

SEQ ID NO: 49221 - DNA, 3191 bp, Cannabis sativa
cataaattttcagggtcggccctgcaaccatcgtttgattgtgtaagtaatagtgtaagaagtatgttggtaattaaaagcacataaaaggtataagcgttgtccacaccttatggagatatttttgtaaataaagtgtcaatttatattttccatataataattctaaaaataaactatttttatatttttataatgaaggacaaaaaataataactcatttgattgcaccgctgttatccaatttttttgcattatgatgtggcagtatgtactagtgacacatgtcgattattctttacacttggctagagaaatattccgaacaaacttcaagcaatacctctgcacacacaaagtctacttgatcgagtagaggaaagggcagatgatccgagcaaagagtgaagttacctctccgagccgtgtatcaagacttaactacttcagagctgatgtcgtgaagcacaaaagcaatccctacaatcatgggattgtatcaaagggatacaacaagctgtcccaatcccccacttcatgtattctaaatatgtaatatatgttcttaccaattatagatattgtaagcaaaagggaaaccttccctcatgcatttagccctataaatagtgacctagcttcactgtaacaggtcgaaagaattgctttagaaagagatctaagagaaaatactcagagatttcactgtgagagctttgagagaggaaacactctgttctttgttctcaagtcaatacaatctaaggggagtaggctattactgaactaaaggggctcaacttctttaaaatcttgtgttctttattttttactaatttttgctctgtcttaattacacttctaatcacttattaattgactcactgtcattggctaaaagcaaggtcaacactttgccacgtgtcttcatcccaataaatgagggatattagtatttaaactttctgatacgaaatgatcctttattcatttccctctcattttcattttcctcttctttctcccttctgaattttgaattctcaaaaaaatagtttgcatttttctgagttttcgaaggattttgaagctgttgatatccacaaaatcatttgaagagagattgtacttcaaggttagctgactagaacttctataactatttttctttctctgagaatttatgcgtattctttgcttttaggggtagaaaatgcatgagataataggatttgttatttgtcttttgacaaaatacctatttttttgggaaatatatacctgaaacttgagtaatcacgagtttaaggaagaacactttgagtgcttgcatacttctccctgagtacttcgagtactcgtgagtttttgacgagtatcttgaatgttggcgtatatttctgaatattcgaatacccagaaataactctatcagaccaataccaagcctttaaaccctctcttttgctagaatttaatgattctgagggttttttagcttttaatgtgtgcttttgttatggaaactatctgagtctttaaaatggtgggtgtgtcacagtaacttaatgctcatgcaaccttcgcatgttccttgggtcactgtgaaacacctagccatttgagacatgcggttagttttcatttttcttgctttgtaattgcttattgggactaactaggttctttgaaatggtaggtgtgtcccattaactcaatgttcatgcatggaatgcatgacccttgggatattgagatacccccagccgttttttgaggtacacagttagttttaactttgcgacttactttttgcaaggattgagtatattctcgaaatggtgggtgtgttttagtaccttaattctcatgtagcgatatgaccattatgttactgagatacacccaacaatttcttgagatttctggtcagttctcttattttttttctatttctgaactttgtgcgggtgagggcactttgttagtttcgcactttcaccacactgaaaagatcttctatctttcaaatgagtgacttgtcggatagctagatgcttgattctagaggagggacctttgctgatgagcttgaaagaagcaacaacttcatatccacctcgatatctgaggataaagccccaactacaaggatctgccagggctagctatctactaatgagatagataggatggttcaagaacttgttgagccagtgacgatcaaattacgtgatagtgagtccacggggtcagcccagaactatctcattcactcgagacatacccctgacaccgaggttgaagaaatgggagaggacttcgaggtacctaatcataattctaaggaagagagggaggatgaaggaaacaagacggattcagtcgataatacccaactaaacgaacaattttcatgcaaggatctggtctcgcaagttacgaaattagacctgcacggctgaatttaattcgcatatggagcttaagaccttcggcatcccagtgacctcaccttcccttcaaaaatcctgcgatcatccctacacgagatgtagtggtctcaattcctatcctgtgatgtggggtgacacttccttttcacccttttgtgaaggccatccttagacattatgatgtccctcccttctaactaactctaaatagttatcgcataatactaggattttctgtgatgtacatggagtatgttcaaggggaaccaatgatagaggacttcagctatttttatgacatgaagagcgtcagccatgataatggtttttattgctttagtaaatgggctaactctaaaattaacggggtagaaggtacggtttccaatatgagagattggaaatccaaatgcttctatgagtttaaagtgccaggagttagaactgacttcaatcgacgacctagtacgtcgcatatcctgacacttagcatatatttttattactttgtatcgttgctaatgtttgcttttatttattccagatagaccggctcgacctgtactggaccctgcccttagggagatcgctgaagttttaggtggcttgcttgttcaagatcgcgattggtgactgctgtgcacaactgtaaaattatgagaacacaaactcatccctaagaatgccagtcttcagcgagaacaagtatataaggagccttctgagaaacaaaag

SEQ ID NO: 49222 - DNA, 857 bp, Cannabis sativa
aatctcatcaacctgcaaaattaattccaataagataagaagaacattaccaggagcaacaaaatattgatacttagccagaatctcatttcaatgaggcaatagagagtttttacactaaaaacagcaaattatagaaaccttatttagttttttttccaatttttcacttttcaaaaattgattgctaacctgtaacacataacgccctggaagatcaacaagatgaagagaatggacattttcaggaagcaaaccaccaccaaattgattcatatcagaaaccaagaaccgctcaaaacaaagcttggctttcacatcaacattgaggccttcaaagcccggtacagaccgttcaagtccctgaacacaagcatcaagccattctctcttcagccttaatccaagcccttgaagaaagtcaccaacggggcaaccgaatgtactaggatgaggcatgtggtgatcagaatgtggcgctggcggtggtggaggaggaggtgaaggaggtgagaggttgtcagagacgtctatgaactcctcatcatcatctgaaacttcaacaaaatcaccatcatcggatatttcaaggggtgaaacatgagcctcattattagtagtaggactaggacttgaagggagagaagaaggttgttcggggtgggtttgggattgggtctggggttgcggttgattgttattgttctctccttcatcttcatccgaatagtaaactagcctacgtcttcccattttggtgtatcacactcagactgaatcagagtttagttccctcaaaacttaaaaggctttcaaaaaatttggggtgaagagtgaaagacaagcacaaaccaaaa

SEQ ID NO: 49223 - DNA, 4561 bp, Cannabis sativa
aataaaacttgtatttttttcagggtttgcctctatcccgtgttgacttactatgaatccctgaaattttcctgatttaacaccaaaagtgtatttttttggaattaagtttcatcccataccttcggactacctcaaagcatttttgaggtcgtctgcatggcccatgttgttttagatttgaccaacatgtcgtctacgtatacaacccaaaatggctggccaatccggttatgatacctaaaccaaacgaaacatggcaagtctgcatcgacttcaccgatctcaacaaagcttgcccaaaggattgcttcctgctgcctagaattgatcaaatggtagataccacttcaggttttgagctactatattttatggatgcttactctgggtacaatcagattaaaatacatgtttttgacaaagagtgtaccagcttcaggaccgacaagggggtttactgttatctggtcatgcccttcgaattgaaaaatgtcggagcaacctatcagcgcatggtcaactggatgttcaagggtctcctaggacaaaacatggaggtatacaacatgttggtcaaatctaaaacatacatacatcctaaatgtcaacccagatttgccttcggtgcaacaaaagagacgtccactagacccggtaaaggctgacaccctagtggacgtctcttttgttacaccgaaggcaaatctgggttgacatttaggacatgggtgatcacgtggggacttattccggtcatgtccccatggcactaagaaaatatgtccgtagatgcctttatggtgtctatgattttactccactcctccggttctaggcttttccctagacgaacaactttagatgggtcgaggtcacacaccctcacttcctcaatatcctccatgggttctaacgccgcttcagaactaatacgagggtccaactcgtcctgttcttctaccaaaattggtccaatcccctgtatcgtcaggaccgaaaaatgtaatgcggtgttataacaatgtcttgattctgcttgattccccctcactgtccctactcctgtctcccaggtaggaaatttgaggcacaagtgtcgtatggatgtaatagctcaaaagttaaccaaggccggcctaccaagaatggcgttgtaggcagtgttacagtccaccactagaatggtgcaatatttgaacgagttttggggggtgtcaggacccaaggtaatcgggagcctaacctttcccatagggatgagggttgtctcgttgaatcctatgagttgcaaactgctaggggagaggtctcggtcagtgagcccgatggccgcgaaagtgtccttgaatagcaagtttacggagcttccattgttcactaatatcgtggccacgaccttatttgcaataggattttcgatgaacagagggtcatgatgtggaaagcgcactggccttgcatcttcctcagtaagggtaatgggttgatccatgagcctaggcctttgagctgaaagttgagtaactttccatatctcattatcgtgttttagggccccagcataatgctttagctcatttctagtggtccctccaatatgagggcctctagagatcatagcaactctctgttagtttgatgtggtagtctgaatgcttgttgaaggggcatccctccaggaggtacctgatcctccggtgctatcgcggttcctccctgagacactgggcctccgatttggactggatttaagtgtggcaacctatttttgatccattcatataagtggaccaatcggattaagctttcaatttcatcttttaaatttttgcactcgttcatggtatgaccaatatcattgtgatagtcacaccttttgttggggtcccgtcaagagttgtccctgtacaaaggaggaagttttcggtaatgcgtatttttctgggtggcaaaatatacacgtttctgagagtctatgagctaggtgtattgcttatattggggcgtataccctctcctttgtcttttatatttagatcgtacactacctttagaagacctcttactttgggaactttgatgtgctccgaccatgctggtggctggtgcaaattgagtcggaagttgaacgcttaccccagggggattgcttacggggccccctagtttggattcggtgtggaatttgtgtgggttctctttcttaaaacttggagagctttaggtactaatttgatcttcttttcttgcttgaattttcttgattttgagcttgcttatgatgttataggtgctcttgaatttgttgttgcatgttgttgtaattgagaaaatttttggtgattatggtatattttgttattaggttcatgctagaatcatcttggtgtttatggaggtctttggtttagttgttgatgttaaaattctgggaaaaatactttgaatttatgggttatgctttaaagctttgagtgtcaaagcttgtggatttatgtacaatattaattttggtgtagcatgcttaatgtatattttggttttgatcttgagttatgtgttgtgctcaattcgatacaaatgttaaattaggttggtattgattaaaagtttagtttgtgcataattattgcatgtattttggtgcataaatgcttggaaacacctcaatttgatttggaagcttgttgtcaagttatggtattgtagtgttgagtttggtgtattttcgggtacctatatatgagtttttctgggtttttaaccctagaaccgtgagccggttcttgagtgtcgcaggccgatatgggttcagtaaggctgaatgttttaaaacttgttttggccataactttaagtccaaactccgttttggacattcttagtatcattggaaagcttgttttggactctatgtgttaatttatagttggaattcgaattatgtatatgggtgaatttggaattaaccttatttgtgaaatcttgagaatgtatgactaggattaccggcgcttgctcaggaacacctgatggtttggaatctccacatacttagattaccaggtaagacagtgagttaggacatagagattagtgcagtggcacccatgtatattatttagtatattatgcagaaaaccgagactatggttcttactctaggtttagttattttgtggtctagggttattactctagaatgtatgtgaatgtgaatacaataatctattatatatgttgatataaagtgttatgcggttaagatataacaaggttagactcggtatcctaaactgagataaaccattataaggccttattgtaaatagacgtgtgagtgtaacatgtaggtctatgtcaaatagataatagatgcagtggcatcaacacttaagtgattttaattgatattcatattgttgtttatattgtcttgttgggccttggcccatgggtgctctattgtgcatgaaaggataaattagttgttgatcaaccatgaggtcgagggcttttgtggtgtattgtacatgttcaggccaagctagaccacgagagttgtgtctactagggaaaaaagttgtaatctccccttttgccgcttaggtcggtgtgtataaatgacttgtaatattttgaaaaaaaaattcacgggatcccaaaataaaatgtgaacttttggatgttttgtaaagtttattaattacaagttattatttttaatctgtatttttaaagtttaatttttgctcttggctctagtagattccggtttagcgggattagtatatgattagtcgcagtatgtggcattcttattgttagggcattacagatgaggtatgtcctatttgcaattctcatttagaaactactcaccatgctttatgggggtgtctgtctttggctcagtgtcttaaactctgtgatatatccttgggggattctcttgctatttatcatgctttttatgatttcattcataagtttctcgatcatttaactgtggcctctttagagttgattttggtcatcatgtggcgaatttggtttaggaagaataaaaaggtacataaggataaggtaattgttcctgatattgttatttcttggggtcatggtttccttgttgattactagcagttagagaaaggtcctagtgtagtgagtctcactcggttgggaccttgatttcatctctaattagttctcctagttttgcttgggtgccacctaaaagggtgattttatagatcaatgttgatgctgctcttgactcttctaataatagatgtggtttggggtggttcgtcactcaactggtgaggttaaggttcccgttgtttggcactgtagaaaatagtgaattgaattgtatgtatatttcatagaatagtatatatttatatacagagctagaagactaaatgggaaactactaattacgaaataggaaacaactagatacaagttactttaatttttttacaattaatatacaactaatattctaacactccccctcaagctagagcatagatgttaatcatgccca

SEQ ID NO: 49224 - DNA, 1401 bp, Cannabis sativa
aaccatgcaacataaaaatgatttctgatctttattaattagtaaatctgattctattgaaatggattttatatagggcacaaaacttaatagagcaacccatggccgactagggtgaggagactttggccaatccagatagtgaatctgaagtcgagcatgctgaatcttctgtcgggccaactactttcaagagacagtataagacttacattatgatcttgggcaatcccttgggctcttattgttggaacttatttcaccaggatctagatttactaacatgtatgtttgattagaaatctataatctaatatcctaaatatgaattccctaaaacaataaaataaacacataaaagattaataaattcttacaatgatggcaacagaataatatgactccttccattcagatctttagcccttgattcctatttgtagccgagcattgtcaaagatctgaacctggatcttctccttcaattaacagtttgaactacacaaccttcctcactatgctaggtattgctttgacatgtgggcatattctcaatcactataggcttcaaaattattgagaagaagaagaagggattcgaaaatagaagaggctctctttattttctaattttttctaacaaagagtcaattaggttatgaaaataacatctatatgtttttatttatatgatattcattagagttaggtttataatttagatagaataaaaaaaaaagataaaagaggctttatttaaacccgtatggtcgaatcccttagtgggcatattgggttttgttaatggtttgaactcgttaacgatataattcaatttttttaactaatacttgacaaaaaaacttaacagaaaacttaactcaaagaacgtttagaatatttggaattaagatcacataaatctagtgctactgttttattgccctcagaaaattcaaaaaatcttccccctacaataaacttaagggttctatttatagtgagtccctctccctttgcaatcccagcagatcccaatacactctatgtcaagtcacttttatctatgacaatactgtatcccaagtgacctgacacatctggaatcttaaattacacgaaaaatgcccctatcattttgtacctcacacgaactgaagtttgtccccattatttatactcattatgccgtcgttatccctgttgacatcttattaggcctgctggcatcaggaaggaaaggagaatagtcggagtgggcgagcaggtgcgggggagcaacgcgcgagcccatgctctgttttgaatttattaaaagaacatttggaagtagctgatactacatatttctatctagacccagtgatcaagaatttaggccttatatgtgtcctgtttaag

SEQ ID NO: 49225 - DNA, 1011 bp, Cannabis sativa
atttcagaattcaataataacagcataaataattatttaaatatctataaacaattttcataattaaacataattacctgctaatttccaaattaaactaagcggtctttacattaagttacatcattgctgaggtttcaagccttggtaagcttcctagaacatcttgttatggtttctttagttttaagttactttcctttgcgtgattatgtgaaataggtttctgtcatttaagaattattggattctgtgttttgaggatttattatggttgtttgagatggtttgaagttagttaggagcttggcttggttgtaagacaacgtttgagtttggaactcaaacattggtcttaaatagtatttttagcttaaaaggttgtttctcaattttattacttgaattctctctattatgatcctattaggcgatctaaaagtttgtaggaagtttggggtcattttgagggtatggggaagtttttcgtatttcctgcactaaaccggaattccaattcagggggacttgtacgaaccagtagatcgattggtccccaggaaaccccacaaaataagaattttgattggggaaccggtctactagtttgggcattttagggaaccctagtttttcccattttttcaatatttaggttattgccatgttattcatcgattgggaaacttttagtttcaattttatgtccctgaaaagtgatttagcatgccactgatcagttttacgaattatgtgatttagggtcctgtaattcgtcgagcagttgttccactcgggttgactagcatacctgaattcagaaataggtaagattggtataaagatacgcatatgtgcttacatgtttagcgtatatgtttattaagcctattagattacatcgataggagcatcagtataagtagagttatactggatactgatagatgcatatttggctcaaatactgatcgacactatcacattagtacagctagagtatgactagcg

SEQ ID NO: 49226 - DNA, 754 bp, Cannabis sativa
gtttcttgcaaaatattgtaaacacatcaaacacacttttagaggctaatagattgactcgtgaactaagattaattaacacttaaactatgtaaaaatttccatctcattaacacctaaaaaggcaagattgatcaaccatgagttggagggcatgaaagtaaagtatgttttggtttgctcaatcttcggaggttgagttagcggaatgataaagtttataatactattttgatgtataaagtaatcttttgagcataaaattatagttacacaattagatttagttttaaacggggatccccaacatgttgtaaatgtttaaaagttaaggttttatataaccttctattttatgtaagttttaatttataaccacaattttagagtctaatctcgagcttattaatataaactatttgtaaaagcaacttgacattcctaggtaaataggttgttacatcataacaacaaccttagccaactcaaaataatccaacaagtagtatttaaaggtagacccaataaatattgcaaataagatattaatataatgtatggaaaatacgttcacatttattcatatagttaaatttatccaactcccttattgcaataatgaagatacaatacacatatattttatttttttgaaagatacaatataaatatatttgaatatgaacaacaagaactctaggacttactaacttctcctaaatctttggttggaaagaaacagagtgcttgacat

SEQ ID NO: 49227 - DNA, 2204 bp, Cannabis sativa
agtctactgctagtggtaaattccgatggtttgcagctttaggtccaccaaacaccgatgatgaaaaagaaattaaaaatcaatctgagcgcataggcctaaatgacattgacaatagcgctagctgtatgggcacacaacttgttgatgaattttttagaagctaaacaaaaacttctataacaagtacagaggaaaatgctaaaagataaaaatcagaacaaagaatgttgaattgccgcttggacacaagtagctaaaataagagttgagacaactttagccaaagctgaaaaaaataatgatgcaattgaagggagaagtagagatgatgagtttttagtcacaaaatgtatgcaagtacttaaggaatggaaggagtaagtgatgatgcctacatgaaagctgtagaattctgtttggagagagacacttattaatatgtctactcttttagcttggctagataaattagtttaataattcatgttaggatatttgataatggtgttgagttctacttttatgtgtcattgacattattataatatattatactaagataatttagtaaagatttgttataaacatcatatataattttttcctcgtttttctaagtaaattatgtatgtcaatataatttatacatgactaatgaaatggatgactctagctcgtctttttctttagaaagcgatttcgatgaattcatagatatcttaatgttatactttttaaatgattacaataagacatttaatgaaaaagaacctcaaagaacatctgtgttaagtggtaaagattttgtgaaagagctattagacggtcacgagaaaacatgttatgaattattgcggacagataaaaatgagtttattgagttgtgtacatttctaaaatagaaacagtacattaaggacacgcgagagagattgaagttgaagaggcaatgactatatcattcttgtaatttttgggtaaaatatgaacatgagatttataattgcctgattttaacattcacttgaaagtattgataggcacttaaattcaacattaaaggaactatgtaaattaagaaaggatatcatttgcccaactcaaactcctcttcctttacatattattaattcttcagaatattatccatagttctaggtaattaactaaattcatcataatatatcttcacattatcttatataatttgggtataaacatttatcagtagtaaatgattttgtgttgtgagaattgtattagtgcaattaatggaacacatgtgaatgcatgtgtccctaaggataagcaagtcatgctacagtgatcggaatggtgtagtaacacaaaatgtcttgtgtgcttgtaatttttacatattttttatttttgtatctgccagttgggaaggtactgcaaatgattccatggtatttatatataaaattacaaaaactgaatataagttttcattgtccaaagaaggttttgaaagcttaatattatttttttttatattatgtgatgatgcatatactaattattatttttggcatattaagtgaatattatgttatggattttagattctcatgtacaaaacgttttcttcaatcatatcgtggcaaaatatatcacttgaaagaatataataatagaggtaatcgaccatgtggtatgaatgaactgttcaactataggcattctagaaatgtaattgagcgacgttttagtgagttgacagtacgttttcctataatgaagaagatgccacattacaaattgagtcgacaaactatgatagttattgcttgttgtgcttttcataattttattcgttaacaaacacatcatgattgtatgtttagagaatgggaagaaaagaatttgaggagaggacaacacagaaggagttagcaccagtgtatcaagatctgaagtgaatttatctaattaatttgctgtagtaatggcacgttgtcgggatcgtactgctcaagctatgtggattgcttatacaaacatgaattactatatttcaatatgggagaataattttagaattaaaagtatcgttttaaacacattgtacttcatgacaattttagattagatatcattttttgtaaaaaaaaaaaaaacactatacaaatgttcatttttttgtgtaagaagatatttattcctttagttatataaaa

SEQ ID NO: 49228 - DNA, 649 bp, Cannabis sativa
gttgtaaaagtatgaaagaacttcgagttacagtcaccaagagtcacccaaagttctcttgatttttgcttccatattctttctaacttctgttccatatcaagaatttcaagctgaacctccgcttcctcttcacaggccgacacattgtcttgattttggagaaagcttaacttgtcatggagccttttgagttggatatcacagaacccaaaaacatttctattccattccttaagggccatcttcgtgtccataagcttcctgcaaacccggtaactcgactgtccataacacagtttgtcccaggacttctttataatttctccataattaggatcggacgtccacacctccaagaaacggaatggatattttagcttttggaccctaggctgcatatccatgaccaagggggcatgatcagacgtaaggatacgatgatgaagaatagtagccttaggaaaaagtaggcaccagtctgcacaagcaacttctctgtccaacctttttcttactgcattatgggatcccctcgacttcatccaagtaaattttggtccgataaaccccaggtctattcccccagttttggaaaggaagttttgaagatacattccttcacgactatgatatactcacccccccc

SEQ ID NO: 49229 - DNA, 1756 bp, Cannabis sativa
tttttttacatttttatagaattccacacataatccactatagcaacgcaacttaaatcgcaacccacgtagaaactacttgagaaactaccggagcaacccaaattaaaataaaaagttaaacaataatatacgaaacaattttctattatttattgtcaaaattatagtaatatggtaaataatattttataataattcatgaattataataattgatacaataagtaaagtaatagaatttattgtaagttaaatttagtacaatatatatttttttttttgaatcagataatttgtattgcttaaaacaaatagatttacaacttaatcaacgcttacaaggcctgcataatagcctaattacaaatataaagaattaaaccaatctctctcttctatggtactttttgtatctagtaagtcattgattctttgtttcacattcattttcacttgttgaacaaacctttgcactgtttgcattttaccattttaaaaacaatcatttctattacttcgtatttgataaatcagagtagccatcgctgctgcaaaaaattttctcctgaaattggtgcttttggctcgagagatctatttgagcatggctgcggtttgttcgaaccatgccatctcaatcatgtttttttctcttgcaaagacatgctgttgaaagaacactcaaagaagatatgttctgttgtttcaaggtcagtaccacataataagcaattgccttcttgacaaacttgaaacttcagcaaccggctttgaagcctattttgtacagccagccacattataaaactatgtttatgtatattatatctattccaaatttttctatgccatgaaacacgatttagcacaatattatatcttgtgtcatattcctacatttgatacatttttagaaaattattagagtgattttatttacttattaataattaaatttgctaaaattaaaaataaatgttattatttagcactccattaaatattactataccactattgataaaatatacaacatagtgagttttggggttcgtttggtatgtcgtattacattgtattgaatcgtattgtataatattatattgaattgtattttatgcaatatttttatgtaaaattttgtgtggtattgacttttattggtacctaaatatataatattttaatttaaattaaaatttaatatagtattatataaaaatatgatataaaatctaatttaatataatacaatataatacgatataatacaacgtactaaacgaactattgtgttattccaaatgatcaagatagaataatgctctagtcatattcaaacttgaacacaagtgagctaaactagtatttagttggagaattttcattttaatggtttttttggcaaagttttaaaaaatatgacttatattcgaaaaaattattttgtgaggaaaatttaaaaaattaaaaaatatggcaaaaacagtttatgataactagtaactaaaggggtgatcagttacctaactccttaggtaactagttacttttatactatgtttatcatattttctgtttttgttttgaatttttctcataaaatatatgttttttaaattgtattaaaacccataaaaatgtgtatttttaactatacgactcaatctcaagcatggccgattctagacaaatgggctaagtgtagaatgtgtgtctttgttggtgactttgaattgggctcttgcttttg

SEQ ID NO: 49230 - DNA, 923 bp, Cannabis sativa
aaagtattaatgattaaacatcttacaacatataaaagaagagaggaaaaacaaatagtgaaataatagaaagtacacctgaatagcagagatacttatggccccatcaataactccagaccgaaatcccaaaccctgaaacaagatccaatccagtactttgtcattctacaagttaataaaacaaaaatccatcttttttataaatgttatttcggttcttcataaagcttactgtattacaatatggaaaatgtgagaagacaatgagcatcatcttatagggtgggaaaggaattacctcacccatgtcagcaagtaatacatcaccttcaacctccctctccaacgcaacatctataatgtagaacaagattagagaagtatataatcattaaaattaaaatcaaaataactgagaatatatacttcaacatactaagcattgggtcagagatatctaaaccgatccactggtgaccattatctgttagtgtctctccactgagtcctgacccgcaacctgaaattaaaacccatatgtgtatgctctacttcaagttggaatctcaaagtggatgcagaaatctgaaaatcaaattaaagacattaattcaaaagaagtaaagggttgtgtaccaatgtccagaagcaacctgggaactccatctttgggcaaggcaagaatctcgagagccctctccgtgagctctgattggattttgatgattcgagaagaggaggtatacttcctggcttcatcatcatcatagaatatctcaggtggcgcttggagttcaggccgagatgacatattgtttagggatgagcaaagaacaagggtttaagcagctgtgaaggcaatgaggtgagaaaaggaattcgtcagtcagaatagagtatgaaaaaaataatattagcca

SEQ ID NO: 49231 - DNA, 1358 bp, Cannabis sativa
aatatgtaggaattttaatattttcatgcaacctatgtataaatatatatatataaaattatcatattactaatttatttttctttaggcatataatatattaagaatattgttgatgtgtatggtaagaagtatgataatgtatgatatttatcttaaaattaattaacaataagaaagatagatcacgatcctagttgtttgggcttttaaaagttgcttttggacttcctgaaactccaaaaacacttctgttactagttatgtaaccagtaaattttaatttttaaatctaaaaaacccttttaacataaactaattttagtagctttctttaaaaaaaagcttcctgagaagctaaaagcaaaatgtagaaacttaatcaaacaaaatccatatatcttatatatggtatacattacacgagagactctttcacaaaaaaataagattaagcgtgtataaaaaaaaaactaaaagataagtacactcgattttttatgggtgtttgtttgattcttattttgaatataataaattattttaaatttttcaaaattttatagtaagtactgaccagcttactagagaagcgaggatgtttgatcagagtttgggtgagaccagtcttgatgataatgggatcaacttttgttttgaagcctatgattgcaattatataactattgtatttctgagaatgaaatatacgtgttgctggactcaactccatttttacaccctccatatatattgtaatatacctttctctctttctttcttttatctaaaaaataataaacgatatatctatcaacttataatgatctatctaggctaataatactatatatgtatgtatgtatatatatatacacattaattaagtaatgaagtttcttagaagattcataggaagcttcaaaatttggttttttgtttacatattaatccatgcatgcatagtacatatatcaatacactcaaatcatgtccatatatagttaattttcatttgtaatatattatgggtctttgtcttttatgagggtactacgtatatatattcaagctttaaaagggtttcatttcaaaacatttacaccaaatatggaaatttggaatttttgttcttttcccaactttagatgacaattaattaatgatggaattaacatcttaagcattttaaaccacatctaataactagcattattctaatcaatttttgttcaattatattataaatttatttaataaatgtatctttcattaatcatagcaaagtgctcaataaaataaacaataaatcaaaacataaacattaatagttatacaatcaactaaaactcgagaat

SEQ ID NO: 49232 - DNA, 1348 bp, Cannabis sativa
tagtattgactatttttcaacgtcaacattttccaatcaccatccatatttttagtataatgttatattataagtagtacattttacaaattttttgaaatatgttatgaataatgtaatagcatgtatgtacatgctcccttatttgtgttggcatgaaatgaaacaatagtaaaattgtcttttagtgcatgctatatatatatatataaatatatgaatgtctctttgatttggaacaatttaaaagtatgtatcctaactaggtatcaaaatactattcaatttattactttgtcttttagtgaatgggttcgttatggcataagaatatttgatgtacactttgtactactactactttaattcattcataaaacatattattattattatattattattatagttcatgaatctcatttaaaaaaaaaaaaactcaactcaaaaacgaaaattttatcaaatttgaccttataatattttatatgcattattagagattttattattgaatattgatccttgtcttgcttacgtatataaggagcctatatattcaatcaattgtgacatataatagtaaaaatttatagtatgatttaataattggcaagctatctagttgatcttcatgcatccaaaatataaattaaatgaatgaccatttaaggataaatattattttggtcttgtattttacgaaaattatattaattgaattatctattttgttaaatgataaaataaatcatatattttttgattttttgtcaaaataaaacttaataataacctgatctataagtgttatgacgaaacttattatatttttttgcatctgttcgtgttagttatattaaaacaaaaaaattgtcgaaagttgaactcaaggtcctatttatatcaatttacaaaatacataatctattttattatataacaaaacaaagggtctaatctataacttttataaaatataaggtctaaaataatatattttaccttataattaattaattaaacattatattataattgcgtaatatgattgacattgaccactatattatatatatatatatatattgcagcaagatattttccaagataataattattattatataatgaacaaaaaacatgattgaacaaattttaaaaactactcctaatatgactagaaacaaaaagttaaggattgatttgtaaaaagttttaagtttcattgcatcaaaaaactttattttctcatatttggtttgttgtcgaaatttaaaataattaaataaaaaaagaaatcaaactaacatatgtagccatggtttaaacacaagagcatacagaa

SEQ ID NO: 49233 - DNA, 2616 bp, Cannabis sativa
tttatttatatatatagatagataaatagattagtatattttataataattattaaattaaattaagtaaattttaatatttaattataccaactatacttataccgttagtaccttttcacatcaatatatccattaatgaataaaaaaacatgaatgattagagatagtagcatggctttaacaatcgaatattcagttgtgacatattggcatatccttagcctggtcccaccatcactacggttgactattccaactgcaaaaatctgccaacatttgcttacaacttctcaaaatgtttttattataataaggttcataaaaataaaatgttattagaaaagaacattatatcaagttttttttgggcattaatcttgcatctttacaataatctcaaaacacattgaataatcaatttatagttatactattggatttcgagtattattttcatatcatcaatatcccattttcatattcattcaagtttatcccttttcattagtttggctccgattttaaacattacttctccatttcaatgaagaagaaggaaatagaaaaatcaactcctatttttacatgaaaatataaattaatattttatttataaaaatacattcataaagtgtgggcaatatttttgtttttaatgagctttttattaccaaaatatcacttacacacatcacctcaaattgcataatatttttcttttttttttcttattaatttcttttttatttttagtttctattttagttttcagtttctcttcccttttcttttttaatttttcgttcaaaaaactcattctttcacacgatcaaaacctacgatcatacccattttaagcaataaccatctctaaattcttcatccaactgtctccattttcattcattttttttttttgtatcttacaactgtctccaaggacgttggtgatgttaagggcaaacaagttgatttaaaaggtgataattttttcaaaggcttaattgatgatgatcaagctgttttagttggttttgagactgttgaaaaaataaaggtatggttcttattgaaattttatttttttgagattatgggtctgagtagttgtttcatagttgcttatatgtttaattcaagttgtaaaattgttagattaaaaactttttatctttccttttctttaggttcttgcttcccttcctgatgaggaagttgaaaaaatagatgctagtatttttaaagaacaagaggatgacactcttccttgtactcctctattggataatagaaagcgtgccccaacattgaaatctccttttgttgatttagttcgtctgattcgaagacctctttattggagtttatgtcttgagattctcaatctgcagattgttacatacgtcaagggcctttaagttgttgatgatttttttttttgatcccattagcttgaggcaaagtttgacgaataaattggcaaatgattgcttaaatatcctaggtgatgttttgtttattctgtttatgcattgttttgtttttttatttatttatgtttattaataaaattgagttttgttcatatattttttttattatttttaggccctttaatgtctatgaggatagtgcccaaaaaatatctcctagtttcagattgggtgtggactatgttgaagataaaacttggtttatcatctttcttgctacgacatgtttattaacgattctataatatctttaaatccatttgtacattttttattttttatatagttgtttgttgattgtttttcagttttacatttattttgaggatcttggaatgtgtattcatgttctcactattttttttttaatttgtattgttttagcatatgaatactattttctattatcttagaaagaaagaaaaatattcttctattataattgagaattttgctgcaacagactgcctttttgatgattctatgcagtctctttaccaaaaattctgcaatgcgaagtcattaaaaagcaagatgtctcatattcatgttgctcacccaatagcccatttatatcaaaggtttgagaattcctagttctaagccttggtatgaagttgaccatgttttgtttattgtaaatcttaggaaagaaagtcattgggtgtttggccgttttgatttgaacgagagaattatatttctttataattccttgaggactgccaagatgaatgttgcagcaagaaatgcaatgaaggcgcattctgttatactctcattattctttgatcttcttaggttttgaaagaataagtctactattcctgattcgggttttgatgtgaaagctccactaagagtggtggagattgcaagtcttccaggtcagtagaaaaagtgagttatttttgtgttgttcctttttggttgcttttatgctgcttaatagttgattaactatacatgtatgcgaaagcttcttaatttaaacaccaaatctgttatgaacttataatgaacttttttaaatatattgtatttctcatacaacttaaaaaaatattattcaacttttaagaaaccaatatgttaagaaccttaataacaatgtattttt

SEQ ID NO: 49234 - DNA, 2125 bp, Cannabis sativa
gaatctccagcaaaaggtagccagactatggttcccgttgaaattcctctacacgggatgactctagaaaatgtcccagagtaacaagtagtcctacaaagaagggccacccaaactatctttcgtgaagatagctgagatctcagaatggatccatcagccctcatcactaggtctagtactagacgttgcaactataagccaaaacttggttcctaaggttagttgagtagtggctccttacactgcgaagatactggactgtgtgggcacaagcatgagcgagattaagtcaggaaagttggctgtgagcagtagtctagacccgtatgctctgtatgtggccaccaaacagcaggcagtaggagtaagttctaatctttaggtatcattagtgttgtcttttggttatgggggatcatctaactatatttgtgttatcccatatggccttatttgcgaaaaaggactgccaaggaagtgggaaatatgaccattaacttgggtcagctctgttctaggatcgaatctttgatagccaagaatggtgccatgtgtactaaggtagaatggcttaaaactcaagctgcacttgatatggagaaggcccaggacaagtgcgacaccatgtagactttaagggaaaaagaaattagtgccaagtactggacgttatatgaggaccacaaggtcgaagctaaaagaaagattcaatcaatagtggcgtctctttaagaagacctacggaaaactagggaaaatcttgaagtacggatgcaagggcagcatcgcaccctacttggtatgggcacccgaccaggcgcagaatccctctcttggactagttgcccggtgatttggagaagggaaaaagcattcaacatcgcccaggtatccatccgtctccaaactcctcaattgagactgggttacaatggacagaggagacacccttcgagctctaaaagcaccttgcctcctttgaggaaccgcctcgatgtacttctcagtgacgtaatcatcaccttcttccaagacgtcaccagcctcagacactggttcccctacctcattgtaacctccaaagcataaaggccgagcaactcctccctcctcggcctcagagggactatcaggacggacctcgccctgatcctctatttcttggacttcaacgtccccctcattatcctcctcctcaacagcaggccgggcttgtccagcgctcggcattgtggcataccgagtcacgtaagggtcagtcgcagcaatctttcgcatagtttattttgtgccagccatcatcctatctctagacggtggttggttggtatttcgcgcaacagtcacggcagaagtggcaatgggaatgccaaaggcaccaaaacatggacggcctacagggatcgtataaactaagtctggtcagacgatatatgtccagttggatgccaagtaatgtctccaccccttcttgagtttccaaatgaatcgcccgtagccttcacctgcgatctactcggaatagaagtggtgttgcaccttgggttccaaggaaggtgtctgtcacttgaggaggacggactagcgcaaagacaaggttggtcctcgtacaaaagttggagaagatcttagtcgatatgattttctcctcctcaaaactcaccagggttcatctacaaaagataagacacaagatgagtatttggccaggatatgaaacaaaaaaaagcaaaaaatacagactaagtccaatcaaaagattaaaaagaggagaattttgcgtgatttaggttcataacctagaatttcaaaacctcaaattaagggttaatcatcactaaaccgcgaatgggcaaagtgagaaccaaatatcgtgaagttaaagtcagaatggcacaacaatcaagttatttgatcaattacagtcgaagtttcatatttctgaacttagattctctacagttttcctagaaaaagtcaggactattgaattttctacgaaagaaacccagaaaattgaagattcaaacattaagggagaaaaagataagaaacttactcattgttcgaagctttgaggttgctcggatgacgttgttcgactccttctggaaattccaca

SEQ ID NO: 49235 - DNA, 890 bp, Cannabis sativa
  modified_base (330)..(330): a, c, t, g, unknown or other
aattcatatgtaattatcacctcatatccaaacacacattgcattttaaaatatagtgtaattactaaattatgtaattactaccctaataattattctacctagtaattattactactgttttggtaactgaaaaaaaaataataagaaattttttatattcatgtatattataattattttttaaaattttaaaaaatttaaaataatttataatataaaacataatatttaaaaaataaatttcgcatataaagtaaaagaattattacatgtgtttgtaatttgtttttttagtatgttaaatttttttaaatttttttaaaattntataaaatatcttaaataattaacacatctatctatgaccataacaaaaattaaactaaaatattcatactaaaataaatatgatgcgcatgaaaatttattttaaggatgcaccgtagaattttcgtatgtaataatctatactacatatacatgtgctgttcaaatttattataatttatttattttctgacttttgattggaccatgtgctccatacatataaatatgtagtcccttcctcactcaactacattaaactatagtaggcaattatattgggtttttgtgtttgttaatcaatccaattcaatgagaaacaatagaaccgttaagtattggatatctaattatgagcggatcgaattaaatgttatttttaaatatctaatagaatcgaatcagatagtaaataaggtgtttaaaaatccaatacattcaatatccaatcaaattaattagtatttttatttaatttgtatgagtaattagatttatattgttacatgtaaaatctatatgtatatgtgcaaattaacaataaaattttattatttttt

SEQ ID NO: 49236 - DNA, 1803 bp, Cannabis sativa
tacttaaatcgtttaaaaactacaaggtttcctttcttccaagacttgaactattaactaaacttttttttggtgtgtcagctttggatatcttacaagcctatggtttcaagctgatagagaagactgagtgattagaagattgaacgatccaagacttcccagttttaccatactctaatttgtaaatatttaatttacagtgaaccccacatggctaataccctcttgtaaatgttttacctctaattatttaaataaaagggtaatctgagagtattagcaaaatgatttgtgtgtatatttaatccacaccaaacctaatcatgtagtaaatatatattatatataaatatgtgcaagtgcagtacagggctcaagaaactttgttgagcatggtgttaggttgtcaccccactattttattcgagttatgaactttatttctttaatcataatacataataaataattgttttaggatcaatattatagtaactccttctgttctcactcttctcgccatacagaacagtagtattggtcgtttcaggaattttgtacatattgttttgtatggcaattttttcagatactggaggtaaaaagatattgtcaaagcttttcaaaattttatttacttgctaaaaggcttctccagaatagaccctgcactgcatatcccctggggtctgtaggctgatttgtttgacagtcattctatttgatgggtttctaaacataggctttgaccactcgtacactgaagggattcctcttgatctcgaagaaggattacaagaaaacctccaatgtatttttatattttcgaagaggatcaaaaatctctacattatttaaaaatatattattttattttatttttatattatttttgctacttttattctaaaatgattttgtatgattttttaaaattattaaaataatattatattattatttaacttactttataataaaaaaaaaataagaaagagaagatattttttttttttgatggaaaagagggtgctaaagcacccagtagattaacgaaccaaaacaaaaactacatcaaagtagcaaagctacaaacgttcaaggaatcaaaacagacaaagaaaacaagaacacaacaacagtaggaataaaagctactacagaaactaatacaaagcaaacaactactacaccattgccaaaccactccaactcagacacagtcagcaaagattacccagcatgttctctccattccacataatcgttcagcacgtttctgtcaaggctagcaagatggatgatccccacagtgccagtagaacaggcccactttgcgatattatgagccataaaattgcccgccctcggcacatggacaattttccactcattcagcgcgctgcagatactacggaatcgactgcgaagattggctaggttgaagtcagctgcacttttgaattctgccgaaaaggcattcaccacccttagattgtcactttggaaaatgaccttccccatttttctttccaccgagagatccgctgccatacaaacagcgtgcgcctcagcaacctttgggtctgaaatcagaagattttccgcttttatagttaagattgaccccttctcatcacgagccaccgtagcgatcacagacccatcattactcatagctacatcacagttacaacacatccaagagaccggaggggggctccaaacacaaacctcctccacatccccagtggctactagtctatgttcagagattcttcgattcagatggagaataag

SEQ ID NO: 49237 - DNA, 1510 bp, Cannabis sativa
cagtggattgaggttagattggattgggctctatgtactaaaaattggttagatctttttcctcttgctaaactgtataatttagagttttccacttccgatcattgtcccatttttcttgatttagtggttaacaacacttttgttatgaaaaagaaatttcgctttgagaattgttggctgagagaacctctttgtcatcaagtaattaaagattgctggaatttcagttctgacttcgatgttcaacaaaagattaaatattatggtgagttcttgcttatttggggtgaagcttactccggtgacttcaagaaaagattgaaggagtgcaaagctaaaattaacctctggaagcatggtagagatactatttctactaacaatttttgggcagccaaaactttatagaaatcctcactcaacgtgaagttttttggaggcaaagatcgaaacagttatggctccaggctggggataacaatagcaagttttttcatgcgtctgcatcagctagaagacggagcaacttgattattaagcttcaggattccaatggtgtttggacgagttgggatgatggtttggatcaggttatggttgagtacttcaatgatttgtttactgcctctggcactgcttctattgaggttatcaactgtatccaacctagtattactgctcttcagaatatttagttgctacgaccagttacagaggaggaagtgaagtttgctctcttccaaatgcaccccgataagtctcccggtcctgacgggatgactccaggcttctttcaaaaatgttggaatgttgttaagaatgatattgtcagacaagtgtaagattttttccttacgggctctcatccctaagaagaaacaaccagctgccatgggtgacctccgtcctatctcgctgtgtaatgttatttataaggtggtttcgaaggtttcggctaatcgtcttaaagtggttctccctattgtcatctcggatactcaaagcgcgtttcttcctggaagattgatctcagataatatccttgtttcgtttgagattatgcattatcttaaacgaaagacaaagggtaaaaatgacttcatggctcttaaattggatatgagtaaagcttatgatagacttgagtgggggtatctgcgggctgttctactgcgtatgggctttgatggaagatgggtgaatttgatcatccagtgtgtgtgcttggtttcctactctatagttcacgaaggacgtgagttgggtcctattgttccaggtcgtggggttacgcagggagatccgttatccccatatttatttattttgtgctcagaaggcttctccgctcttattcggcattatgagatgattggtttgattcatgggtgtagtgttgctagaggagctctgaaagtatcgcacatgcttttcgccgatgatagttatgtgtactgtaaagctaatgatagtgaggtctcacatgtgcttcggttgctgcaattgt

SEQ ID NO: 49238 - DNA, 1187 bp, Cannabis sativa
tgtatagagaagatgacaaaattggggtatatcgcccactctcagctgcgtgaagtgtaatagtacgcgccgttgttctcgcatcagctcacgtgggtggtcgagtagtgtgaaagcagcatcattctcatttcttatgtgtggatgcaattacgtgggccccgacgaacaacaaattaaatacgaaatcccattaattggatggtcccaccaaactcaaacccagctgtgctaataatagttattaatatattattattattattaatattgatagatacaaaagcaaaagaacaatttaaaataattattgagggacccttacaaataaaatatcttttgaaccatgaaatacaaatgctaatatgcttatgaaaagtactaacaagcacatcttagtactaattaaatattatattataattaagtattgagtctcatttaatttaatttaatttaataataattatataatataattaatcatttataaaatattatctccaactacttaacacctaataacaatagagaaatgttaaagggcacatagcaccctcctatgtattaatattactattagtccaactaaatatcgggtctcatataatttaatataatagcttttaggaaatatcgctaaccaatcataatgcgacatttcgagaaagtgctaagcaccactgatgactaatagcaatgctcataacaatactatatacttatgcacctcactccactctttataatactagttaaagaagtcacgtgattcatcaacttagaaaataagagttaattattatataaagtcattaatatccttaatttttagctcttttttatacaatttaattattaggaaaaaactacaaaaaaattaacaataatattaataaaaaaagataatttctttgaaaagtatagaaaaagattatgaatttccatcaaaaatatgtactttattttattatgtggagtagattatccttattttacatccatgtagaggtggaagttaaaaataggttgtgtaaaaaataagttgtattcactttataaagtcacgtgcacatcaacccaaaaaatttatatttcacactttagtttttatctaagtgtcacaaataatttagccaaatattaaaggtaaatactattttaaactttgtgttttacaaaagtta

SEQ ID NO: 49239 - DNA, 1291 bp, Cannabis sativa
gagttgacttaatactcttctacacaaagtccaaattgatttcctttatttagatagattcttgagtgtagtgatggtctcatctcattgttcttattaacatttacttttgttcatttctttgttagctttaatatatgtttatatattttgcaggcacttcatgacagctgctctgagtggagacaggacaggaagattactaaaatacaacattctaaacaaagaggtaacagtcttactaaaagaccttgctttcgcgaatggcgtggctttgagcaaagaccggtctttccttctagtcgcggaaacaacaaggaccagagtcctcaggctgtggctcaatggcccaaatgctggcaatgttgatgtttttgctgagcttccagggtgtccagacaatataagaatgaaccataaaggagagttttgggttgccttgcattccaaaatgggagttgtatcaaacttgattgtttctaaaccttgggctggaactactttgctaaagcttcctttaagctttaagcagttgcattatattttgataggaggaaaggctcatgccactgctatcaagttgggtgaagatgggaaagtgttggatgttttggaagattgtgaaggaaagagtttgaagttcattagtgaagtggaggaaaataatggaaagctatggattgggtcagtccttgtgccatttattggcatttataacttgcagtaggggattaactagtgttactcagaggaaagtttagatttttattacttagaagtcatttggaatcaactagtgttactcaaaggaaaggttagatttttattacttagaagtcatttgatgaaggtttttctccctcatcattcacaagtttagtctcttaaagtacttgaactcatttgataaatgttatggttgttcttttctttctttcttctacttctttgttgtgacacaattataaaatatgtcacaactcttgctatgaatttgctccgttttttttttttttttggtttcaaccaatgctacactaatagtaaattgcatttatacttctaactaggaaacggcccgcgcttcgcgtgcggtataagaatgttggatttaactctatgtaagagtgacaaaactatcatcgtattcgtgttatatattagttaatatgcttttatatttcatgtcagatgtgtcaattcgtttttaaactgcgtttaattttctcaatcctaacccgaagcataaaaaatcgtattatattcatgttaacctactttgacctatttt

SEQ ID NO: 49240 - DNA, 1269 bp, Cannabis sativa
aaaataaataatagtgttgaatgtgtttaaggccgagtcaatcattgcattaaattccccaactcggcggttaacccgggtttggtcggattcacataaaagacccacttaaatttcaattacagacaaggcaactcacttgttacgaaatatatatttaattttctgtttatatatatatattgttattattatttatttttgaaagaaaaaaataaataaataaaagaagaagaagagtataacacaccttcccaaataaataatttatggggtgtttcccaaactagtggcattgaaagaacaaattttcttgtaattttattaccccacaaatttggccacaccatttggtaacacttcatcatgaaaattaaaatgcagtaccaactcctcctttaataattcccaaccaaagatttttattcattaattaatgttagttattgttcttccctttaaaaattttaaattgatttggttgttaatttatttgtctttacaaaaagttataaataagcaagtctatgtagagaatattgtcatcctaaattaaaaataagttttcaagtgtggtctcatgtaatttaagtatcttcacaaaaattaagagtttaccatagatatgaagagttgtaattaattatagcaaatacaaacattataattctaaatgaaattaaaatttcttaattaatcttcgtatgaagcgagattttttttgttgagctaacaatatttttaatttttttaggagaattttataacatttttttgggatggctttatagatttcagtgttgcgattttagaatgaaacatagaattgttatgcattgatggggtttgtagtttatgcacaatgacaatgtgtagaatggtaagaataaaactgctaaagatgtgatttctttggctaagggtagttttgatcaatgatgtcgtgttcaagataaaaattttggttcctctttattttccttacaagacaacgaaggacttgaggcagttgagacactcgacaaaattgtcgacatattatcgatatcatatcgataaagattgccctcgagaacctatcgaaaacctatcgaaaagccttcgagaaatgtttttcctgactaggacatcttcttcgagaacctttccagaattatcgataaccagtcgagaaaaaaaacaaacatagaatactctgaaaaaagtgatcttgcgattttggcaaaaattttacgaacaatcccattgatctaccgaaatatactatac

SEQ ID NO: 49241 - DNA, 1718 bp, Cannabis sativa
  modified_base (1558)..(1565): a, c, t, g, unknown or other
tgctccatgacagggacgactattgatgtgataccatgttattgctcaagaatagagaaatgacaatgaagaaagagcaattgatttcattgattgaaaagagattacagaggttcaaatatatacagcagaaaaaaccaaaactaataacagaaagttagttagaagaagaagacaactggcctaactaactctaactaacctcactaagtaacaactaactaggtactcttaacactgtgtaattgtctttgtctcttggtctgtatactcatgatcattggtgtcttattttccttcagcatccaccccagaagctacattttcttcttctgaaccttttgggttattaggatgttgtggacatgaagtgttccttattaacatcagtataccacgtgactttttataatttcctcttttggtaagcttcctacaaatctcaatgaaatcactaaaatattgaccgagatttttgacaacaattaattagagctgtttgtagcaattaatggaagttaaagaagacaattttttttacgtggttgaggcattaatgagtattattccacgagtcattgttattaatgagtatttcccaagagtctcctcttctatacatcattgagatatttataggctcataatagtggtaaaaggtcactattgtcgtgcttgtacaagccatgctttgcataatttctcaaatttgatcacagggcatgatcgcctactttttatgatgtgcttaggcttgacataggtgtttagtgagactagacttgtctcttgcttatgatttcatagctcattatgtagttgtcaattgatgtatgaggcattgtgaaatcaggaaattatgagtttaaatccttgagcacatctgttcaaagtaatgtgtaggatattttttcccatgctgcattaaatgagtatgcagtgacttaacctcgagtagtgcgtcgtgctttgtctgtacctccatctcttcttcgggtcgagttcactcgcagagaggaagagacaaaaaccatctatcatctaggtagaccctcctggagatcaccaattcttcgcaattctcgcaaaataatagactccgaaagtgatttaatatgacacagttactagtgtgggtcccattgccacttggcttgctcctgaactgccacgtattttggaagaaaatttagaccacaaaaatcaatataattgcataagaaaaacacacattaattaaaaaaaaattattttgacaactaatttacaaaaaaaaaaaaaaaaatttacaaactagttgataaatgtaactggtttctttatgtcatattctaatgtttgactccaacataaaactctagtgacaataaaaatttcaatgactattttgataactttttcgatgacgatgacaactccagttactttctggggtcgatgacaatttcggtgactttccagtaacaactgcttcttcgacgatttttttggaatgatgtctgctccaacaaatttttggcaatatttgttcttaatatggctatataacagaattctnnnnnnnngagaaattattgggtgacttttttgtaaaataaaaacaaataacaaattattagatgtcgctagggacatcattagttaaacctaaatataattaatccacctaaagtgttgcaattaataataaatttattcatattgtttatttttttatt

SEQ ID NO: 49242 - DNA, 2356 bp, Cannabis sativa
ttttcatggtccactttgacctaggttttctaagccacaaaaggtcttcaaaagtgagatatagccatggaagatatattaaatcttaaaagaaataaaagttatcatgctgtcaaaaaaaatctattgatatgcattttgacaattgatacatttaatagctcatggatgtcattcaactagtataaaaaaatggtaactaaaaaaaacactgttgaattgtcagtcttgaaggaaattaacgcctccaaatatatatatcgttatacaaaattgacaaaatacatgagcaaaccagcccgaagaattttttaaatgtgtgtgttcatcgtatatatttaatcgtttcatacatgtatatatacaccaagcacatttaaaatttgcaaacctgacgtggtagcatgagaaaacgaatatcctcaaaactctatttgttatctaaaagcacaataaaaaaataatgaaatcctatatgtatttatatatatatatttaaagtacggttaccaaaaatatttattggcccacttacttaaaattgtggactagatatatatctatatatgaaaagtcaaataaaaaacggtgtaataccaccttttgttttatacgtgtatatatatatcaagtcaaaattgatacacacatttcatttaaatactatatatatcatgttataagccaaaatagaaaaaaaaaaagaaaataaaatgtcaccctgcctagacagatttatggcatatgaatggtcaattatttgtttttgggtatgtacgctcacactggaaatttcttttccttgagagtataactagtgattatcatatactaagtgtttcattccatcccgtggtattcggcaaggtgatcccctatcattccatcccgtggtattcggcaaggtgatcccctatccacttatctgttcatcatgtgtgctgaaggacttacggcgcttatcaataagtttgaagcaagacgggctattcaaggttgcaaggtggctcgtggtgccccctctatcactcacatgctttttgcagatgacagctatctcttttgtcaggcctctacagaagctgctacgagtgtcaatactcttttccatactttccaactggcctctggacagcaagtaaatttttccaaatcttctatcttctttagccctaacactactgcccaatatcgttctggtatttgttcagtgcttgggatggttgaagcgtcggatggcagcctgtatcttagtttacctaatattattggtcgaaacaagaactctattctcggcttcttaaagaataaggtcatgtctcacatcaatagttgggatggtaaatttttatctcgacctgccaaggaaattcttctcaagactgtgatccaatcatttccaacctatgctatgagtgtctttttaattccgcttggcatttgtgaggatattgagaagcttatggcaagtttttggttgaaaactaattcaagcaagggtcgtggtattatatggatgtcttgggaaagaatggcaactccaaaactggaaggtggtatgggattctgacatcttcatgattttaatattgctatgcttgctaaacaagattggagactcttgtgtaaaccagactctttggtgggacaaatttttagagctaaatatttccctaacagcgattacctcttagctgaattggaaaataatcccagctttgtctggcgtagtatctgggctgctcaaaaggtggttggacaaggggctgttcgtattattggagatggtgaaacaactagaattttttcaactccatggctgcctgatactgacaacaggcttgttacttcaacacatccagctctcttggagaataatgtgaattctctcttttctgtggatactcgtagttgggattctaatgtcgtcaatgatttgttcaataatcgggatgctagtttaattctcggtctcccattgtctccaaatgctgattctgacttttggtcgtggtcgggagaccgtactgagctcttctttgtcaaaactgcctatctcctgctgcagaaaaacaaatctcgacattttggacctgataattctggattctggcgtaaattgtggcaattaaagatcccgcccaaggtcaagaatttgttatggcgtgcaattactgattgtcttcccacttgtcttcaattggtgacaaaacatgtaagtatctccgcaatctgccccgtttgtactgatcaagccgagtctattgtccatgctcttctcacttgcccttttgctatgtcatgttggcgtactcttggtatcacttattacccggtacacccattatcttttggt

SEQ ID NO: 49243 - DNA, 2056 bp, Cannabis sativa
atatatatatatatatttaatgagagagaaagacactaattctctcaaaatagttaaggggttttttttgtaaattaattgttgggggaaagtttaaggccttttattatagttatagattataaaagattaataattttatactatctaatatcactattatgttcaccttagtctaataccaccaaaaaaagtgtcactttatgaggggaattagtatatttttattgaactagttaaattcaaatttattaaaatttttattaaattaaatgaatatcaagcacaataaatttaatttaggtggtattaagtaccgtgtcttcttaaatatttttaaacgaaattttttattatacacacaatattaaaaataggagacttatataaaacctcacttcattgtaaggtttcacatttcttaaataggacaaaaaagttaaactgtagctactagtgtaatgacttggttaaattggtttttattactagatggtacacgttttttgattcgaatattagttttataaatgttatactttttctgaaattaacttttttattaggggaaaatatataatttaagttttattgggtggttgcatttacagcacatagatatgaaaaaaattctaaagtatatccccttaagaggggtacatacatagactccatttcttctctaaatgtattgcttttagattgattagagttagtaattgtgggaccaacatgaatagatgtgagtagatgtgattattttctttgttgagatgggattgaactagtgtgcctatttgttaataaatattttttaaagaaaaaaaaaatatctttcactttgtgtttttgtgaatgcctaaccttaaattatgaaaggaaaatattttgtttcatctcacaattctctcttctttcaactacattgaaaatcactctgattgggagcattgaatgatgtgttgctttgagttaaatgaaaattactaaaagatattattagtacttaatgttttgtcacaatattattagtataagtaagtatttgattccatataatttaaaaagataatttttaaaaaatattactgaacaatcacaaaacgccacatacaaagtgttgggtactagtgcctaataagaatgctccaactaaattgatggtgcaatagtcaatagacacctgaccaccaagtccatatgggtaatttaacattttttttttttttgacaaaatataggtaatttaatttgataaaaaataaattatttagaaaaacaaagaaattagtcaaaatgagtgacataggtgcctacctagttagatttcccaataatattttgctaatatttttttcattctcatcactctatatatagatgaagatagaagccatcatttgttccactactaaaacaaaataatttgatattaatttatggagatgaatcaaaggccacaaacaattccccgagttcttatcttccccatgcctgctcaaggacacgtcagcccgatgctgaagctggcggagcttcttgccatgtctggcctccatgtgaccttcctgaacagcgaccacatccacaatcgtctcataaagtacaccgacatggaaactcgattttccaagtaccctgaatttcttttcaggaccatctgggacggcctcgaggaggatcaccctcgaactggcgaatcggtttgggatatcatttttagtatgaatgagaagaccaagccggttttgagagagatgctagtgtcgggccaacttgggtcgggtgctagtccttatgttacttatatgattacggatgggctctttggtgggtttactgtagatgttgctgaggagcttggaattccttgtgttcattttcggaccacctcttcttgctgcttctggtcttactttttctttccacttcttgctcagtccggccagattcctatcacaggtacgtggtttgtatatttctttatattagtattttttattgggattgtttttttttttttatttttacactttaaaataggtttttttttttt

SEQ ID NO: 49244 - DNA, 1337 bp, Cannabis sativa
gcttacgaagagcatttttcgtttaagagaattttctcacaaccatagaatagtctaaagatcaaatgcacaaacataagcttggtaacatcacatgttgaaatatgtaaaatactttgaaagagagcaccctaaggccccaatttcgcaaggatgtttggtattgaggatccatccatattatcaatcacgatggcaaaagagtatgttaagagttagaaagttatgcactaaaagtagttatgcaaaccaaccttgatagtcattgacactaaggctatgcgcccacaaacctgcaaaccacagcaatgtgatcaaaagatcagtttataacttataacaaagcacacaaactaatttatcattcgaaagcctcaacattgcaactgaattattgttactatcaaaatggtttttttaattaaaagcttgtgctagttaattaccataaaaatttgttacaattgcttaatgttcatataatcaatacaacaatctatcttgatatgtcttgcttaattgttcagtgtttaatatactgaatacattcatgtaacaatctcacctatattcctacgaatttcaatattaattcagattaaaacctcaattcaaaaacaaaagttttagccatcgttgaccaaatactccaaagcccaaaattcaaaaattgtaattaggttgatgataattctcaacgaacaatccgatcaaataaatagcaagtacataagatttaagaaagagaaatgaaaccgtgagagatgcttgtggaaccacgggatttacagtagccgcaagagcttctgtttcttccacaatcggctagcttagtttctcctctgccattgttgatgatagtggtggttctactgctactgctagcttcgcttttcatcttccctgccatttccgattcggtcggtcttcttcttcttcttcttctctcccaaactttgttccgagttcaactcggagaccgatttacagaggaagcaacccatggttgtctctttcttctattttaatatccataaaacgacgtcgtttcgcctatatatgaaatttatttattttagaaattttattggggtatttctcttgcataaaatatgagtacaccttaattaatttatcttttttaaaaaaataataaattaatttttagaaaagattttctttttaatttttatacttcaaataatttttttttacatttttatagaaattaacagtaaaaatcactgtcagcggcggaagttattctattggcaagagtagtccttaatcaatggagacatgctcaacaaaggagattggggtctttatttgttcct

SEQ ID NO: 49245 - DNA, 1556 bp, Cannabis sativa
  modified_base (824)..(834): a, c, t, g, unknown or other
cctctttgctgtgattcctcactttttgttgatttaggtgtaatattctgacattggtttgatatttcggtatggttctactttagtcagttagtgtggcaaaattttgattttttctttcattttcgtttcaaattatttattaaggtttttgtgagtgtaaattggatatgaaattgtgaaatatagttttatttctttatcgagtttattcaatttgtttttttttttttgtgtagcgtttttgagttttgaaaatttagtttggaatgctctttcggcaattgtgattcaacagtcgcgagtgacccatattgttattccaatgaagcaccataaatgagaatgttcaatggctgaggtgttccatacagtgattagggacaaaaaagtcaccactctcatgtcaccgagctctttggtcttaattccaacctttttggtctcatgttaattacctagcctgtagagattttttttttatagagtacaattaataatggcttatttacatgaaaaaaatcaaaatagaaaataatcctctttcaatttataatggcttatttacgtgaaaaaaaaatcagaatagaaaatgattctctttgttgactgagattctctttgctgttatcagattcaaatgattcaaacgaacggttcagcaactctgaatgcagagtagaccaagaagttttaatggcagaggtagaccaagattctcttcaatttttcatttattctatttaaaatgcattatactcattttttttttgcttatttatttattcagtgttttattagcgagttatcctttgttgctcaannnnnnnnnnntttgagtaaatcttctattcccttccatcaagtaacaacttgttccttgtaatttttgccaattttttttaccttaatagccctatttgttgaatctttgacttttttttggatgaatttaatcattgtttacagcaagctttcttctaaatcgttaatcggattttgttttgaattataggaaaatatttggcagaatattgtacaagtgggtattctaaagtgacaaatttcataatttgggttcttattgagatttcttgcttgtgatattctggaaggtaaaaaaagtatctttcaaatcaataaattttctttcttaaatggcatttgttgtagcagagatgagtccattacttatgtttttgaatgagctatttatttgcaataattggaactacttttgctctgaacatgcccttcaaaatttctttgtggattggtgttcttctgactagttttttactttgattcttctagcactgtgttaggaaaatagaattcagttaggaattctgttattaagctgttagttcagtttgttcaatatcagcataaaactaactcccctttgtaaataagttgtatatataccgagttataatcggtttatagtctgagtttgcaatacattaaacactgattttgagttttacctattgtttctttcaaaattctcgcttgttactctaccacatactgcaacaatatgggatatttta

SEQ ID NO: 49246 - DNA, 1392 bp, Cannabis sativa
  modified_base (1366)..(1366): a, c, t, g, unknown or other
aaataataaaataaaaataaaacaaatcatattaatatttgatatttgaactgatattggtttgaataatgttgttttttttgttgtgattagccgttcgaaagttatttggctgtacaaattaactgaatagatatatatatacgctggtactaaattgataatgtgtatctatacgtttacttgggcttttatatgtagtactagggtgggtgcttaattatttgtaactagaaatttaattattgcatagtgtgcatccaatttttaaacatttttattactattatattatagatttcgtttagtttgaaaaatgtatattatagatttcttatattatattatagtcattattattagaaaaattgtaagggagtcataattaatttagtatatcgattaattttaacttgtattaaaatatctaatttaaaagtttgaaatatcagttgcaactgaatatttttttaaaaagatattttaaaatttaaaacaaaatttaaaaatttactaattacaaatattttgattagaaaaaatatagatatatcatgatttttattttttttaaaaaaaaataaataaataaataataaccatatatcatttataaattgaacaacattactacggtacatacaataaaattagaaaaaatataaatatattatttttatttattttttttataaaaaaaataaataaaaataaccatatatcatatatcatataatgttttttattgttacggtacattcaataatatcactaggataaccatatattgttacggtacttatctctctctcatatcactcttttttttttttcatcaacctaacaatttcttcatcaaccaaattaagcgagaggatatacgtacgtattgattcagtacatattttgttttataattaattaattgttaatcaatttttttttctgtatctctataatttctgtttcttttattaatgtgaaactttaggcttaattagttctcttctggcccaataaaattaagccagatctacttctcacttccctttcattatatgttaattaatttttcttttacgtgattctttatatattctctatatatttctttatatatttagtcattgttattataaacgcgttgcaacagattattatttcataaatattttttttcccttaaaaatgaacatagggtatgatgttgaagcagtaatatttggcactaaaattgacactagaaaaaacactttagaagttttctacatttactacatcaacaaggcttatgtcaaaaaaacatattgcattcggtattcacttttaattgacaacattataaactataatatttagatacacntaataataatctcacctaataactaa

SEQ ID NO: 49247 - DNA, 1063 bp, Cannabis sativa
tggagtaggtttcttcacattctctaccagtttgggtaccatggatgaaatgggtgcccgatcaatagagattgtcgccaggaagcaattttttttcctccttggctaaaagatgtcattggtagtttgtgaaagtaaactgtgttttgtgggactatttttcctgaaaatgataaatacaattagcacccaaaatttaaaggtaaagaataatcatcatagttgaaaatgaaaaggagaatgggtcccatcagacgtgccaaaaattatgttaagcaaaaattttacatttaaaatattaaaaggcaaaatataattccacttatgccaaatttatagcataagaatttattaatttaagttcaacccatccaagattataagaataatctcttaattacaatcatttcatttaaaagaaacacattttgattccaattttgataatattaaataatcaaaataatttgggagaaaattaggtgaatttgaaattgtagctgaactcagtagttttaattaattaagctacctacatactttcttgtgaaggatcaagccacttgtagttcagaataaggtattttaaaatttaaatataagagttccgatagatgaccactttcaagaattatgtgctatttaaaaatttggaaaaattccttagtggatgacgttttatgaaattttgagatttttgttttatatcattttgcaatattggtgactgcactacatatttttttttatgaataaagtcaaacgtagttcaaaatatttgagaggttttgataagtaagagatgaatgacctcttttttaaaatgtcatttaatttattacggttttgggaaatttacaccctagtacgtaaattgtaattaaattttaaaattgtagtggatctattataatttaaagttataccgttttatcttgccgtttttaaaataattagttttcctttacgtcaggacatcttgtccaccaaagttagaaaattagcaaatgctttgttgatcactttctcttcaagttctatttccaaaaccatgaaacaaaaa

SEQ ID NO: 49248 - DNA, 1643 bp, Cannabis sativa
atccactagaggcgaagccaccctaggactgtgtcaacttgtttgtttctgtttttaatttgctgatgtggatatttgtataagggactggctataagtggaatttattcaacatacatattttttaaatttcatgtgaaaaatttcatcataatataattttttcatatttataatcaaattcgaagtttttttttttttttccggttgcgaccagattaaaaattttcttcttcaattgcaaccactttaattagtgatctttaagtgatctgtatattgttttatgtaataataaggagaagttttaaaaggaatctaatcgtaaagaagaagaagacgatgattttgaacttgagaagatagtttctaaagttgttcaacttattggtaagaaagaaatctgttcttaaggatggcagtgtatcaaaatatggttttatactctcaatttttgtttaaagtttctttctgattttgtaagtttttaattttttattattttataaatatgtcttatttttatagtttttttaatttgtataaaactaattttattgttgtcttttatgttattaaacaacaatttttattttattttaaataacaagtttcttatgtttgatttgtttttttagtataagttttcgttttttatttggttattttaagaaattagttttgatgtgttagtttttaatttagttgcttggttgctttactaactggtttctgtgagtcagatttcaacgtgtaactcgggtgatgatcgacgtcaaattttagtaacgacaacaactccgatgactttttcggtgattttttccagcgacaataccaatttcggcgacttttctagaacccactataacttcagtgacttttttggtaccgacaacaactctcacaactttttcggcactagtgacaactccagtgacttttcagtcgtcagtggcaactccggtgattactgttctttcatttataataatttcttaaaaatatatatatagagaattttaatattttttatggtaatttaaatttaaatggcatatcctatatatgttaagttttaattttaaatgtcatatttttttcttattaagtttcaaatgtaaaaatatacttttttttatatataaaaatagtactctatctaattatttttttatttttttctatatttattgaaataagccaatgctaaatgggttctcgatttccaccacatttttggccttgcaaattgcaatgccatgctatattatattgctatgttttcttaatatgctataaaactatctttattctttactttgttcgtgcaatcatacccacataattaaaggatgtgctatatatatatataaatatatatatatatatttatatatttgtggcacaaattgttagtaatgggtcacaaaagtttgtgggaaaaaatgttttagtagggacagctgatttgattctttacataccatttgtgtaaacaaaaaatagttagggtgcgtttgtaaagccacagtgtaattggatttgtgtataatcagaggtaattacacaatttggcatgtttgtctgaccatgtaactacactgtaactatgtaattggaagtaattgaggggttccaat

SEQ ID NO: 49249 - DNA, 1824 bp, Cannabis sativa
taagatgttcatgtatgttaaagtagaaatttcatgaatgaaaaaacaacaacaacaacaacaacacataatgtaagcaataatatccgcttaccctgatccgcaacaagccatcggtatgaattgtcagcgaatagcgaaagcttttcatctggttttattccaatgactcttaaaccttcagcgaaatccaatatttcctgttccagctgcaattcgaaagaagcacaagagagtcagttaccaattattagtgccttaacttattttttctataaccatttgacaaaaaaagaagttttcaattcaattgcagccataaaattggcctaatatttcatgagaatctgttttgctcagatcagtacacaagaaaaaccaacactaaaagcatttcttgttctgaaattgatgtaagcctattgcactaagattctaactatcctaatgaaacaccttacatatagaacttaaactgcacctgtttataagtcaaagctgaaggtggatcatggtatgtatccgtaattgctattcgatcaccgtacttctcagctgatgtcctccatatatcaggaacagctttccactcatctgataccaaggtaccgtcgtgtgacaacaatgaactttcaagaataggtgaacactttcttatctgcaattcttgagtctatacaagaagatattagtactctttagataattccaacaccaaccatcttcatttcttataagacaaacttatacaaacactcactcaaggtcaatgaaccagttaaattacaaagtatatcacaaatggttagtcatgataatcttcaactgagaactcttttccttttccttttaaaagcaatgattaattcattgaaaatataattaatgtcatataggctttaagtactaagcatcccaacgaaaatataaaaaatcatcctaagagcatgtgcagctaatctatgtgcaactacataagtcgtccaacgaatatggattagggaacactcttaaaaatctggacaacaaacttgctaaaacctcaaacaatgatccaaaattattgaaagaaaaaatgtttccttagcaagagcaaacactgctaaacaatctgtttcaacagcatcctaagagtagcgcagctaatccatgtgtaactacattagccgtccaaccaacatgaattaaggatactcttagaaatttgttaggccttatgattagtaaggtgtgctagcatataggaaataaaattttttgtttgggaaggtagttttgagtgagaagttactatatatataagtaataatggaataaaggaggtatgcaatgaattgagtaaaattctttcaatcaaaggggcgtaagggctcccatagtttgtattgtaggatcccgtctcacatggaacagatgctaaaatattgagtcatatataaaaatatggactactcaactactaatggttttaagatggaactccatgattcttgacgtggtatcagaaccatttcccttacgggcatgtgaccatatccgatccgcacctatacaaatagtgaccatgtccactctgaggggtaattggttttctcatacacttccaactaatttgctactgttcaactggtattcttgttgttgggtctgttttgctactgtgttattggttctcttgagctaggattacttggttctcatcaaaatttggataacaaacttgctaaaacctcaaacaatgatccaaaaaacaatatctcgtagcaaaagcagacacataatgctaaaaaatctgtttcaaaaacatatacataaactcctaca

SEQ ID NO: 49250 - DNA, 876 bp, Cannabis sativa
aacattcattcaaaatctcttgacgtgaaaatgaaactcatttataaaagacgccatgtttcttcttcaatatccatttcacaatcctacaaagctttttattctatttaactcaatacattcgatgctacttgatcaaaattaacaataccattttgaaaaacaacagttgtttagcatattaagttaaaactgaactatatttcctgggaaatttaccatcacgttttttgtaagcttcatctgaaatagtgtacttctcaacaagtgaagtgtcctcaagccatccaccggatgtaactgacgaagggtccagatctatcacatgaatccgatacctttcatcaccaaaccaaaacaccgatttcggaaaaatgttcaaatctattgcatatataacaaagtttgtatgacaaacagactaacccatcaaaaggggagtaaaatccaagaggcctagaatcatcggataaaatagcaattttggagttgttatcatcgtaaagctccaatgccattgaagtcactgaagtcccacatttatgccatagcttctctttgacaccctccactgtagtctgaaagagaaaaaaacaaaaaaagaacattgatttaaaaacaaaattgaaataggaaagaaaaagggcgggggcgaggagtattgtgtggacaacctgaagggagaaacgaacgtcagcgttgaaactcttgagattggcatgagtgacgcgtagaagaaccgagttgtctccgtcgttcttctgtaacatagacgccattactgctctgctgttagtcacttgcttgcaaaaaggaggctttctgtacccaaaaagaggaggaatttggtgaggagcatagttttatttaactata

SEQ ID NO: 49251 - DNA, 972 bp, Cannabis sativa
tgcatttgaaaacccagtgagattaagtttgtcactgcagtagagatgaagcccttttgtgttggttctttttaagtaccttaagattcttttagttgcactccaatgtaaagatgttggagctttatggaattgactaagagaattaacagcatagctgatatcaggccttgtgtgattcaagtactacagagctccaataaggcttctatatactgtaagattatccatctatttgacatcagaaagagacagtgatgctagttgctactagagttggacagagatttaggtgctacaaattatttttctactttgtttgagtaaggtaaactccagtttcattccttacaacttcaatgccaaagaagaagtaaagtgtgttgggctttgtgccctaaattaaaatctatttcaatgtaattttttctattcaattatcaataaagaaacagctttatttttcattacttatataagcacaaatataaggggagaaattgggtccccttgccttaacccctgctcacctttgaaagaaccctgaaaccttccattcatttgtaaggaataagacgtatttctcacacaatttattatccaactaataaactttgcagggaaacaataagccaccagtaacttttcaaggaaatcccaattgatcgtatcataagctttgctaatgtcaattttaatggtacacctcggagagcaattcttccttttatagtccttcaatatgtcctgaagaattagtatgttgtaggcaatagaccgaccctttaaaaatgcaccctggttcttatccactaaacgcgggaggactttattcaatcaagaacacaacaatttagagacacacttgtaaagagttgaacatcaagcaatgggttgataatctatagcttgtgaatggcaatctacttttggtattaaagatagggccgtgttgtgaagttcagcaggtca

SEQ ID NO: 49252 - DNA, 1679 bp, Cannabis sativa
ttttatgccttaactaaaacccttttcaatctaatttgatttgttctcaataaaagattagaagtcttggtcaaagtcgcaaaagtcgcaaaattaatttttttttttatttttcaaaaatgagatataataactatagttaatatttagagtatatcaaattattttttctttaggggggtgtattagattatttataagtttactttttaataatactagaaaataaattttcccttgacgctgttttaatatttttttaaaaaaataatttcttaattatgaataaaatattaaatataatactttttaatttttttttcaataatatatgtatattgatcaagtaattataaaataaaacatattatatgtattttttaaaaaataatcaaatgtatgtaaaaaataaaataagagctaacttttggatatttgtataaatttaatcaattttttcaaatgtagacacatataactaataataatggagtaaaattgaagtattcaatcacttatacaaaatttaaaaaaataataataacttttggacaaacagcgcatgaagaaatactttacttattactcttacataatttgtaaataatgtgagacttttaccaaaaaataaaaaataaaaaataaaaaaatatattattcaatatatataaaattataaaagagaacataagctcactaaaattataataaaaaaaatgtagtacaaaaaagaaaatataggatgccaccttatttaatttatgtttccctttatataaatatatcaatatatatagatataaatttaggtaaattcacacaatgcacttaaaattaaactttttcttttatattcttacggtttcttttcatagattttttgttttttttttttttgaaaaaacgttatcatgttgtttttcgtaatgacaatgtgaagaaaactgaaaaataataatttgtatttttgtaaaaagagaaagttaaaattcgtgaaaatatatattagaaaaagatagatccattaaaagtataaaatttttgtttttttttataagtgtataaaatttttgttagttttagccttttagatatttatgaaataatcccataaatttaagttttcatgatgatgagatcccattaaggcatctctaacggggtcaacaaaaatagttgccccattaatctccacctaactcatttagctaattacaatttttttcttttttgctttttttttctaattaaaaattttaaagagaattattgcctactttaaaaactttattttatcatatctctcttcttttttatagtcatatgtagcttataatgtctacacatttttattttgggtcaactatatataggcaactaaaaataaaaaaatagtaaatataagagactaaaagaccaatgagaatagatgtaaaaatttgttgttgcatttctaatattaactctatatataggtagttaaaagtttgttataatagtataaaatttattgacatcattttaataagcatcattattatatcattttaatgggtgagtatgcatttttttttaatttcttttttaaaattgattaattatctatactgatttaaaattaaaacatgacatattatataagaaagtctaaagacaaaactatataaaattaaaatttg

SEQ ID NO: 49253 - DNA, 1608 bp, Cannabis sativa
ttttatactatcttacatacatcttaatataattttttagtgcatattggatgttagagatcgttgcgccaggaaaaattatccatttagaccctatacgtggccacaaagtttcctaacaaattactaaaatgttggaaaagtaataatttaattactcttgatgtaacaaactttttaattaactaatgatcaattgacatgttaatataatttttaaaatagagcataccagattataggggcatcaaatgcgtatcttgggccgtgaccagaaattgtactagcaaattatccaagacaacctaaaaactaagaatgtggcttttatgttttgaaatacatgactgatatattaacaaataataatatataaactaatataaatttttacttctttcatagtttggagaaaaatatacatacaatccaaaaattgaattattaccattacaacgacaatgaatagaacgattgattcacgaaggcttggatgaatgatactgaaaggcctaagaatttttcttccctagcttacttttttaggttaacttgtaattagagttattaacttgttaatactttgactaattttacaatacttatgtaatatataattgtaatttatttcattataatttattttgaagtgtgaatgtgttatgtgaaatgggagataattaaatttataaaggagaaaaggccttttggttgtgccctttaattggccaagggtttccaaaaataccattggcacaattaacatgctcttcacttgaaataaaaatagcactcctctctttttgacacttatcagttgtgttgataaaatttgtaatgtacacatttaattatgtgaaagaataaaaaattatcgtcctttttacaaattaaatttctttccacatatataattaaatttaaatttcacaaattgcgagagaagaagatacaacagacttgcagcgatgacagtcttaaccgagtactctaggagacaacaaagtaagcgaaaagcaacatgcttattatcttcaagacaagaggggtacaacaacaaaagtctttcccgaaaattttcgacaaacacttttgaggggtaaatgttatacccaattttcgaaaaattgaaaaagtcaaccttgcgactttgaccaagacttataaatgtcaaatgagttaagacatccttcttgagggccccatggcacctctagaggattcaaaaactagggttcatgggcccgcgcgagtgttttcactcttgagacctcaatccgccaaggaaaccaacaaggaccacttgacttatttaggcatgaaatgacttagatttgtgcataaagttaaaatggcataaaatccccaaggaataagccctatgcgcccactgccatatggaaatggcagtgctctccaatttttggagagcactaccacaaggaaatggcagtgccctctactttctagagagcactaccctaagggaatggcattggttgctacatgcaaatcaccaaggggaaattattcaaatgtgttccattaacagcaaggagtgcaaaaaatgtaagagaaaccatttctcacaaaggaccaaccctagcc

SEQ ID NO: 49254 - DNA, 1376 bp, Cannabis sativa
tccattccttttctgaaactcttgatcaccctgaagatgacgaacgtgaagaaccttcggcttttcttgctgtcaagttgttgaccaatcgccatttcaattctgaagctttcaagaagcggcttaggcaaatttggcctgaacgtttctctatcaatgttctagagaaagaccctaatttctacactgttgagtttggttgttttggcaatcgtcgacgagtcctcataggccagccatggcattttgactacaaacttatcgtcatgacacccttagaagctggctcagtggttactgctgagatgcttacttctacccccttatggatccaagtttttcttaaacgatctcgtgcacttgcacaacgacttggtgaagtccttgggggacttggggcccttacctacatgtctgcattgaactcgatgtaacccaacccctaccccgtggcactggctttcatttccatggaatggcagccccgatttagcttgaatttcgttccaaaaatcttcctgatttttgtcactattgcgaccgcctgagccacattgtgaatcactgccacaacttccttgctaaatgcgactcctcttcggctccaccaatgctttgagatgatcattctttaggagccaaaatctgcatcacctccaatcctttttatattgctagcacacgtactcggcttaggccacacattgctagcccaacttctttggcttccacacatcaatattgtttacaccaaccctttatcatttcagaaggccatttcaatgaacctacctccgattatggtgtgcaacacttgtgccaactacaaaccacatttgtcaatttctacaggaaaatttgaatttttatgcattttataaggggaaattggttaggaaaactaataataagggtaattttaaatacatgacacttttataaaaacccctaaaataccctcctcataatttctaaccatttctctctccttccctctcaaacacaaactctctctctctctctgccgaccacgaaatcaccacacccacatcccaccaccacccgaaaccccatcggagcaaccccagtccgaccccaacccctctgacccaacctgaaatgccacacccaccgtcatcaacgccgcacggaggagacctagcttcctactcaccgacgcacaatgtctaaggtaacttttgaaatttctcttttaaaaattcttggatttgtttgtttttgcatttaaaattcatggattagttttgtgatgcctgatctgtgatatgtgtgagttagattagattttaataattttttttggttgtctgttcgaaatcgagataacttgctaggcccgatggtgtccgatggtg

SEQ ID NO: 49255 - DNA, 1049 bp, Cannabis sativa
aaattaatctactgagattatggtagagagaagttttaaattgattgacaattgctttggtaatgacttcatatattatagcgtataaactgaactcataaaatttccttggatgagatacctttggaattagaaccacattaatcccattgaaaactctcatatggtctgttcattattcaaaatagtcaaacaaactgccttcacctctcttctaaccacttcccacgtttttttgatagaaaatggcttctaaaccatctgaacctgaagcctatgtccctcccgtatttaaaaagagcctgtttgatatcctctgcatagaatgattttgacagcaattagtctcatccgaaagcacttgctcaacagaatcagctaattgggaggtagcatccataataaactgaactagatttttagagtgcagaaaacaattccccaccactatagccacggcatcaccttcttcacacaaagctgcactttcatcctcaagacctttaattttatttcttttctttctggagctccccttttgatgaaagtgtattatattttatttaaagagcaacatacatctttgattccttattttaattttatttttccaaaatcaatgtgtgaggtatggatgtttctttatggtagtcaatgaatttgtttctgtatttcgtttgtcacaatccgagttgtcattgtcaatgtatctgacatggtcatctcgtttgtctttctatcaggttcataagatggtggatctttcagcttttccagatcgagaggcaatgtggtatttggaagttatggaagcatacaaactattctatgaaacactgatagatgattttgtgtaattgcatttagcacaaacatagccctgataaattcaaattactaacgtttcatttggaaatatatatgttagaaaatctgaaatttggcatgaacgcttcaactctactcttatgttccaatttcattagagttataaaaagcacatctcctagtactccttgtagctgttatttaattataagtattttagt

SEQ ID NO: 49256 - DNA, 1523 bp, Cannabis sativa
aaaaaggcaagatccaatttatcatgtaataaaataaagggttctacctgtaacttttacgaaacacaaagtccaaaatgatatgtgttgatatttaaaattagttttcaatggtaatttagtaaggactcttatatagtggtaatgatataataaagcttcttatctgggtataccatgtacttttctcgtggcaattagtatttttgagtcgtgttcatatcatgtcgatgattaagtattacaaataaatttaaaacccaaatgcaacccctttattaatcacgttgaaaactaaaactcaaaacccaacttatttataagtgggttaatctgactcgaccttttttacatgtttatatggaggattatttttgtttaatttatcaactacccattaacatatttataacaaattgaacatgtttacactgttttataatatatctattagtcgtttcagatgtttatgtcttatttaactaatttaatccaatttagatataataaatataaaagtgtacactattagatagattattgtcatgtcatgtgttgattaggtgtatcaactcaaaaattaccagcagtttaatagatgggttagttgtgtcaacccaaaaataaaacaaactcatttaaggaaagctaaaactcatttcttccgtccaggtttggactcgtgttcctgtctaactcagttttctacctctacttatgtaagaccaaattcaactttctcttcatcaatttaatttggaacaaatggtttcaagctaaatttgcataaataatttgatttagtttaaaaaaattttacattataattccattatatcatttttgaaataaattcaaagattataatagcagttttgattctattccaatctcaattacatcaaaccaaacatgtccttaaatatggtattaatctttctatgctattttattcgtacattatggtggagaaaatcatggtcatatatttaaacaacatggcagatgatattccttatctttaagaaatgaacctgcatcacactatctttatataaacataattgataaaaataaaatatataactaatgtaacgccttgatacttaggcgctacaatgatttttcaattacggtgcaacctttgctaatcaaaggatttttcttttcttgaaaatcgtgtcaaattaaaactttagatttaattgctaaactttataaacttttaaacatttttttacaaaagctgagatcccgtatttacacttttacaatattatccaaaatatatatatagtctggtcgcacaacgactacaaaataacaaccccagatgtcccgagaccgaacactctagtttgcactgccatgacatgtacaaacaccatcctagctcagggctcactcttgttttgccttcgcctttcctttacctacacatagaagtagcaactttgagtcgacaaactcagtaagaaaagcatataacaaatcatatcatatcgacttgtatctaggcaccc

SEQ ID NO: 49257 - DNA, 1246 bp, Cannabis sativa
cctactataattttatcttatatataagaatatatgtatatttatataatgtaaatgtaatgccatggatgcaaatatattgcataggatatataatttttttgttcaagaaagttcgatcgagcttgtctgaagacgttgcacgcacggaaatactgtatgtagcctccaacgtcgaggtttctcggccagccttcttggtgcacgcgtgcggatggtatgtattgcatgttattcgcaccaaatcgatccaaaatattttaatttcaattttattttttttttcatattttttcatgtaatttattttttgattttttgtgtaattttttatgtagatttttattttttaaatctcaaatctaattatcaggttaaaaattaattttgtttttgtttattaattatagatattagtatattttaaacttgaaaaatgatcatttttacattttttgcttaattagttattttaattttaaaatttaattattttatcttatttttaaatttaaggtaatacattttatattttagatgtttcaataaattttttataaaatgaccttatttgaaattttaaaatatgatatatttttataaaataatctacattattttaaaaataaccagatatttatcaatttttcaaaagtttgttattttatttaaattaaattataaaatcaaataaatgatatttatttatcattttattttattagacatttaatttaaatttgaaaaataacataaaagttagttgataattttgataattttaagttagtttatatttaagtttgttataaacctaatttttcaattataggtttaattttaaattaattatttaataattttttgaaataaatatttgtttattttggattttcaaaatttaattaattatttatttaatttaaagtaaataaatcatataattaaccaactatccaatgttgttacatgtatattttatttattttttattcaaacttattttataaaatttagtattgttcgatctaaattgttatggttaacttgttgacaaatccaataatctgattttaaccatagtccaattgccaatagatcaaataaataatttgtaatatgtaaattttataatcttctttcatttgtgtgtaaatctagtaacacgatagcataattcatatcattgtgtgtatctgtgcctatatatttgctttgggcctagatgtatataatgaacccattt

SEQ ID NO: 49258 - DNA, 1420 bp, Cannabis sativa
ataaattaatttatattaatgatacgatgtaacatataccaaccaaaaccaactactacaacaatattattgattaatatttttttttgaacaatattaatattaaaaggtaagcgttatcatgtcaaatttttaatattatattaatttaatgtattgattaaagtaatatcaatgtaacaattaagaatataatgaataaaattggatttattcttcttaaactatatattatcattagtgttactgattttaccgtctgttcaaaattctcccaattattaatatgttactaaattatgcattttctatgtgttttaatcaatcgtcaactaatgaaatgcttatgtgtcatttgttttgttggtactaatgtggcatgtatgtatagtttcaacaaaataattttcttgattgattttgttactttaattatttgattttagtgattatttttaattatttaatttataattaaatctaatttttaattatatctagtagagttgacatgataatgccaaatcatcgctcgtagtgctaattcaattttctgttatagtcatgtacgtaggttcctggaaggctctcttgtacttccaggaagggtattataggaagctagccttccttcagaaaagggtttcaaatggctagctgttcccttcgagaaaaagagtacttatggatagtcgactccagtttgctccttcctattcgaaagctccttcagcgagtaactttgatccgtgtttctggaagctctcatactcgatcctggaagcacttattcttatgctgggcgtggagatctcgctaaaagtaaagttggttaagatagttattgtctaactaacttaacaacctcaattcttgtagtcaccgactttaggatcttgatcctaaacctattatttaataccactaacacttagcatttcaaacagtcaaacttcaagacgatcaagtcgatcagattgaattaagaggtagagctagagagattgggtttgagttttgtataaagaatcttctatagatgaataagattttttagtaagagtgtgagagttgaaacactttgagaaaactcaatagagaatcaatctcaattataatgtaccttgttcttgctcaatcaataaagagaatttcttggtgttccagaactgaattagagctatagatcacatcgatctattagacttgaaccagtatatatctctgtgctaatttattatttcttgctttaatttcgtttccggttttaatatgctctgttcatccctgttttctccgattgatatatttgtaatttattaatcttgtcattgctaattgtttgattttttttttttttttatgaatcaaagaatctgtattgctcacaacaaagtttttacaaactaattgcaccttt

SEQ ID NO: 49259 - DNA, 919 bp, Cannabis sativa
actttgtgaacacccctactgtctattagctatggagacggtcgtttcatttcaacacccttttgtaatggttgagagtgactctgagacagttatcaagactctaaagggaatctgttctagttggggaaccaataacaacgtgcatcattgtaaacatctctctacttttatgttaggctgtaattttttttattccttgtagctaagtgggcatctgctaacaatgctaccggtttggttgatctctcttctataccagactttatcctttgtaatgactacgaggtctaacacttttggtgcttctatctataaaatgtttcatttatttaaaaaaaaaaaaaaagtgtatgtatgacacaaaaatgattattcaatttttaatcataacaatagaaatggaaaaaaataatagcagtacttttagagagaataagataaaggaaaaggaaaaaatctaactaatccgaggcgagacctagtattttttttttccttttaagtaataagcttatagattgaaaataaacagtgttaaatgttaacatattaagcaaagtatgagaatagtatagtatcttaaattcttaatatgtctataaggctgttataattttagttaaaaaaaatttataattatgtatgttgtaattatttaggataatttttatatttttaaaaaattacaaataatttataatataataatctatcaaaataactccacataaatttccaaatacaatatgttattattattattattattttaaaaaaaaatgtatatcataatgtattgaattgaatggtatggagtagcgtggtccaaccaaaagtaagaaattaaataaaggatagagcagcacatgtgtatgtgtagtgtatgtatgtataattgtataagagaaatgctaaa

SEQ ID NO: 49260 - DNA, 782 bp, Cannabis sativa
tgcacaaaataaaaataggtaaggggaaagtggatccccttgcctaagacctcgttgtggtttcaccttcccttgaacttccccattaatgagaaaggagaaacttcggtgtaacacacttcataatcttttcaatccattccacctgatatccaagtttcaacatcatagctcgaatgaaacaccattctatccaatcacatgcctttgccatatccactttgagagccttcccattctaaaatctattcctcctcatacagtgtaagccttaatatctaataatagcattatcataaatgattcttccttgaataaatgtgctttgtcattctaatataaccattcccaatgattttctcatcctattagccagacattttgagatgatttttaaaattacattacacaagctaaaaggtcaaaattcctccatcttcttcggcttgtccactttcagaattaaagtgatgataatttttcaggcagcaaaattcataaccgttattgagtatgtttagacacatctcgataatattttgccttagtttatcccagaaattttggtaaaataaagctggcaatctgtccactcttggtgcttttaccaagttcatttcctttactgctttaataatatcttcctccataaaatctatcagcaactcctcatgcattgattctctgacttttagttgaaccacatctagaacttccctaataatggccacaggcgaagcaatgaataaagacccaatataattttcaacaatatgttgaac

SEQ ID NO: 49261 - DNA, 1425 bp, Cannabis sativa
ataaatatatatgtagattagattgaatcggttatttttatatgttaatcaacatattcaatccgcacaagtataaattttgaatttttcaatctacaacaatctaatctgaataaatacaattctgtactttataaattaaattgaattgaatgatatggattgaattaaattaactattttatcaaaactctacctattactactaaaatgtagtgaagatacattatacaaaaagggttggtgtattatgttttttctttcttttttttggtaaggaggtggcattatatgtttggaggtacgtggaggggagagtagtagtgggtgagtcatctaatacagagggataagtgattaattggatccatatattataaaatttatgtgggggcaacccatttataatgctaacaaaatctcatcaacaagatatatatattggacacctcatcagtcatcctaataatgtagctcttagttgaacaaccccgcctgctacatattattttcattttcatctcattgcatgtgataagcttttatcttaaataaacactaccctttctcatgcccttacccttatactatatcaaatcaaaatatatatgtgtgttaacaatgatcaatgcgtaacttacatgtgtatctatattatagggcataactactacacgggtggccaaattttccctacgggttagggaaactttttcgtccgttgatgaaaaaatgatggtgattaaggtaagcaatataatagttagcatgaaggttagtttaggagataatttggtatatttgataataatattttatcattatcttttaaatttactttggttaacattttttacttagctcatgtgaatagattagactaactctctctctcttaattccttttgaagagagagaaagaaaacaagcaaaaaaaaaaaaaaattgggatcatcactgtattatttttctttagatattgtttgttactttacttcaagtgtgttctcaaagacaccagattttgaactagagttttcttgggtcaccaatttagccttactgagattacgcccgatttgggttttatctataattttcaaaggctcaacttttccaacaaatcacttactgagtcacttttaaagcctctaaactttaatttttttctttacttgtcgaataacttaatgatcgaagagttgctgaaagttactgtgaatattattagtcttcaaactctaaatctctctgataatgctttagcgggaattattccaaaaataaaagactgactcggtaatagaaattttcaccacatctaaccattcttgaccctcattatctcttaattgtcatattgatatgagaacaacttaatttctcaatgatattgttttcgatactattattattatgccttag

SEQ ID NO: 49262 - DNA, 2728 bp, Cannabis sativa
agaaggcatcacaaacattaatccgaaagtaaataattgactgacctatacaaacgtgaatttagaagttagatagcagaagatttggtgaattacccagcaagcttcctggcaagatacaagaaaggcttctcaaaattgtagttactctttgcagatatctcatagtattgcaagttcttcttcctgtggaaggtgacctgcttggccttaacctgcctgttcttcacatcaaccttgtttccacaaagaacaatgggaatgttctcgcacacactgaatgacagacatgataaaaattttacaaagaaaaagtcaaataccatccatattcagcaccagtcggcacaatgattcaagcgtacagaaagaaaaagctcgtttagaaataaatatagcacaaaccggcaaagatctctgtgccatgtaggcacattcttgtatgtcaggcgagccgttacatcaaacatgataatagcacactgtccatgaatgctgcaaatcacaaggggaaagtaaataagacattcattcaaccttgcagacaaatagagtaagctcagaaaatgaactcacgctgagctgagtaaaaaaacataacatcaacataaattagagtttgtaatttatgtgtatattaagtcagaatggtagtgcttctcaagcataaaatctaaatagaatgaagactcttaaacgcataaagtaagtaacctcagcccacttaaacaaagtgcaatacgaaattaaatatgcattttaggtaaacgaaagaagaattttcattcaattaaaacatccaagtccaacccagaccagaccatagcaaagtaaactaggttaaactaagagaagagactcactagtaaccatctctaagaccaccgaacttctcttgaccagcagtgtcccagcagtagaatcggattttaccacagtttgtgaaaaagtccaatggatggacctctacaccaatggtggctgaaaaagaagaagcaacaaataaacaaacatagctcaaatccaaatccaaatccaaatccaaatcgagaaggcataatcaatgaatcaggtacttacgttcatacttcttctcgaactcccctgtgagatgtctcttgacaaaggtggtttttcctgtaaaaaatcaagaaacgcgatgatcaaatgtaatcgagaaaatcccaacaacaaccagatcgaaaagacaaaacacgaactgaatcttgttaccagttccaccatcgccgacgataacgagcttgaaactggggtagtcaacagtctgctggttgggcaaagcctaagaaaggatttcaaaaacataaagaatgagttggatggatctcatgtaatctgtaaataaaaacaataagaaaccctaaaacgaaattaagaagaaaaaggaaaactttaccatggaaattggaaagcttagagagctatgtgaggcagcgtgagagggtgaggaagtgaaattggggttttagaaaggagagaagagaatagagttaaggaatagagaagggaaaaggggtttatatattatattcatttgcgttagttttacgcgacatacgctttcattttctctccattcattttttattttctctattaaatcattatttttatattgattttttttttaattccaggaaataaatcatttatatttttgattccctggtttattaaaggggatttatttcctggttttgtctattgaagttcaatttaaaagttataacatattattgcttttacatttttaaactatgttttgaattaggtgatccaaatgaatcttgattgtaattactaaagtttatgacaaagaaagatgcgtggttgaaaacttaacaactttgccatgttccacctgcaacggctagcagccacagaagaagagcggtctcttttccatcattttatagccctactcactaaattgttcttttaactttttattttatattgaccagtgatgtattcagatcaactgtaatcacaaataagttgttgcagacaagtaagtagagttgctcatcgaagtcttgttgcagtgtaagctaagttattcaaatgattaccaatccaattcactaggattttgacaaagaagaattcatttttcagtaagacaaaatgaggaaaaggatgcagttcaaaaagtaactattttcgcattaaaatctgatgaggaaagccattaatcatccgaatgagcaaagttttacacaattaacccaatacgaaaacagcacaactgaactcctccagtgagattgccatatgagatattacttaaaataaaagagcatcctactatagataaaatccagccaaatatgagtgaatttcctaaccaacacaatcatcagaaaacccaagggttcagaaaaccaagcgttcacaaaaaaagaacggaagcttgaatgcaagcttctccagcaagtactagctcttcctttttactcgaatgtatcatcgtcgtcatcagggagaggctgattagcagcttgggcaagctcggcttcatgactgcaacaaacaacaaaggctcattaaagacgagaatacgaaagaggtgagatttatcgaagcagcacaaatactgtgcaagtgtgtgggactgggatgatacttgaacttgggaaagaggacttacatttgttgagctgccaagtcaatgtgtacttcaggaggagcaagggcaggagactca

SEQ ID NO: 49263 - DNA, 1100 bp, Cannabis sativa
  modified_base (583)..(589): a, c, t, g, unknown or other
ttttgttggtagtttcctattttttagtctcctagctttgtatataaatatgtattattctatgaaatacatatataattcgattcactattttctacatatataaataggaaatcacccattagaataaaaatttaaaaaaattctcatcttttttctattttctttttctaaattataatattttataatatctaaagattcatttaagtatttatgcataaaaatatcctccaataatattgcaaaatgcaaaataagatattattgcaacaaataataggtaatatgccttcaaatctttctagatagatttgtaatatgtgtaatcacaacaaattacaattttttttttcttttgaaaaagggaaggagcccacttggcaagtcccccaaaaagcctcacttgtggcagaggaaaaccatgatacataaaattataagaatacaatgagttagcacatagagtgaccaaacataccaaaagaaagaattcccgagttttacatcaaagcactccaatccctgcataagtctaggaaagaaaaggcctcaaaatgtttggttttaaagatccatgtgnnnnnnnaaaattttattctctcccaaacaacaaattacaatattatttaggatactacatattatttttgtaaaaaaataaaagtattttcaacaaagcaagaaaatacaaaaccaaccaaaataaatagattttgtatgtaattattattattattattattattattttgctaatgtgtatatatttaagagattgtctactgattaaacacaggcctaaggtccaaagaggggaaaaaaacacttttttgatgcctattttatttttttgtaatgtctattttattttattttattatttctttttttgaaaagatataaaaacaacttttatgtacccatttattttatagtagaatatccaatatctagaaaccaccaattaataattcatttacttaccatatatttggttaaattgtccatttattatgattagcattttgttctatacaaatacattattctagttcttggtacagaatagtaagacatcatatattttgtttttccat

SEQ ID NO: 49264 - DNA, 904 bp, Cannabis sativa
agcaagatcataatcttacttcgttaccaaaataattataaatttaataaaatatgtctatttaaatattatttatttttcgggatattacacattgaatccttcatgtaaaaggttaaaatttctaaactcacaagcttgagaagggaatagagtgctcatattcattgtaatcccttaggcttttctatcatacttcataataatactaacttgtagaattaaactcattaacgacccaactatgtaaaaactataagtgttctcttcatatttgattctttaaatcgtattttctttagctctaatattaaataatttattttctaaaaatcttgctaaacaattattattgtaacttattagtttattgaacaaatttgaaagtaacataaatattgttttaaaaaataatataaaattttaaaataacaaaataatttaataatgatttaaaataaacacataggttgtaaagtatccaaaatgtatacaaaataattaatatataaaattagtggcttattatattacataacaactcgttactttaataaactttaaagttgttaaagtatattttaaataataagatactataatataacttaaaaaataaataattaattattaatatgtttacaaataaattgtggaggtagtcaaattgtttatcaaaattatatgatataaaaaaataaagaattttttttatgtaaaagtaattaatcaatttattataccaaaagattacttttgaaaatacatatgtaaattaaaaataaaaaataaaattattgtaattgagatttgttaaagtacttttgtaattaatttatatattaagtatattattgaaaaaatttctccaaagtaaatctttggtaaagaaaaaaaaaagaat

SEQ ID NO: 49265 - DNA, 1264 bp, Cannabis sativa
attacaatttagagattattcttatttataactaactcacattgggacttgatttttttttttataacaaattaaaagttattcttaaatagaggttccattgtatttaaaaaaaaataatccgctaaaatctgttaattcagaaagatttcttttatatataaatggtaagatgtataatagtagttcattttaaggataacacttaacctttcattttatattattttttactaaaatttatccaaaaaacaaaaaacaaacttgaactgcaaacaaagatctcatacgagacccagacctcgttaagctaaagtaattttgtgtttatagtagtatataaataaattaataaataatctgcgctttgcgtgcgattatatatgaaaatcaagtcataaagttgtgttaaatttattattttgtaaataaattttttaaataaaataataagataaattattttaccaaatttacattcttactagtattagaacttaccacctcatataatagtggaaattttagtagataacattatacccaatttttgtaagaaaataaaatggctacccttacacaagaacccacatgccaagagtgccttgaagatactaaagtaaatcttgcgactttgaccaagacttataaatttcaaatgagttaagacattcttcttgagggccccatagcacttctagaggactcaagaatattaaccaaccatttagtgtcgggactcacacccaagtgtgtccaaactagagttcaagggtcggcgcgagtattttcacccaagagacctcaattcgctaaggaaaccaaaaatgacttgactcgtttaagcataaaatggcttagatttgtgaataaagtcaaaatggcataaaaatctcatggaataaagcctatgcgcccactgtcatatgaaaatggcagtgctctctaattttgggagagcactgctacaaggagatggcagtggtcaccacttacaaagcaccaagggaaaaattttcaagtgtcttccctaaacaccaaggagttcaaaataagtgaaagaaacaattttctaccaaggaacaagcctagtcgacccttgccatttttgtggcacaatgagtggcagtggtcggccatgaagaaggggaatgagatttcttgccaaaaatatttcttcaccaataatatgtcaaaaccaagttaaagaagccactaagtgatgtggaaaccacttggccgactactgccacacttttgggac

SEQ ID NO: 49266 - DNA, 1823 bp, Cannabis sativa
ttggctctggcccatacgttcaaacggaataagattgagaacaaaagctcggaatcatccagattagaacaaaatctcgtattattattattgatacatattcatattataccgtttgaaatggtaataatatactcagtactatcattagaaagaagaagaagaaaaaaagaaaagagaaatgacaatagctaaatcacattcctgtagaactccatagaaaacagagagaatcacttagaaaactcaaacaaccaaacaaagtttcaatcatgtgtctctgtatttaatcctcgttagcagcctcaaaactcaaaacctcaagtatagtacctgtagtgagtgaaacggaatacctcgtctcctctccgatgtcggattagtttgtgaacgaggttgataatattcgtagggtagctttatgagtttgccacagaaccgaagaaaacccaaaggcccgccgatagagagattgagtaaaggagagagagaagaagaagaagttatgctactgctgtaactttgaaaccccaagataaaagcaaaattgggaaattttgaagggtgtattttttaaacattacttaaaaaatatagagaaatttttaagttagatcgggttcaaggcatgggtgtgtggatccgggtttcgtcgaggctcttggattgaaggaggttcttagttggataaagatttcaaacttctctaacgttacgatggagacgaacagccttgtcacggtccaagctcttcggagttcagtgattatggcctctccgtgtggtaattgtattaaggagtgcaaaggtcttctttctagtttgaacaatgttaattttcactttgttaaacgatctgccaaccgtgttgctcatgcttttgctcgagactcatggttatatgttgatcgtagttattcgggtagttctatctcgagtaacattcttgatgtaatcgtgcatgaaatggtttaataaaatccatcttctattcaaaaataaaaatatatatagggaaatttgcggcaaaactcgccaaaaagttcacgttgatgcaaattagtcaccaacctccaaaaatagcggtaatagtacttaaagtggactttcgtgtttgttcgttcataccacatccgttactatgactaacggtacacgtgtacgcataagatttaatctctttttatttttttatttatttcttttcaaaaataaaatttttaattaaaaaattaaaatggtaaaataatgaaataagaaaacccccatcaccccgaatcccaaatccctaatatccattgtttctagcgaggtacccagaaatcgcaaggtctctataaatcgagagatagcttcaaagattcattcgtggaaggttaggatggacggggagggttcttacagtagctcctgtcgtcgaaggtcgaaaagagtggttggttctgcttatcgaagggatcctcaaaattgttactgtggcattccgtggatcgttagaacatcatggacggaagcaaacccacgacgttgttttaggaaatgcaggctagcatatgtaagtcattgttttttcccctgtattttacttttgttattattgtttatcttaaatagttgaaggtgaaaagttttaaatttgtccacaagaggatggtagagggtgtaagttttttgaatgggtggatgttgattcttgtataaagtgcagagacttaataccaagactcatgaggaagataagtaagcttgaagatcagttgatgttgtatgaggcaaatgaagatttgaaagaattcaaggacattccaaaaggatgtagcaat

SEQ ID NO: 49267 - DNA, 1856 bp, Cannabis sativa
attacattaatggtaataaagaaaagatttggacatccacataattaatactatttataacagttacataattatgtctttttattatgttttgtttcttttactgttaaaaattactatttttgtcccatcaacacaataaaatttccttttttattaaaaataataaaaaattataattgataaaatttatttaaacaacttaataaaaaatatttaatcaaataacaaatattaataaaaaaaataaatagatttttaataaaaaaaataaataattttttaaatcactcaattagttttaaaattttaattttcttactcattcaaaatgattttttttaatatctaaattaattaagttaagatttactgaaaaaaaaatgttgaatctttctcatttttattttgaggaggtacgctttgatagttgtaaggatttagggggcaaagttgctaatttacaaatacacgtcagcatttaaacggaataatgagacagaacctagcataaggactaaattttaataaatgtaaaagttcaagggaaatttttaacaatctatttattttaggggcgaaatcagtattgttgaaagttcaccgaggtttgagtctgggtcggggtctcaaatttggggtccgagtccaagtctgggtctgggaccaaggtctggatttgagtctatgtcaaagttcggggtccaggtttgggtccaaattcaagtttggggtccgggtcttgcatttgggtctgggtctaggtttggttcagggtccaaagtccagggttagggtcagagttcaggtctgggtccgggtctagtttagggtcggggtctggagtccggggtctagggtctaggttcgagtctggttttgggtctgggttagggttggggtctggggtccaagttcgggtccgggtctgggtttggtgtaggatgggtatggtgtaattttagttaaaaaaaatctaaaaatagtttttaaaaatctgaaccaaacaccattaaattttcaaaatgacaaaattattttatattctcacttttgaaaatacaattctgagaactaaaaactgaaaaacacagctaaacaagcacttagaaaaccctaactgtgtttgtttttcttagatagagaagaagagacgaagatgagaagtgtttagggtttgagagcttactgtgtttacccttttatattagggtttcatttcttctttgggttggactttcttgttgggttgaaccctttgttttccctttgtgaatttggcttgctggtgggctcagtgagagttgttgggcctattttgtattgtgagttttgaaaatacctacatttttttatggacccataaggagatgaaaagtttgaaaaataccacaattttacctttatattaatcttgtgtcttgaagtgttagaaggctgcagattttcagcaattgtcttattgaatgaatactcaatacaaaatgtatttatagtgatacaaatgtaacaaataatctattacaaccaaaactaacaacaaaaaatagtacaaagaccaaaataataactaactgttaatagttttaacaaactaattacttgacaccactatattgtgagaagtgctagtgaagagaaattgatgattccccatcatatcctgacacatcaaatgtggtatactcaacaatttgatccttattcttaatatctatattactcataacagatgattgatcaccatgatcaacgatgagtaggtgattggtctcttcattgttctgttgagcattattatagtatctactactgcctttgttaatgcctttgttaagccaaacaagctcttctgc

SEQ ID NO: 49268 - DNA, 1170 bp, Cannabis sativa
  modified_base (775)..(779): a, c, t, g, unknown or other
ttatttatgtatttgctctatatcagcatttctctataatagctaaataaataaaatattattttattgagtgtcaaatttagataagttttagtaatggtaacacttttacccttctaaaattataaaaattacaataaagaaaagataaatataaaatttgatgatgacttttggcataaggcaaaaaaaaaaaaaaaattatttatgtatttgctctatatcaacatttctctatagtagctaaataaacaaaacattatttcattgacggtcaaatttagataacttttagtaatggtaacaaaaaaaaattgtgaataatttagtgtttaaattaataattattaataagataacaattttttttgtgaataattagttagctttaagatatttaagataatattttatcatttgttaaaatcaaattcataaaaactgtttaatgatagttctatgttaattaataatgaaaagatgtaaaatagaataaaatggccattattttaagttacaaattaactataaattttagagtaaatactattttagactctgtattttgaaaaaaattaccaattggactttctattttgttaaataaaaaaattgactctatattttctaaaatagtaaaaatagggttgagtccaaattttaacaattttattttttaatataattaattttaagataatttctaacatgaacaaatacagaaaatataactaattttgtcacaacatctctagattagattattattaagttnnnnnttgacaaaaaatcagttcaggatcgacctatttgtataatttctattttgtcatttaacaaaacagagagtccaattaataacatttacaaaatatagaattcaaaataatatctaccctaaattttatttttactactattatttttacaatggctgcccatgcgtaacatgcttcttccactgtatttatatataattctactttataaatgaatcgtacaatgaaacttttatactgtgttgctatttatttttctatatgtaatctctaatttttttggtgataaataatcttttctgtgttgctatttatttttcttttacgatttaaagttactcaatttaattaaggaaatggtgtcttgttcaaaaagaaaaaagaaagtaaa

SEQ ID NO: 49269 - DNA, 3970 bp, Cannabis sativa
tgaatcaatgaaatagtccagaaaaagaagcagaggacctgtatagtccccaaccaaaacaatctaaagaaaaaagaaattatcaaatcttttagttaatgacttatcaaggcattagtcacaatttgtcgtaatttattataattattttttatttattataggagttatttcattattttaaatgtgtattttatatgattttgtaatataaattaaagaatcatttgtaagtattattttccaacaaaagtcaaagtgtgacatatttgaccactcaaattatgaatattacatatctctcacagaaaaatgataaatattttagtaattaacatttaaaatagaaagttttttagtaattatatcccattcttatgggatatgagcattgaagagtgtaaataattgaggctggcctctcaattacctctaattaaataattatagtgtaattacaaacatacaaaattatataattaccttcaattatagctaattctaattcccacttaacttcctttcaaaaaataaataaataaataaatttccacttaactttccaaacaaaccctaaaattatattaatctcatgccatatatggatatatatatataaaatttcaactacagtactaccaataaatattacataaaacttgcatataaaagttccatattaattagaatctagtctttcttgatacgcttacaaatataagatataaaatatcttaaaatttgaaatgggaggaggctaatattggtagtggctgaaatccatgacgaagagtggcttcccaaactttgtgaatatttgtgtttttagtctgaaagccacactcatgctcattccagccttctaagccatgtactattcctgctatgcgccatgcactcatcacccttctcggcaaccaattctgttcataaatataatatatattcattaattaataatttattaaaatatattacacaattatcatgcacatgatcacataattatcatatatataataatgtatacctcacaggagtggagattctctagagatgtaggagtgtgcattgctggtgtgtagtggtaaaagcagtctttgcgaaatggatgaggtgggaattgagaatagggaatgaatattgttccttttggagcttttacttgttcttctttgctcacttcatcccccactaaccaaatctacatgcattattaattatattattataattcataaaaattgttattactcctagccattataataaactttattatgaactaatatttattaattaattaccttttcagaataacttttggagaccaccaaacaattattaatggtacttgaactggagttattgatcattaatgtttcctccactttcttgtactcatcctcttttgatgtagccacctgaatgttcataccattataatatatatatatatatatgtatatatatatgtataacgtagacgcaaaaaatttactatgaagaatttatcaaggtcttgaattgcttaagtgagattatcattataatataacgatagcaaataatagattatgatacatattcaaaaatgcaatttttctaattgagtccagtaaaaatctgatttttgtatgatgttagtgcatattcaaggtgactttattgtacagctacaatagttgacaattttataaattgagtttttttttaatactgtttttccatatcaattaattttcctaacacatatttttcaagaaatatggcttgttttaataaatatggctaattagccaattgagtttcagtttttttcttctcatacactaatctataaactatctatgacttattctctcataaagtacttaaatttatatgaagagaaattttttatatatttggaaggaaagagaaaaattcatacatatacacaaaaaaaaaaaaaaaaatagaagtcccgtatttttaaatcaaaagagggaaaatattatttattaaaagaatgaaagatgatcgattttgttaaaaataatacttaaaaagcgcgctaatgtaataagtccaacgagagaaattcatgatgagttattttaatcctcagtttctaattctataccaaaacaacatttgttttttaccctcaattatttatcttgcctaatccaacaagaaaagcatgctccaaatctcatcctctattgtattatttaatattgtttgttatgattaaataaaaattatcctctgatcatgcccattttctttcccttcattctattacctctctgactaaaagattaagaatctattaaatgtgtatcataaataattaataattcattctaaattcaatcaactaaggagccatggtcattgtttgatagaaacaacaaatacattagtttaataaggatcagtagcgatataataagaatttgagtaataggaaaaataagtcagtagttgaagttttgtttagtttcgtatcatttttttaagatcattaaactcacctttgtatttgtattgtttttcaaactttcagagttttatacttcaaaacttcacatgtcaattttcctacaaaaaaaattcttcacaagaaggagggtagtttttttttttttcttgaaaatattcttactgtttcttatcacattttatgatggttctaagtgattgagatttttcttactacagaaatatgctttgtaaaaatagaagtaaatggttttacataatggaaattttttcttatccttatgttttttttcttttaatatgatctattgaactagttaaatatttatgaagaatagagaatgtttcgtatagaaatagaaagaggtgcttcactgtgaatagatgaaatttattaaaactagtttttggtgttatctcggtacaaataatgtaagaatgctagtagaaatgaaaagaggatttagtcttatgtttaaattaactttttattgggtatattctgttaaaagcaaaatattgtgtgaaatgcacaacaaatgaaagttagatagatatttgtatattccattatttttctgtattagttctcaaaatttattatgtttagtgatcaaacataattacaaatgtgattttagtgttgttatctctttcaacatataatcttgcattaaaaatataattatatatatatatatattcaatatatattttactgtcgaatcatatctacataaattatttatattttttttttataaattatcattttctaattgttgttgtttgttgtaatgaaagattgattatgaagttaatcatttttgtcgttgacaaaattatgcttcaacaaaaaattaatacattaaatgaaaaaataattattattgttaaaaactaatggtataatgtattgtaataataacccctgaatgacttcacacatatatttttgctaggatattatgatatttaatactagtataatttaaaaatattaaatgcaatattaaaacataattaaaaaaactaaatttcattgtaaatagtaaaataaaattctaggacagataattataaaatcaaaaaaatatttctttaaataaatataagccttattttatttatatatttgggaaactttggaaaggatgcttatagttatagaggttagtttttttccactgattcaatctttcgttttttatgtaaagttttatgcagttacttctatttttctcgatcgtataagaggtgggaattttgattttatatacttaaaaaattaaaaaaatttattattaaactaaaattctaaaccctaaaaaaactatgacatttttttcaaaacccaaaaatacccccctcacaattcaaacgcactgcatcatctctctctctatctcgcatcccaaccgcccacccggccctcaccaccacctccgaccacccgcaccaacaccctcgacccaacccc

SEQ ID NO: 49270 - DNA, 2151 bp, Cannabis sativa
gctacagctgaggaagtccttccctctcaggtacttggcttccaaaattttacagcataacgactgagaacccttcaacaaattccacccgcacttggctaggaaagccagattcatttctttcgttttcctaaagcctaacccactcaatgacttggacaggcacaacttatcccaagctttaagatgaagacctcggttccctttttcaaagccccaccaaaaatccctgactaaaccatctatccttgagaccatctgactagagagtttcgtggtttgcatggcatagataggcatcgacagactcacagattttataagagtagctcggcctgccttggacaaagtcttagccttccaaccctgtaatttagaggtgagattatccaaaataaagttaaaatcaacatccttctgtcttgatctgaatagaggcaaacccaagtaatttataacacctttcagagaattaatacccatcgcttccttaatacctctcctcatacaatcagggatatttttactgaaaaagattgacgttttaagtttattcactttctgaccagaccaagcacaaaaccactccaaacaattctaaaaacaattagcttcatttaaattggccttaccaatcatgataaggtcatctgcaaagaaaagatgggtaagggtcggacctcccctacttagttttattccttgagtattacctagtcccagagcctcttccaaaagtcttgaaaacacctcagcagcacagataaataggtataaggagagaggatctccctgacggaggccacacaatggcataatctttcgacttgacccccattcaggcagatgttgagagtggtggtggaaatgcctaatatgtttttaattgttccactattgtttttaattgttctgttttattgtttttaattccactattgtttttaattgttctgttttattgtttttaattgttctgttttattgttttacgattatttaataaaaaaaatagtatttttataaaaaattccatgcctaataagttgatactaatagtaataataagttgataaaaaaaataatttgtttcttaaaaataaaattaaataagataagaaaggtgttctagttcaagtagtcaagagtgctctgaatggaaatttggattgccaattatttgatagttgatgtcttgatcatctgacttttctgttgacactttaaaaattttgtttcattttgattttgcttagcaaattaaaaaaaaaatattttctgtttagtgccataattagtgctcctttcctggcaataattatcaaaagcgagggtccaacaattcactacatagatggcctaacaacatgaaagaaaatgaggcttataatcatgaggcctaacgtcagttgcctctcttcaaaaatattctaatattaacaatttgactatctttattagatacgaaataagctacaaggccaaaaaaaagatactcaattagctcattcagccaaaaaaaaaaccccttttaagcatgtttgcagatttatttaattggtaggtgcattgttattgttctttcagctcacccaggtttgcatttttttttcaatttttttgggtaacattataatcatttttttgaaggaaccattataagtatattgtgttcgtatggtcaataggtccactaattaaaatgggccatgtgttttttttttttattatttttgtattttttattttgaaaattaaaggtattgaagaatatgcattattcctctatgatagactgatcttttcctccatgaggtggacttgagagctttaataaagcatagtgctaattttaaggacttaaataccatatcttttactcgtaaagaattgaattatgataatgttctatcgtagtaagacaggccctacatccgccgttcgatgtaatcatatggttttcttataattaacccttttaggtcaaagtaatgatgtacatatacatttatataaagtaatgctgtattattagtcataattttttttagattttatataatttaatttaataattatcataaaatatcgttaattaattataagacactatctataaatagtgttagcagggccggctttgaaatttag

SEQ ID NO: 49271 - DNA, 2371 bp, Cannabis sativa
atcttgaactgattttttatcaaaataaaatttaataataatttgatctagagatgttgtgacaaaaatagttatattttcggtatctgttcatgttagaaattgtcctaaaattggttatattaaaaaataaatttttttaaaattaagctcaggattctatttttactattttagaaaatataggatttttttttatctaacaaaacaaagaattcaattaataacttttacaaaacacatccaaaatggtatttgatttttattcatgaaaccctgattgattttcttaaatattttgttatattacaactggacatgaaatcatcagaaatttctctaaaactggtcaatgaagactgttccttctgaaaatgaaggaattttgtttgtattttgtttattaaaagaataataataattacctttccaacagcaaattgcatccaaaatcgtgccaaagctctttcataagggtccttaggcaagagaggagtttgaggccaagtttcttcgatgtactcaagaataaccagagattcacaaatgggtttgccaccatgaacaagcacagggatcttcttgtgaactggattatattgaagaagcaattcactcttgtttgaaagatcttcttctatatattcatactcaactcccttcagtttcagtgcccatatcactctctgactatatgggcttgcccaaaatcccagcagctttacttctcccattattatttcaattctgtaaacataaataaatatcagctatatatttatatatattatttgatggtaggtcatagtgtcttgtttaaccgaattgataaccattgaaatttccattcattcattgattagctcaatggccgtcgattatgaatgaagcttgacaaaaaggaccacaattttgttttcttctactttattcacgaatgataatgtctcctaattaatttccttaaatcttatgttatattactagtgaacataaggtcacattgaatagtggtaaaaatcaactagcaaagttgttcaaatcaaaggaaaataatacattcagaaatttctctgaaaaaaagtcaacgaagacttgcttctgttaattatagctcttgaaaaatgaaggaagtgcatacataatctcattttctttgtcaaccataacaaaaaataactaaccatttcatctgtaaattgcatccaaaagccagccaaagctttttcataagagtccttgggcaagagaggagtttgaggtcaagtttcttcgatgtactcaagaatgacgagagactcacaaatgggtttgcctccatgaacaagcacaggtacctttttgtgaattggattgtattgaagaaataattcactcttattgtaaatatcttcttctatgtaatcatactcaactcccttcagtttcagtgcccaaatcactctcggaggaaatgggcttgcccaatatcccaccagctttacttcttcatccattatcattgagagcactctattatttgattacaagttctgaaatatcaccaaaatgctttacatatacaagttaatatcagctatttattatatggtaggtgagaatttcttgtttgactaagaagacaaccattgagatttatattaattcaatgttttttttttgaaaaaaaaaaatagaaacataaactggacattgggtttaaacaagaaattattttacaaatacaaatgaatatgagctatatattatatgttgggtgagaatttattgttcctcgtttgaccaagtagataatccttgtttatttgtaaaagataagaaacataaacttggcattttcaaacaagaaattcgttcttatctttttaatgactcgttaacttacttttttttttttgttgaaagaaagtcattaacttactttattcatctcaaagtctcgaagtaagtgatccctttcataatttaatataaaagtaaccaatttttagaattataaaatgtttagttgattattatggtcagtatttctagaatcatagtccagttttatgtaaaaagacaaagatcctctctctctctctctagaatcttagtccatttataatattcaaatgaagagcgaactcttcactcatctttattgaccaattaaataaaatctagtttccatttacgttgaaatggaactaaatacatcaacaagaaaacttgaaacaaaataatatccataggcaacgaaataccaccaagcaaactaaacaggaactatttccacccttgtttactctcgtggaatggaattcgtattatctatctaatcttcgcatttaaacaaaacaacatgcacaacaacacaacgatcaaagct

SEQ ID NO: 49272 - DNA, 1053 bp, Cannabis sativa
gagaatcttgctcagaaaaatgacattcaagccaatgagcaagtgtatacatggggaatggtgcagcacaatctatacagaaaataggtaagacaaagttcttgtccacagataagtgtactgttcttaccctgaataactttattacatgttccacaaatcaccaagaatttgattagtgtatctcaattctctactgacaatggagtttattttgagtttcaccttgattattgccttgttaaggatcagaagactcttaaggtgttgttgcagggtactcttgaagctagcatgtatgtgttccactcattacaaataccatccatatttgacagaaatcaatcctacagtctaagtgttcatcttgatgtttcttgttataatgttcactctttaccactttcaaaacaatgagtccttgttccatttatggcattctaggcttggtcaccctacttccaagagtgtcaaacatgtcctgaacaattgtaatattcctcatatcaataaaatcttttaaatttctattatgcatgttgtttagggaaaattcataagtcctctttccctaattcagacacagtctacactcaaccactccaattaattcacacacacttatggggaccctctcccatagtcttttccaatggatactattactatgttcactttactgatgcctattctagattcacatgggtttacttacttaaaaacaagcctgatgcaatcaaacatattcattaatttcaaaacacaagttgaaaaggaacttaatctaccaattaaaaaccttcaatcagattggggaggagaattttaagccttcacctcatatctgattgaacatgaaatccatcatagagtttcatgccccaccactcatgaacagaatggtgtggctgaacgaaagcacaaccgtctcatagagatagctttaacccttatagcccatgcctctaccattaaagttttgggatgaagcagtgagagcctctgtctttctaatcaataaactctcttcttcagtactgaaaggtgacactc

SEQ ID NO: 49273 - DNA, 940 bp, Cannabis sativa
atagttggggttcgttggattcaggttcggtggtagataaaatcaagctttgtgggacgaatttattggcatggggcaaagactttacgggaaatcttaaacaacgtattgttgaatgtaagaaggaaattcgaagattaaaaagggcccgtgactctgactcattgtttcagtataaaaaagctgaggaagaattgtatgaaatccttacccagaaggaggtgttttgccgtcaacgttcaaagcaattgtggctggaagcgggtgatcggaatagcaaattttttcatgctaaggctacttcacggcgtaaaaataatcttatccataaacttcaaaatgaacattgtttttgggtggattgggacaatgggctgtctagtgtgattgttgactattttaaggatctttttgcagcgtctcaacctaattggcaagttgtggtgaataatgttcaatctcgtgtttctggtgaacagaatggtgagctgcttcatggtattaatgaagaggagattcgtaaagcacttttccaaatgcacccagataagtcaccaggccctgatggtatgactctgggatttttccaaaagtattggcatgaggttaagtgtgatgttgtggctcttgttaatgaatttttccaaacttgcactttgcctgacactttatgtaatactaatattgtgctcattcctaaaaagaaaaaccctacaacaatgagcgacttacgacccatctctttgtgtaatgttgtttataagatcatatccaaggtacttgctaaccgcttgaagactatcctacctcaggtaatctctgactctcaaagtgcttttgttcctgaccgcctaatttcggataacattatggtgtcctttgaggtgatgcattaccttaaaagaaagagagttgctaagaaaggttatatggcgttaaa

SEQ ID NO: 49274 - DNA, 973 bp, Cannabis sativa
aaaaaaaaatatatttacaaatatttaaactttattttttgaataatatataattgagaattttttaaaaaaatatatcattgatactaaatataccgaataagaaaaaaaaatatactaaggatccttttaaaagtagaatattaaattaccctatcatttttaaataataaaaaaaaagttcagatctgccaaaatgcaaagcgaaaaaagtagagagtgaaacccagattttttctttttgagaaaagaaagaaagaaagaaaaaggcattggataccttacctgctgtggcagttatatacaagagaacagacctcaattattactgatcttaatctgcaaagctaatttcacattaataattattatatttttctttgaagaatgaagaaactaatcattctcttgtcggaaataacaaacaacttctaaattttctattttatttttattaataagaaaataaataaaagaagaagaagaagaagacaatgtatgagtagcccaggtgcttaccaaaagagccagagggcaatggtggtgattatagggtgggtcttcttctcttctcctatatttatatatagttttttttttcttttgtattggtggatccttctttttgttttgttatgtgtattttttgtttgtctggtcctaatctatgtgtgctcttgtgatgtgaagagactttcttttttggtattttttggggtttggaatgtgtgtgagaaagagagagagaaaaatgaatgaagagttgatggaagaacgacttttatggagaaacaattaaagggtccctataagccaagagtttttggtcccctttgtctacgggtagtacatccaaattttggaattttactttctattttatcttatttttggtttttgtatatgaccattattatttcactaaattggtataaagttttcacattattttatattaatggtacactaaatt

SEQ ID NO: 49275 - DNA, 1651 bp, Cannabis sativa
ggggagttgttttgatcaaataaaagagaaaataaatgtgtaatttcagtttcttcatagtttttctggtttttttcgtcattttttgtttagatcgttacaagtcttcttttccagttgatttcaccggaattaatggtggtatttccctcattttggtttcattttggttgtattgctgatttgaacgatcggttcttcttgatcgttcattccgtgcggctgaaggtttagaacatgtggtatttttgtaaatatttgtatgtgggctgtataaatgttttaaaggtcggtccatagtatatttgtattattttttttttcccttttttgtatttttctgtttttttttcgatttaaaaaattgtaaagtttaaatttttatttaataaaacaaatggtatgatcaataatttttacaaaagacatggtctaaaatattatttactaataataatcaatgagtaaattgcggcaaaacccttaatatttttactttgctagaaattaaccatcaaaatccaaattttagcagcaaaacacccaaaactcgtattctgtaagcaatgtactacttcgatccaaatttagctgttaactgtcatattagattgttcacgtgacataattttttaatccacataaatttaataatttaattttttaaatattataaaatttatttaaaaaatcattataaataaaaaaaattaagatcttagaaaataaataaaaaaatttaaaataaaaagttaaaaaaacccatttttccctaaaaaaaacaccttcatctctttgcctccctctctttctgcctcgatgacctttgcaacctagacgtcaccaccgacggaaccccaccaaacacacctctacaacccagacattaccgccaatcagcttatttttctctccctctctctctctctgttcttttcttcttcatcttctcgcttatattgtttcaccatcttctcttattcttcttgtaggtcactgtcagatcttgaagatacatttagatttgggttaagttcgatcagatctagactgggacaagtcaaatatgggatgggttcccttgtccttcttctcggctacaatggcagacattaccccacgaaatcgagatctcagtcgtcctccgtatatttgatttctagatcacaaatccatagagatctttttctcattttcacttttccaaattcatttttgattttttgtatactttcgtgtataaatctggttatatgaatatttttgtgtttttggatttaagtatggtgttagtggtgatggttgcaccagtggggtttcagtggaatagtgtaatggtgatagtttttgtatggtgtaatggtggtggttatgggagagatgagtgttagtttttatagttcatatgagagtcgtaattgaagtgtagttagaaaactttttgatttaaaataattgttgaatctaatatgaatcataaaccctagatctcacaccagcgtcttccaagtcagcatcaacactccaagaatagagtgggctattagatttaatttgagataggaaaaacacaacacacacaacaacctatagtgataggcgtgtgagagagagagagagagagagagtgagagagagagagtgagagaga

SEQ ID NO: 49276 - DNA, 2029 bp, Cannabis sativa
caggaaaccccctacccaaagtgaccgccgcatcaatggacaacacaaactcgcccactaaaggaggacaccatcttcctagcctggccgcactgcacctcagctgtgcctgcaccaaaccagcagacccaaactccacaccagaacccctaacacccccattgacccctaaaacccgactattcccacacacgacagccccttgaaactcatccaaggcctccttggctaactctacaatcccatgaaatctcatttatctttttggacaggaaaaataaattctattttaaatttttaaaaattataatattaattaaattataaaaatataaattaattttgtgtatcaatatttattacaaaattagttaaaaaaacataaatatttaatagaaattaatttttgtaaaaatatcaatttataaatattatattttttttttaaaaaaaaaaactgagccttttgtttttttttttttaaaaaaaaataaatatccatattattaagaaaaatttacaccgggaagtgttgttttcattttaattaagaatttgacattattttaattaatacagtttataacgttatatattaaattttgaagtgccacatatactgtttaaattattttggtatattttgatagtaccgcctctttctcttcccaatagcaccttcaagtcctgaaagtcggacaccctcttccgcctcctctgtctaacattcaagattggagcactaattgaaaaaagtgtttcagtcatctatcatatccatgacacaatcggtgctagaattcgtatcaatgacacccattactcctcctccgacgaacgagttatactccccctctgacaaacaagttatactcatcacctccgaatctactccgcccatgtcgaaattcgatcacttggatattaataattaacaacaagcggagtaatagctctagccctaccgatggagaaagctcgtcgtgaacggcttagttggcactttcaaagttgttagagaagatggttatggcggaggagaaagagaatgagaagaatgataggtttaatgtattttttttttatatattttattaataaataaataaataaataatatttaaatttaaataaaatttaatgtatcaaacaattaataaaaaatatttttttatttttatatttagacattataagattaaataaaaataaatttatttttataatttttttaatatgtttataaaataatttgtaaataaattgaacagtagacttcatatatgagttacattaaaaaaaaaaagtaacctcaagatatctttttttttttttttaaaaaaaggaacttcaaggtatcttaaacaataaaataacataatatagcctaaaaattcaaaaaaaaaaaattatttttaatattagtcgtctttttttcttggagacagaaaaatatatatacatttcttacatattaaaatggttattttattatttatatatgtataaaattctaaaatttttaatggaaaagcaataaaatttttaatgaaaaagttaccaattaatatcttattcacatcaaatttttaatgaaaaagtaaccaattgatattttattcacataaaaagcaactaaatggttacttttttcaaaactcccaaaaaaacgaaaaatttctgaaaacgattttttttttttagttttttctattttcagtaattattttgaatttcgatatatatgttgatgtgacacaacggtattttgtgcaaataattttcttaaaggtatttttgtaaataaaattaattttaggtatagtattaaaaaaaccttattatcaatgacgatattgtcgtaattgatacttacttttactgaggactttaaatttcatcattgatacttactttcatgagttattactaataaatttttactgacgataaatcgttattgatagtcatcagtgacgaaaaaaatacctttcaataaccaaatctgtactgtcctcattaaaatcta

SEQ ID NO: 49277 - DNA, 878 bp, Cannabis sativa
  modified_base (841)..(852): a, c, t, g, unknown or other
agttacttccaaacacaccctaacgtatttgtaaatggtttggtattaatggaagtttccaaaaatattgtgaaagatcatcgtaattgcatgcaactaattacatactcttttattgaacaagaactttgtcatacatttgtaagtttacagaaaatattatacaaatattattcaataaaaccgttcattccgagtatcccgactaccctgatccacgtggcggatgcggattggtaaacaagtctgcggaatgaatatagcggggttcaatatttttttttttttttgagataagacctttgtactttatcactctaaaaataaatctcccaaaaaacaaaagaaaaattacccttaaataaatgacagttgaactattaattggataaaatacaactttatttattaatttgccaccattttgaaaataatatctacttaattttttttaatgtaacatagcaaactatgtactcatctggatccctattaaacattccacctctcatcttctgcggccaaagtttctgaagaaaatataattagttaattaatcaaatattcagctttttgaataaaataaaaaaaaaaattaataacacaaaatttgaataaaataacatgtagctaatgaaaaaaaatggagtaattaatgatgatagctcgaataatcaatttagtatatactttatctgatagtgtatattatataatatagatattattatagcatgcatctgattattttttctcagaaattatgatcgaatagtttacaattttgagaaaatagctcgaaactgtgagttacaggtgtttttatatatatatatatatnnnnnnnnnnnnactagaagaaagttacgtgcaaggca

SEQ ID NO: 49278 - DNA, 1999 bp, Cannabis sativa
  modified_base (33)..(42): a, c, t, g, unknown or other
  modified_base (1962)..(1964): a, c, t, g, unknown or other
ataaaaatataatatataatccaatttaatatnnnnnnnnnnaatacaatacgacttacgacgttccaaacaaacccttaattcattattatataataaactttgtgaggtttttcttcagttttctctaattaaaaagggtcacagtacccatgaaatctctaaacccttcacaatagactcaactcactcacacccacacacatccatcataactagttccttgctaaaaaaaattacttttagtagcaacattttagtcacagcataaatattttctgattaaatatgatttttagtcacaatatattcactcatagtaatttgtataatatgttttcaagcacgctcctattacaaatggccgtgggccaaggcaatgctctagagtttggtcacttttgtactattcttctaagttaaaaaaagtaaagcttaatattaattaggttaattaataaggttggctaaactagggttaggaaaatttagctagaaatacgagttattcaaaccataataatttgatatttttaagacgagcattgctatgaaaactactacaaaatgatctttttgcgtcggtcaacacgtcgatcaatgcctaaaactgacgcaaaaagattacattgagatttttcgtcattttggaaggaaaatttgattttttatgcttacatttggttaaatttttttttttctaaacacataataactaatatttgtaggatatgacaacttttatgatattcctaaaataacccccatttacatcaccccattacacaatcggacttccccatcggaccccacatcagacacaatcagaccaattgaaccccatatcggacccattggaccacccatcggacccccatcggaccatatctgctacaatttttttttttaatgtttttgtacataaaaaaaagtagcatcaggtgaccatcgagccaccatcggaccatatcttctaccatttttttatgtttttttttttttttttatgtttttccacataaaaaaaaagtagcatcaggtgaccatcagaccactatcggactaccattggaccccatcgaactatatctactaccaatttttttatttttcttttatgtttttgtacataaaaaaaaaagtagcatcaggtgaccatcggactaccatcgcaccccatcggaccatatcatcggactaacattggaccgccatcggaccttcgttttcaacctttactcattttaacaacaggaaggcatcggaccactatcggaccaccatcgggcgtgacaaaaaaccaattttttgcccaaaactcagatctggccattttcgaccctaaatctaacatctactcacagataacaaacattaatcattttattcctttgacaacattgcccatcataaatcacaaaaaaaaaacaatgacaaaaataaaaaaaaaataaaaaaatgggccgaatgcttaccttcaacatctcggaggtagtcgggtctcacggtggtcgtctgtgtaggtggtctgtgtaggcggtgaggggtaggttcggttttggtgagggtgagatgttgagagagaaccgagagggagaggaaaagagagagttgaggtttgaaaatgagaagggtatttttgggtacattaaaaagtagtcatatttttcaaattttgaaatgcattagtttaggcataaaattttatggtatcttatgcatactttttcaaatttcctttttggaattgacacagctttgcgtcggttgaaaaatgacatattaggcttttgtgacggttttaaaaggatgccatgcatcatcatttccaaaccgacgcaaaaaattaacaaaaaaaataaaataaagcccaagcccaataacagataaaaccctactatatataatagggcttttttcataaatgtacaacaaaaacaaaataattacaaaaaatgtgcnnnaaaaaattattttaaaaatttatacattttgaaaa

SEQ ID NO: 49279 - DNA, 1098 bp, Cannabis sativa
aactttgttttctgaaaactgttttattaaaataaggcgaaacaagttaaattgttttaaaaaaaaaaaaaattctgtgtttaaaaataaaaaacaattttttagttattatgccaaacatgcactaatattgtctaagcataaatttttttttcttttataggggtcgtacaaggatgggcagccattatcatgggtatatgttcgggctccatcccatggttcactatgatggttgttcataagaaatggaaaattcttcagaaggttgatgacactatggctgtacttcacactcatgctgtcgccggaaccctagggggacttctaactggcctcttcgcagagccgaagctcaattttttgttctatggtcactataacgagtacatggggttattttatggttttcagatgggaaaagtgagggaaggatttaggcaaatggggtggcaaatttacgggatagtgtttgttgttgtcctaaatatcattatgaccagccttgtttgcattgtggtgagattaattgttcctttgaggatgtcagaagaggatttggagatcggagatgaagcagcccatggagaagaagcttatgccatttggggtcaaggtgagaaagaagcgaatgctaataaccacaagtatggaggaggtcacattgagatggcgtaagtagaaatttcatgtcttgcatatggatgattgagctctctctctctctctctctctctctctcttgttactatgtttaagtctaatgtctgagttgtaataaaatcgttatactgtttctacattggttgtctttcatctaatttctttagaggtttgattcaattattgtgtaaggtcacaaaaacaattcttgggaggttctctcaataatggacaagaatttggttcatccttgtagtatattatctctctttctctctatgtctaatttgtaataaaatctttactgtttgtacactggttgttgttcatcttatttccaagtttagatacacacaaataaggaaaccatattaatacataccagccgaaaatacaaataataataaaatatttttgtcaattcaatatgccaaa

SEQ ID NO: 49280 - DNA, 756 bp, Cannabis sativa
ttttttttttttttatttatagtatcctgttatacgtttatgcaatttatttttttttggttaacattttgaagggattctgagttctttgaaattcgtttggacttgtagagaatcatggggttctatctcaaaactaattgggaatgagtgtagtagtccatgttcttatatatggctcaatactttcacatttaatccatgtgggacaatattactagatttcaataattgggattctctcttttttttttctgcttcacaggtttctctattttgtcaatggataaaaaaaaaaaatattaaacatgtagctcaagagcttagattcttcattcttacattttatctttctcctcccacaaatttaatctagagactagcaatgaaattctacactattttttaatatattattaacaaaattaatttgtactttttagtggtaattttttatgtcatgtttagtaacaagttgttactatagtttgagacacaactcatatgtatcttgatgaaacatgttcaattatagtttcagagtctcacacacaactcatatgtatatatgggttgtaattttttgtttttgtttttgtttttaagctatgtaattttacggctcataatgtagctaaaagaatatttgctcataatttaattggtatagtgaaagtatctactatactgtagacattatataatgatcgggaggtctaagttttttttatctatgcgacttttcaaaaaaacaat

SEQ ID NO: 49281 - DNA, 1273 bp, Cannabis sativa
ataaataatacctagtattacttgaatttaaataaataatgatacatgaatttaaaaatgaataatttaaaaaaatatataaaaacaacaaaaagaaattataaaaatacagttgtatggatttttaaatatttttgcgatttttaatattttatttacatagaatatggtcttttgatgtattttgatgctgtatttttattattttgttattgattttttattatttttatattattttaatattattttcttgttactttcatgtgaatttttattattttttatgtctttataaaataccgtaaaaatattaaaaaaaaataaatataaaagtgtaaatattttacaaaaaaaataaccattcatattattttcctatttaaaaatataaccaacacattacacaatccacatggtatattatttcttttcttttttaaaatagtagggaacttgttagaaaaaaaaaatatgtgttagggcaacatatcttaactcaatagtcaatattgaacaccgaccatggtcaaaaatggaaatatgagaaaaagcaagccataaatttaaaatatgtatatatatatatatatatatatatttaaatacacttttaataagtataatatgttgtattaagaaaatttagagtttttatttttaatttttatattttttatattattttatattaaattaaaaaaaaattatttatattatatggattgaagttgtaaaaaaaacttttaaaaaaaattcggcaaaaaaggataaaaaaaactattgagtttgaaagtattttgtatataaatatatttttaatatagtgtaaaaatagatattttttttcaaccaagcatttataaaaatttaaatttttcatttattatttgttattgatttttttttttttttttgaacaatgttattgaaataaaatttaatagtttaatttttttaaaattttagtgtaatataaattgcaatgagaataaataatagaagtgaaaaaaaaaaatacttgagtgggtaggtggtgggtggtgcaaggaagttaaattacatttgagcagtgttattaagtattagcggtgagtagtattttttagatatgtaattttgcgattaattagtgatactctttaaaaattattacattaaattatttgagataagatacttgattaaatcaatatcaatattaacatgtaggaactcattaaaaattattacatgatatacgattaattagcatttttcattacatttacat

SEQ ID NO: 49282 - DNA, 1150 bp, Cannabis sativa
gatacttgacaattaaatcaaaaataaggtgtaaagtgtaaaatttcctataatatatatgtatatagagagcattgttattgagcatcagtagtgtctagtacctctagatatgttgccttgggattgactagtgatactccttaaaagttaattagaccaatgacaatattgacatatagaagagtactagatatcagtgataccttttagcatttcatatatatatatatcgagaaatgctaaaggacaccagtggtgcctagtaccctcttatgtattaatatcactattgatccaattaagtatcaggtcccatataatttaatataataacttttagagagtatcgctagccaatcgtaaagcgatatgtctaaaggtgctaaacaccactgatacctaataacaatactcatatatatcaattagttaattaagccataaattatgctgacttttgcaccaaattgagaggtttgggaagtgatgtgtgtagaaggtataagggtaactaaataggaactcatcataaatggtaagtttgacttttgtggccaatctattttcaaaatatacatagtaatggaatctgtttgtattgcaatttgcaaccacataaatatacttcccatacaaaaaaaaaaaaccacataaatacaccataataaattaattaattatagcaaaaattcaaacataaaatattgaaaaagagagaggaaagactagtacatgtatcatgcatatactcctcaataataaataacaacgttggcttattaattaatatttaatatgtgttttgcgtgtaaaaaaagaaaataattataaatgatagtcaagaaagtgtcctaataaacctgcaatatcttttgattacattttttttttattgcttggctgaatttatttatttgagggttatttcaaaaaaaaataataataataataaataaattacaaaattatttattataattacgaaattttaaatatttttgtaatttttgtaattttatttattgaaactacagtcttttaaagtatttttatattatacttgttattttttattttttgaaggaatatatattaggagacggactcacataaaagcaaggcgggacgatcgctccccataaaaaga

SEQ ID NO: 49283 - DNA, 1189 bp, Cannabis sativa
gctatatgggtggagaggtaaaacaattccctatttgatgtggtactcataccacgccatccagttgagggccagtctatgcactagatgatcccacaagggaatcttgtaatgaatgtcacctactagcccattggcccataacctttcaaagctgtcaatagagatagaagatacaggggagatccacttgcctcccttagattttgcatatagtatcttaggctcaaaagattgctccaagacataataaaatgcaagctctgaaggcttacctagcctctttagcgggttaccattggcatcatagtgacccaagggacaatttgggaggactaatcaagtcatctacctactcctcctcacttttgcagcctcctctagatcagatacggtattcggactctcaaccccatggtcaatctctagctcaacatcaacacgggctgagaagtctcctccatcatcctaacttgacctcttgtggccaccctagccacatgagggtaatatttaggcacgctacggaaggtgtatttcgttttgtaaatacgaagtaaatgagggacctacatagctatcatttctcttattcaacacccggtgctgccaacatggaagaaataaggggaggtgagcagcctgacaaagctacaaacacattcaagtcaactgtacccaaaggtaccttcaaggtaaaacacaaggtacgtggtgaatcatcgaacaagtacagtcttaagtaaacttacgaagacatataaaatcactacaaagccttatacagagtttctaagataaactaagcataaggtcacaattttatatgcctcaaaggcaatcagaagagcctcactgacgtcaaaagagggagaaaacctagctcccactttgagctttagccttggcagaccagggttctaggccttagtggccggccagacccctacacttaccctagtagctggctaggaaccgtagttccaggcataggattgccagcctatgggccacaaccccttggccggccagaccccttgataggctcccttggccaaccaagtcttgaataagacctccttagccggccaggatgtgcatggattagaactcgtgttttctcaagaactgaaacatgttcgtcgtgactcaatgagttgagaatcacaacaaaggtcagattcaaatc

SEQ ID NO: 49284 - DNA, 2103 bp, Cannabis sativa
aggtgtttgagtatcaacccacactattcaaagtgatactcaggcctttgtggaagactgtgatgaacacaatcgaaggaggagaaaatccaaggtcagatcttgatattagtttgctacagacagaaatcatgggctagagatctgaacggaatgagtcatattattctgctgtcatcaatgtaaggttttttataactcttatgtgtttatttatcgttttaggaatttcatatttaggatgttagattatagaattataatcaatatacatgttaataaatttagatactagtaaaataagtctccaacacttaagatataactctttcttggaagccagtcagggtcattcaccttcctttacttggatcaatctcatttggaatcgggatctccttaagaaagaccttgtttagaaagtttgagatggaagttgcattagaaccttagaagattcttatatcccgagtgtcgagtttctgaattataagaatgataatagaccccattatgatagagttagctattttcttaatcaaaatggtcaatgggatattggtaaacttagtcattattttgataatgatgatgtatctcaaattctccaggttcctattgggggatgagtaaaaatgattacttattttggaaattacatccattaggtatgttcactgttaaacctacctatcattttgctaatactgcttcacttcctcctactacttctgactacagttttaataagagatggtggacgaccctttggaatttgtgtctccctcctaaacttaagtttttcatttggagagtctactatcacatgcttcccactacttctaatttgttctttaaaaatttctttcttaaccctttctttctttctgtaacagttttaatgaaactgttactcatgcactcttagattcttccagagcaaccatgtatggaaagtctctccccttaataaattttattttgaacatataaacaatgatgttagagagtttattcaatctgattttgtttctcttaataaggatgatttcatgatggtgttaagcactctttggcaaatttgggggaataagagtaataaactctttggaaaaacctatatgtctcctaatgatgttgtagaatgggttagttcttatattttggattacgaaagcaatgtggctgagggcttctaccagttaaacactgatgcagccatggatgttaagaaaaggaaggttggaattggggtagtccttaaagattgcaggggcaatattgtagttggtctttcaattccactagcaggactcactaattttacaatggtcgatgctttggcgttaaaatctagcatttggtggtgtcataacataggggttcctattgctattgtggaaacagattctaagctactggtggataaaattagaagtaaggaaagggatctttcggttttatctgatgtaattgagaatattaatagctctttatctttattctctgaagcttgtattagatatgtatctaggcaatgtaatgttagtgctcataattttggctaagaaggctttagagcttgatgaggagttgatctggaatagtgttattctagtttctttgtaatgtataacctgtgtttatttgcctatctattgaatagttactctttcaaaaaaaaaataataatatataaataaatcaaaataaagaatacactaaaaaatattttgattagagaagataagaaaactagaatgacctcttgttcaatcagatagttgcaagcaactattagaaatcggcgagcaacggaggtgaccaacaatcaacaagtgaccagcaacaaaattgtggtgatgagatttttataggaacaatatagagaagagcgatttttttttaggttttcttttcttttgttttattattaaggtaagagatttaagagttgtggtattttgtttaattaatttggtagttaacttatatgtgtttgaaaaattctacaatgcaccccttaaaatggatatattgatgcatccttatctgttttaacatccgaaataattttttagtcaatttttttctcatgatcat

SEQ ID NO: 49285 - DNA, 1737 bp, Cannabis sativa
ttattttatttgagtaataatataagtgatgacacgataacaaagcaatattgtcacaattacaattaattgagctaataaagtaatgaatacttttgctaaaatttccaaaatctaattttttatcaacaaaataaacaaaataagtatttataccgcaaacaaaataaggaaggaagaggcgaatcttattcggtttgtagatgcttggtctcaaggggtggcgagaattgcaacagtcgttcccctgggcgtttaaagttcaaaccacaaaaaatacccctgttttgaaagcaaaaacccgtgcggttatgcttgctctctgattctcaggtccttatgaatgctttggctatgggcaagtgtcctccaaaatggtcttgcttaaatgtttctttgaaaattttagatatgtatcctagttttagagtctgtaattttttcttggcttagcaaaaaaagctatgtatcaaggggagggacatcccttgtgattcccagctattttttctagttaatgaacttgaagttcttccaaaaaaaaatataatttttttactacacagtataataataattaaagaaaaaactttattttaaccgtgtttgtttattaatcgtaacggtaaaatacttatcataggggaattttacattagctttgagatgacaaatagtaagacgcaaggaaaactggggaggagtcataataatctgctccctattattcttcttagagcctaatataaaaaaaaacaacaaagaaaaaaaaggcgacgattggaggacaaacaacacaaaatatctgtcacacaaatctagttggaagaaaatttgaataccccagcaaaatacttggtagtggcgggatagatcccgatcgccttctaagctgcatgaaataattgaatgaaaattaatgtaaagacaaaatgatttccacctgagcttctaattccaactcaacaatcatggatcaacagttggatggatagagacccggcacgggagaggagagagtcctccactgttgttggaatctgcaactaaaagggtgagggaagctccccagagtgggatgattttctggactttgtgttcttagtagatgctgtataggaatcagcataactgccagtagtagtatacattgatgttgtggggagtctactctttggcaaacccgttgtatcaccgcctcccaagctgtaacccttctcgactgtttccgcttccaaaggcaattcttcaagcgtctgccccaaaaacgtaaaatgttagtatcatcccttaatttcatggcgtgttgacttaggtggaatttggttgagaatgggaatggtctttctttccatttcaaaatagaatagtcattccaccaatggtgaaaaagccattctattggaatgataattcaatactttaaaatacaaccaaacaaaagaatgtaatgaaaattatttcctttccattccgttctatttcattacctctaaccaaacgccaccaacacttttaccaccaacataaaaattggaaacaattaaagaaagcatacagttaaagctgtagaaacattgaaaatacaagttggggaaagaaaaaaaaaacaagtcttaaaattttaaggtgtagggataagaggattggtagtagatgcacagtagttaataaatagagattgtaattaagttcataatacgctgaaactgttaatgtaaaaaaaaaaaaaaatca

SEQ ID NO: 49286 - DNA, 1734 bp, Cannabis sativa
  modified_base (1472)..(1473): a, c, t, g, unknown or other
ttttaatttctgttactgaatgcatataaaaatgaaataaaaaataaaagattgcaatgctataaaaaataataagaaatttaaaaaattaaaggtaaaatgatttcaatgcaatgtgcacttctaattgaatggattagaaaatttaaaatttgtataccccatcttatattagttattaattatttcaaaacgttgaagttatatgagaagttttttttttgaggaaaagttatatgagaagttaatttagctagttgaagtatttcataaaaactccagatttttgtatatatttaattaggtaatatagctgctattcgccaagctaatttaatttttttagtattacaataaaaaaaaactatttatcaatataataaatatttacttaaaaaataattctaattctaatatataataaaagtaaaaatttcatattattaatagttttatttatcaaaagataaaattccataaaaagaaaaaaaaatattctattcacaatcttattaattaatattatttggagttgtttattaagaaatataaaatttattatatatagaatttcaaattaatttgttacaaaaaattattgttataaaaataaattaatagggtaatgtagaaaaatattagctagggtatagtatcttacctgttgttaccaccgtatcttactaaacttttaaattttaatacacatatatgttataacaacttttaaattttaatattttttatataatatttttaataatatcatgagtaattattttaataaatttcatatttttttactaaaaaaaattaatatacattgtaaaattttaattttatttggatttcttaattaattttagtttcaaaatatatatcatttgaataaattaatgtaaattttataagtgagtaaaatttgtttgccctcctaagggcatcaagtatctgtctgccctcttcgtcctctatgcctcccaaaaatggggtatgcccctccccacgaggttgcttggtactttgatttgaagtccaccctcaagcaaggcaggtcggggtacttctacttctctcaaccaggattcaagtgattgacgggcacggacgatacggccatcagcaagattgggcgctttgctgatgagtacttcatggtggatggcacgggcatcactcgcactcgattccagtagattctgacatatcaccgccttcccctagctcttgctcttagagatagagctcaaaaacttgcctggctcccgggggaagaccggaatattatccagttgacctctgaggataatcttgtgaggtatgggctctatcccaaggactttactcctaagtctgtgatggggaagaagaggaaatctggtgctggccgaaccgaacgagctcattgagaggatgagtcgattcaactaaagtgcgagactaagttgaagggtggtgcaagggccaagcannatgctcaggagcccttgaatcctaaagatgaggcagaggaagagcaggtgactccattgaaaaggaagaagaaactaccggccccgcccaggcttgttgaacatgagattcgcataagggagcccatttcacctgttcggccatcccctctcgtgtccagaagaggaaagctgttatgtctgaaacaagaccggtgtcaggtgatgatggacttctgagtcttgttcgggcagtcaccttgcatattacttcatcttgttt

SEQ ID NO: 49287 - DNA, 816 bp, Cannabis sativa
gacctaatcttcccttcacgaatctcgctatcatccctacgcaaaatgtagtggtctcaattcctattctctgatgtggagtgacgctgccttttcatccctttgtgaaggccatcctcaaatgttacgatgtttctcccttccaattaactctgaatagctatcgcataatattgggatttcatgcggtgtgcatggagtatgctcgaggggaaccaacgatggaagacttagctacttttatgatataaagagcgtcggccatgacaacggctttcactatttcagtaaatgggctaattctgaaattaacggggtagaaggcacagtttgtaatatgggagattggaaatccaaatggttctacgcatttaaaattctagggattagagttgacttcaatcgttgacctagtatgtcgcatgtcttaacacttagcatattttgtcattatcttttataatttctaatgtctattgtcactgaccgtagatagaccggttcgatctatattggaccctactcgtcgggagatcattgaagttttaagtggccttcatgtagaagatcgcgactggcgattactacgtactactacaaaattgcgagaacataagctgatcccagagaactccaaacttcagtgagaactagtatacaaggaaccttctaagaagcaaaaggaaataatagaccagcgcctatctaaacagactttgagaccaagctcaggtaatatactatggcatataaaacacttttccattttgacaagaagtacttacttatgatcttatggcagaaacgactttcctt

SEQ ID NO: 49288 - DNA, 931 bp, Cannabis sativa
cattgagtttcaagtgtccacgaggtggtggctgcaatactgcaggggtagcaactgaagtaggtggcagagaagaggctgtaaaaggttgtttatatttcagttgagctgcacaaaaattattcaggtaattggaggaaaatgcagcaagtgagacagcagatcttgctgattttccatgaaccacctggtttcgctctgtccaaatgcaccaaagagtgcaaatgatgtgctccatttcagcctttgagtatatagaggatagatgcttcaaataatctcccttgtatattgcagcaactttattccaatcaaagacaaaaagtgcaaaacgccatacagcttttgcatattgacatccaaaaaatgcatgtcctattaattctcaagcttttcgacaaacggaacaagtggcatcagttataattttccttttgaccaaggttgtagcaacggggagtgcatcatggatgacgcgccaagcaaatactttaattttttctagtaattgcagtgaccaaacaaaatttccaccaagttgtgtcatttgtttagctcgatgaatgtgtctgctctgccaattttgaagcaaagtggtaacccgattgattagcgtatatgccattggtattatggtgctaaatcaacctgtcgttactaggaaacaaactcaatggaatggtgagtattctgtcgacatcagttgggttaaaatattgttggaggagatcaacatcccattggcgttcatcattgattagattagcaacaacagcattttgggaacccgtatagtgaaatggcatgaccaggaagccaatgatcagtcccacaattcacatgtcgaccctctccaattttccatctcaaaccaaccaataagagctctctaccgtattaccttgccaagatagtgatggagaatgaccat

SEQ ID NO: 49289 - DNA, 1309 bp, Cannabis sativa
tttttttttaccttaagaaatcttttaaaatctgccccaaaaattactttattaaaggttctcaaagctcgatgatactcacatctcagcaaaagagcaggtcccactagtgagccttcaggtaatgtgatatttggcaattgagggggtaacctatatatacagcacaaactaaaaacctcactaaactgcactcataacaatatacaataactcttcaaagctgacaactatatataattaacattaataaacaaaatcaaatttggagaggaaaaagaaaaaactcacacaaaattggtataagtggctagattggaccaaaggaaaagtaaggtgaatgtgattaagagagcattgcaaaataatgtaaagaattggtaaccaatccattctgttagaagccatacaactgttgcaccagcaagtacacatgctgatgtttctttgttcctccaaagtatgacgtcagcggctacatacatacatatatacatacaattttgaaaatgaaaaaatatgggttttgtgttaatcttaattaaaattaaataataatgtaaaatgtttacctaagccaccaccgatgaccaaatgaagaggtctttggcgaccaaataagcgatttcgacaagtaatacaatgaacataatatttattaatctcaggatcagatgagtattcatcatcagggatatcattatcaacatcactatcacctttgtcgctcaaaaaatcacaatcagcaatatccatgtcctctcccggatccatcattgttattattattattattttctttttgttaaagaatgaaggaaaaaacaatagaatcctttgttttgttgtatacgatccaagatcatatatcatggggagaaaagaggagaagagtatggtgaatggggagggtttgagtttgaggatttgatgagtaaaattcgtggcgcattataatggtttcgatgatcgaagaagataatgactgcgttttcatggccggggatgtgatcgttttggagataaacattcctttttaataaagggccccatcttaagtgaaactcaatgaatggttaaaatgttttgccacgtaatcaatgtgtgtcaactttgtgttatcacatattattactcatgaatatatttttgggtgattaaccctcctaaaaggaatatattaatgcaatgacggctctgaagaaatggggaactaagacgataaaaaattttgggccccttaataaataaattttaaaaaattatatgttacatttcatgacataaaaataaaaaaaaaatatgaaat

SEQ ID NO: 49290 - DNA, 1534 bp, Cannabis sativa
tccccttaaaaatccacttcccgggtatcaacccaatcacaaataattcaattcctaatcacaagcaactctatccgaccatgtattgagcaaaatcccacaaatccacactaaaactccaaaattctccaataatccaaaaattaaccactaataattgtatagagagtctagaattattacctcaatgagaatccacctttattcaacctccattgaaggaaaccttgaagttcttgaggaagaagaagatgaatagtggtatttgaaatttgggtgaggttttagggatttggggttgattttgaaagggagagagtgtttgatgagaggaatattgatttaggatgatttgggatgagagattgtgattagatttaaagaaaaaatggtttagaatgagatgagatgaacaaaaatgggttttgaagagaggtttttcagaggtggttgttagggatttgaaacatttgtgttttgaaaacttgttgatattttggcttttaaacccgtcagacaaatctcgccgtggccatgagtgggctcgccgcggcatgataggtggtcaaaaatccctctctgcctattttgtatggccgcggtggcacttcttctcgccgcggcgagataaccaccaaaaatagcctctctccccagccactatagccgcgacgacactctttctggccgcggcgagataacctcgaaaaaaatggctctctgtcctccttctcatggtcgcggctagaacacttctagccgcgtctactgggccgattctgaaaaaaaaaattctttctttcttttttttttcttttttttttctatacagtacaaaaaattaaagaaaaccaaaaatttagtttaccaattcactaactataaactaaaaagaacagaaataaaaatagcaactaaaacataagaaggttcaactaaagcatcaaaaaaatttgggttgcctcccaatagcgctatctttaatcgtcgcatagctagacgttaagcgagttcttcatagtggcgccagaatcatggcggacttggcttggtcaaattgacctcccaagtagagctttaaccgctgcccgttaactttgaaagtctcggggctttcacctttcagttgcaccgctccataaagaaacactttgaccactgtaaatggccctgaccaccttgactttagcttaccaggaaacaacttcaaccttgaattgaaaagtaaaacttcctgcctaggttgaaactccttcctgactaagcttcggtcatgccactttttggttctctccttgtagatcttggcattctcgtaagcctcatttcggaacacctccaattcatccaattgcagtaatcttttgtctcatgtagcttttaaatccatgttgagagtcttcatagcccaatacaccttgtgttctaattccacccgtagatgacaagcctttccaaacaccaactgatatggtgacatcccgattggcgtcttgaatgctgttctatacgcccacagtgcatcatctaactt

SEQ ID NO: 49291 - DNA, 1349 bp, Cannabis sativa
tttaaaaatattataattatgatatcacacattattatatataattttttttttctttattaaactattatatatattgcacttttaatttgttattgtataaaaaaaatatagtatcaatgccattgtgtggcatcaatacaaatttcaagaatagcattcttttatctccaatggtatagcatttttatattttgctacataagctttccatctcatcaagcattctccaaaatattattaccattgaagatgctcttagctgccttcttctgaataattaactattttttatcactatatcatcttacaattagagagcaatactatttaaaaattattatattaaattatataaaacttaatacttactagcactagtgtcttttaatatttttcttttttataaattaatttaaaaattcagtacttaactatattaataacaataataatactaaatacttatctattattccaccattctattccatcaaacaaattagattatcatccttttttaactttcatttctattctgcatcatcaattctctatcatttcttttctcctccccacctaccaaacatagccttggtggccacttagcatttcctttttctttttattttcttataaaacattatgaaataataattatatttttattaacacatattcaaaaataaatatttttgaacccaatttattagtgccctctaaatttttaaaattcccccaaactattcaaagtgatgaaacacaagacttctattaaatttcatccaacatgattaagagaatattaatataactctttacccacttatatgtattgctcatagggtggacatcaggtaagttttctcaggtttaaagtttttgagttcgggtttgtaatataggtaccaaacctgcccgtgaaagagactgggtttttgggtgggtcgggtacaggttgagacacgaccgggtgggttgggctgtgccttttttttttttgaaaaatatctccttttttttttttacatgttttcataaaattacacataatttcattttttttttacattttttgaaaaataaacaaataggtttttcgggcaaatctaggtttgacccaaattttgggtgtcacaatttcagaacctgaacccgacctagtgggtaaccgggtgtaacccgaatcctccctataatttttgaaactatttttttttatttcaggtcgggtgagtttcccaaatgagtggattttcgagtacaaacaccacatatttactttaaaataaaaaataaaaattataaaataattaataaatgttataaatattaataattatgtggat

SEQ ID NO: 49292 - DNA, 909 bp, Cannabis sativa
taccacatgaatgtaacataaattaaaataaatatacttttatatgttaaagaaagaaaaaaaaactaaggaaattaagttgatagacttatttatttgagttttactttgttataaatgtgtgtataaatataaacatataattgagttttaccattgcagtatttatattgttgacataggttttttgttttgacctcaattttcctaattatttttccatttcagattttcaactttgtaaaatgtgtggtttgtatcttattttaatactttataattttttttgagcaatactttacaatatatatttaaatcaactacttacaatataaaatattgtcaaaacaacaccataaacataataatgatcaagtatttaagaaactgctttccaatttccatcatatttttcttcttcttcttttgaatgtgtcataagttagctttgaaaagttgttatgctcacttctataaaagttgtttaaaaaaacaagagaaagaatattagaatagtgaacccaaaatgggggttcgagcttaaatccaaattagggatagtggctctttgatcggtatcatcacaagattgaaatatttttactgttgtttttttttttcttgctttttctcctctaaacaatgtctggccaatgtgccattgccagctcaaatagattaataggacaacaatgtttttatataaagtagaaatagcattactattaagcaccagtggtgcctaacacaatctaagcgtatcgcgctgtgattggctagcgatactctttaaaaactattatataaaactatataggaacttatacttagttggaccaatgacaatattaacacatagaaagtgctaagcaccactagtccctctaccatttctaagtataaactaag

SEQ ID NO: 49293 - DNA, 2031 bp, Cannabis sativa
agtaaaagggcagggtggggaagtaagacactcatcatatttctataaataagcatgtcaatatttcctggtatgatcaagtttcccacagaaataacaaaaatcaggtagtctctcatacttcaaatcaagccacttaataatttccctcccatcttaataaacctaacattcatacccctcctaatagccaaattgacatcaagcaatattctaatccatagatacgacccagtaccctccttaacagtagactaatcaacttcaataagatccccaatttcagacgcaataaaccttcctaactcataggatgtgcacatgaacggtatcccatatatctgaacccaaaaaggagcataatgcagttgttcagagagaataggaaaagcactatcagggacaacaaaaacaatgatacttggggcaaaatgccagggttatccctctaaaatcctttccttgtcaccctcacaccaaaagtcacaaggaacaagccatctgcatgttcaaaaacaacaagaagaaatcggcattgtgatgaccgaatttgagagagagtttccatgagtgaagaacgattgaaatgtctaatagtatgtaaacgaagaagaagactaatagtaataggagaattagaaggacccacatcataagtatagacaatattttcttctgaagttaaagcaagagaatttgaaacattaacaagaaaatcatccatatttggaaacacagaatatgaaaataagaactcaacgaagaaagtacaggagggatgaagatgaagagaatggtaccttatacgacccttaaataggaaaaaccagaaagccctatgaggtttcctgaaggatctgcaagtcccatccagaatcgtaggcaaggtaggagaaatgatgaaatggacatgttgagcttcaattttccagctctccgcctccattttgccaaaattgaagggttgaatggagataataatgagattttggaggtgaagagatgaaagagggagagagaggccaggtggagcaatttgggcgaagagagaggagatgtttacatttaatgctctataaaaatattttaagatgggatagaagaacaggataacactctgagcaattaatgctggaaaaagtgtgtgatgaaaggaaatgctaagggaaaagaggtcgatgggtgcgaagtgagggatagaaccaccacaatacactcttgggtggaccagattcaccatggttggtacagagagattggtatgcatatattttattttaatagttttctaatataattagcataaaaatccttgttgtttaacaacactatttttttttttgaatagtttacgaacactagttcttttttttttttttttgaagcaattaagaacactagttgaatgcacataaagcaggagtatttttttttaaggaaaacatagtaacttattaaactaaattaattgttatagaagcacataaaaatttaaaacaagcatcagtccaaatataaactcatattgaactacaagcatttttcaacttaaaataaacatacatattaatatgttggattaatattattatagaaatgtatcttacaaaagttatcaattagactatttatttcttaaatgacaaattaatttttcaataatacaaaatattactttgaggtttatttttaatattttttgtttgttaatataatcaacttaaaaacaatgtttgacatgaataaatgtataaaaatataactagatttgtatcgacactttttagattttattagtattaagttttatttttgacagaaaatcagctcatcattgtactattttgtaccatttgagaaaatacatagtttaatttatcatttaataaaacagatagtctaattgataacttttagaaaataatggttcaaaatagtattaccctaatatatttaactttatgtaaataatttataaaattttgaaaatagctaatttttttaaagtaaaataaaaaaggactttttttt

SEQ ID NO: 49294 - DNA, 1821 bp, Cannabis sativa
aacataaatgacttctaatcttttattgataacaaatcagattagattgaaatagattttatttagggcataaaatcccaacagtgtggtggtgtgaaacgatgatgggtgcatccgggcattgtttgctactaagatttcatattcctccatcgtccacggggaacttatggttgcattctggggtgcaaaagtgctgcagcaactgggtattatggcagctgacttgctttccgactaccaattgctggtgtctgcaatctcctctgcccaatctccccactggaatctatccttctgtttgacaaactttgtaatttactttcagtggttaatgtttcctccttttgggtgcctcggacctctaatcgctgctcatacgtttgctaaatggggctttgaacacaactgtaatggtttcttaaacttttaggaggtgagtcccatgtattaactaagttacttttcgaataattcaattggtttccgtagaaaaaaaaaaaaagaaaaaatatatttagtggggccaggggcctaaggtgtctccgcttcttgctgttctgcgactagtaatcatgctggtcgaagattttttattgatgccagtgccaaataattgaataataatgctatttacaaaaagtaaatatattaataataatataataaaatttcgcaataaaacaataataaaagtttgtcagccacatagccagaatatgtaagcgtttttaatggggggttgtacatgaaattgtcattgtcacatatgtaatatgattattatttttcaatgcaattttatcaataccaaaatttatatttagtaacaattatttatatagccccatctacgaaaatttcatttctcatttgccaaactttatgatctgttactttgctttgaatgtttggttagctggatttctcgtgttttaaataatgctgcgcatactcttgctagatggggtctgtcccattcttgtaacggtttattacgtttttgggaggtgagtccccacgtgctcaccaaactttgtattttagcttaatgaatttcaatttcttagcaaaaaaaaacaattatttagtattattttatctttttcttttaaataaattactttatggcagatatataattactttcttttttcaaaagtcacaaaaaacttttatgttttcttctttcaaaaaaataaaaataaataaataaatcaatatatatagaactaacggtcaaaattgtgatttcttttaataacttataaatatgtataaaatataaaattataattaacttatggtatttaataatttattatgagtatgagaatatatatttagtctatattatattaatttatagtatttaataaaatttaaatatttaaataatagtatgtgggattgtggtagacaactttttgaattgtcaattattgaagaaatttttataatgaaaaattattaaatttttctgtgaaaaaaaaaaaaaataaagaaataatattttaaaataatgtgtacgtttacacccaaagaaactatgcatttatatatgacagcaatgcatttatatataacgtaatctttaaaaatctctaaaattatttctctaaatctatacctattaaaattgcccatatatgactccatttgattttttcccataatacccctctcatttgaaaaataaatcccaataaaaaattctctctctccctctcggtgaccacgcaacaccacgccgccttaccacgtccggccaccgacggccacccaccaccatcgacagtagcctccgaccaccgtccgacc

SEQ ID NO: 49295 - DNA, 900 bp, Cannabis sativa
tcagaaagcatggagcatttcttgaataaattcccattctatagtgtcatatgatttttgtaagttcaacttgatcataatcatacgattggcctttgttgatttcctcccataatgtctaatgagatcttgacaaattaggatactatgagcaatgaatctacatttgatgaatcctctttgattcttagccactaaattaggtagtatgctttttagccaagaacaaatgatctttctgtggctgccttgtaaagcacattccagcatgctataggtcggtagtcacccacagtccccaattaagtctcaattatcttaaaaaaaaaaactaccatagccatctgggccaaaagctttgacaccagggatttcaaaaacaacctcttttacttcatttcaagagaactcaacaagaaataaattagcatgttaattagtaataagaggccactgaataacaaattctgtcaaaacacttcatccattttccattttactactaagtagattttgatagtaagatagaaaagtttcagtgacttttgaaacatcatcaattctttctccaattggatccacattgtaacaaattctgttttgcctcctttctctcatggtagagtgaaatagagctaagtattcatcttcctctttggcccaatccaacttagctttttgctatgaaaatgaacgatatgctttgtgaacaaaacagaataatgtgtatattaagagctcaaaaatgtaaaaaaataataataaataatggaaaaattgaaaaatattaaatagatcaattatatgttggtttaccaaattattaattttggaaattaacacaacttagatgatcaatattctctacgtctcattgtttatatcatatatttgtctccc

SEQ ID NO: 49296 - DNA, 1618 bp, Cannabis sativa
tcggttacaaagagtttcacaaaggaaaactacattgggctttttttggattaccacatcctttaagaattgtaaagcccataggttcccaagcccatggcaattctaagataaaagagtcataatgaatggtgggcctcgagaccagcacccaccatattggagttttttggattattgatcgattgggctgaacaggagtcatcattttgttcaacaataccatcagtaaggcccatttcaatccttctcctttttgaatctaatactaagagacaattttcatcaattaagtcatcaacagacatttccttatttggaatggtcaacttctcatcacccttcaatcttggaacatcattactcccattagaagctgttatcttcccagattgttgacccacgaaagtctccaccatcataggagaattaacatctctagctgggattgtccctcgctccccagaagcatctaatcggaatctgctagtcatgacagaagctggttgagcacttgcagcttggtgttcctccaaaggggccatgaattgtttcaaccatttagttccaatcaattgatttctatgttggggttcaactctcaaccattccccatatggctttaaaagctttccatctcgaacctcaaacctctttggacaaaacctttctgaatgtcccacaatgccacaaacgaaacagattgtggggatgtgttcatatttgaaattactccaaaattcaaccccatccgtattacgtaacttcatccggcgtttaagcggctttgtgatatctatcgagacccgaactcgaaggtaatccctccataaccccaaaaaattcttctcatccgaagccacaaactttccaatgtaattagctaagtccccagctactgtatcagttttaaaccctgcacgaggatcatgcaattgaacccaaaactcaacctcttttagttgaacttctttcggatcctcacccctctgcagtcttttaaatactaataacgacttgttgaatgtccatggacttcgatcaatcatactctgtatatccaactcatggtagaactggaataaatatcgattcgtatccaattatttaacgaacattcctttccctggttgccaaagtgatgccatcaaatgctgcatagcatcaaaatcaacagctctatcagttaaaaatctgcctacaatacaccatcgatcatcataatccttcccactcgtttcggtcgcatcatatgacaaaataatctcttcctctccctcaataaaaatattcgccccctcatcctccccttcttgtattcgactactggaggccatcaaaaccagaaaacaacaaaaagagataaaaaaaaatcagaaaaaattgaatcaggaaccaaaccataagacgtcaaaatcaaattactatgaacccaaaataaccacaaaggctacagagaacatgtcaaaagacaagactaacaattaataatagtgctacgttaatcaacatttttcgtttaatttcaaggtaaatgtaactatttattttcatttttttttgttttattcttcaacattttgattatttaaatgatttacataaattaaacaaaaaa

SEQ ID NO: 49297 - DNA, 2194 bp, Cannabis sativa
tcattgaagccatggggattaaagaagctctcagttgggtaaagaccaataattggcaacatgttcaaattgagacagacagtcttgtttttgtataagctattcgatgcaaccaagtaatgaagtccactttcgacctttaaatcaaagactgtcaacttttgttatctaccctcctaaatattaatttatttttcattagacgagaagcaatcgagtagcacattatgttgctagacattcttggtattaatctgatcgtagcatttttgatatttctatttctggtgaattcttacatcttttgtattcagaatgctaatttattcaatgaagttgatattccatctaaaataaaaaaagacaccaaattttaagttggttatgttttgagtgatgttttatctttttgagatttgtgctttgttttgagtttttagaatgttgcttctagccaaagggtaacacctttggctagattttttaagttttagttgagattttgttttgattagttttgttgagtttgagttaattaggttttgtgtttaaatttgtttttagcttattaatttttagttcaaagactactttttctaatacttgttgtatttggtgttgttttatcatgtttcagatttgttttctccagtgacaactatcaactaagaaaaaatgttttttttaatgaattataagtgctatttgagaatattatatttttaccgtctaaaattttgaggacaattttgtcttatgtggcttgcgataagaattctgcttaaaaaaacatgctttttggttagatataagttatccttgtttaaagaagtttcacggccaattgtgaatatttacatcattaattcatgagtgattcttatctctactaaaaaaaccagaaaataaattagtaaaaatgtgaatagaacataacgaaaacaaccgatttcaagatttctgccgttagattatataacaaaaggatccaacaaaggaaataggctgcacatctgaacatccaaacaaatcaagtataaaaggaataactatgatctattttagctgtcttcgctcgtttccccaattcgacttggacctcatgcaagcctgttccgttcgatgtcagaggtgggaaagggggttttcttacttgatctgagtttttggtttttgggaaagaagattagggttttgatgaaaaaacaagatttgggggagttcttatttggcatctcatttatttattaacatcaagcgaaacaaaagaaacaagaagatagatctatcaattgtccatgcttcaaggtcgaagacatttctcaggaagatcgagctccctgcgttttctcgatctatgaatccctttccccgggatttgggatgttttggggtcggcttaggatgggcaatcggagatggagagctcggttggccttgggagatggtaattggggtcattctttcttcggccgattctcagaagcaattgagaagtgttgaaagttcttagggcattatctatttgggagaaggttaggtttttcttcttaattttgttttattttttatttagtttggaaatgttttgaagcataatttttgagtctttgaatttgtattttaatttgcatatttatgttgtcctcttttgattaatctgatatcccggctttggttcaagagtcttttctctgttaaaatgttttggatgctgttttaatttatggatgttttgattcttcgttgggatcccggaatttgctttcgttttcttcattttttttttttgaagtatgcataggtagttccaaattatagaattaaatcccagtttttgttgttggatttcttgaatagttttattgcatctcttaatatccttattccagtatttgcttttaccaatctatttagttttgttcttatggtgatttttccactaatgaattttaaaggatatgtggtttttttcttttctgggtcacgatgtttttacaaaattattgtgtatgttttgtcttttgtggtttacacttttgggtgcttcatagttatgatcaggcaagtttatgtaagcgagtatggtttgttttgtttttttggtaaaccagtatggtggtaaaatattttttgataagactagtaaggtctttcgtttggtatgataatttcagtttgtaaaaatattttc

SEQ ID NO: 49298 - DNA, 1335 bp, Cannabis sativa
  modified_base (35)..(47): a, c, t, g, unknown or other
gaattcatattagggtgttaataaaacatacttgnnnnnnnnnnnnnatcctggtaaaatatttcctacagcacggtggtgaccgacagctatactagccactgtggtcaccacgcttaggttgggcagagcaaagctccacacgaagcatacgggttgtcttaacccaattggaggagcacggaagtggctcctggaccacgccaatccttccttgtcgaccacttgacgtaagtggttcggttaacctcctttcatgagccatggtcttcctgtcatggtcatctcacataacccgcacctaaaattgggttgctcctcctcttcacgtcaagttcacatgcatggcagcaatgtatggcgcatgcacttgtgaaatttgtcacatgactcactttcaagcctcacggattgaagatgcacccttttgggttcgtggctagttgtttcagggtgtaaaatataattttgaggaggtcggggttcactccataaatccaagctcactcattgatggaagatttgtggaatattagatttacatgatttaaaaaaaatgtacaaataaatttaataaaaaactacaacaaaaatcatatagcacaattatggtgtgccaatttttttaataaaaattgtaaaattgctaaacaaattttaccatataattaacgatttacattcatgcacaaaaaaattaaattcattcattcataatatatcatcgaatatataaaggcataaatacccaacacagtatttaatctatacaattcttttttatggataagatgatgtttcattactctaatattcaatttgtacaagcaaagagcatccttaaataaaaagagaggacctcacactctatactatttacaatgaatcaaaccatgctttgtcactactaaatacattccttggccatatacaagacacctgacttttagttacattttgtacctattgaaacacagcaatacagttgtcatctttaccctccccagcttgacattctgattacaccatagagtataaaccagagctgtaagagaagcaaccgacacatattttttaaacttactaatctttgcttttcctatccaagtgacagcatgcaccatagaaatcgcactagtcatccaacacaattagtttttgaccaacttcaagcatattcttgagcaaacggacaggcaaagaatagatgatcaatgctctcctcttcattattgcataacagacagctgctatcagtgtctggtttgaatttctgtactctgtctttggtcttcaatttctgcaacattgatagccataaaataaagctatgat

SEQ ID NO: 49299 - DNA, 1607 bp, Cannabis sativa
ttggaaggtttgtttattcctaaaagtggctgtagcagaacctcttgcttttcatcaagctatttatcagtgttgcatttttgtatatttcaacattcagatcgaattgaattgtaaaaaatctcatgctcaagctcaactgtcattctagtttttgaatcggctttaggattaattgttaaagacattatgtcaacttgtaattgatgttgttggtttttctagagatctattgttgtttcagataatttagctaagtatactttgattgttgatgctagcgctatttgatgacgtgattgtattttgattaatgctatctatcaatgatatttgtaatcctcagccctttttttttttagagaaatcctcagccccttttaaatgtgttttcttagattatatttttttcaaaagagaaaagaaattacctccgcgtttggttagaagtaatgaaatgggatggaatagaaaacaaaaaattttcattctattactttatttagttgctttttaaagtattggaataacattccaataaaatactcttttcactattttggtgaaatgactattctactttaaaataaaagaaaagatcattctaaataaatttaataattttttatcaatattttttatacattttaaattttattctattgatattcttattcctatgtttttattctttctaaccataatcatcctatatttcatttctccatgaaaagagcataattgagattttttttcccgtgtactcaaagcttaaaaagagattttttttactaccccatttgataagtcgaaccgagtaaaaactaaaaagtgcttggacataacatgagagagacacggaaagaaaaaggaaaggcttatggtaccttacacaagagacaaaaagacagtaaagaaaaaagaaactaaaatcacattttgtttaatctattattttctttttttcacttttaatttttttcccaccacatatatagtccactactatatataaaaattaaactaactactatttttacctagtcaaaatggagaaatcaataataaatataaaaaatcttttacattaataaaaagaagaaaaaaggaaaattaatggggagtgttaagaaaaataagaaagttttggtaagttttcttggcgttaggagtgggggagttgtttaaatacagtgagaaaaagacgagtgaaaaacacggctacagacacgtcaataggggcagctggaacaagtttcccgcttttttatggagtccccacaaatatgacccacgccaccgtttcatgatccaccccacactcgatcaaacactatactaatagtaattcaccatcattattattatatttttcacacttttattacatctaaccaaaaaggaccatgatcatgcttcaaattaaaaaaaataaaaataaaaataaagacacatgttaatgatacatatattacataacaggagattccactctcatccctttgtctactcactctctcacttcgtgtaccactatatatatacgactcacacactttttttgtaacatttttctttctgcacaaagggcttttggggtttgggtt

SEQ ID NO: 49300 - DNA, 2252 bp, Cannabis sativa
  modified_base (58)..(58): a, c, t, g, unknown or other
  modified_base (466)..(473): a, c, t, g, unknown or other
tttaatccatataattcaaccctaagcactagctgaaatactataaaaggaacatgangctctcatctcatccaactattcactttaacttgtcaaatctagtttctaactctatcacacaactagtagatgagagacaccttctatagtgattttgagcctcctttattgttcttcgtcaattgagccttactaatagagtgccatgcccacacatagcatgtcaagtactcaatcatagtatagaatatggtggtaaccaacccggagaagagaaagagatcaaggctcagatcttgtaataattctgcgatagaaaggaacaagagttagagatttgagcggaaggagtcataatattccattgcaatcaatgtaatattttctaaactcttatgtgtttaatttcatcgtattagagatattcatatttaggatgataatacaacatacttgttagtaaatnnnnnnnntggtaaaatatttccaacaggcgaaccagctcctatgaggaagttgatctgtcccttgatgtcctgtttgagtgttggggtccccgtttgctaaggtgctgacttgggcttcttgttgatgagttaatttccacatggcgctgattttgtccacgtaagaaatgccacgtcaagtcagcaaaaattgggatgacatttagtgatctgaatagtgttatctctcggtatcaatacaactaaaaggggagtaggttattacccgctatctatgggggcaaacctctataaaattctttgtgttctttatattttaatcctaattgtgtaacacgtgaaaaacatgagattcatatgacctcgctatcggttggccacttttcgaggtcaacaatccttagtccacaagtcaatgtattggccttttaggcttttaaatgtattacaaatgagttttgcaatgagaaaccctaagtcttgctatatggtggtctctctaggtttctcttggagaagaagaaagcttaaaatgaaaaccaacagagttttcgctaaagttccgtcccccttgcatgaagggtttgtagggtttatataggctagagtttgggtctggacatacccgtggcccattcaggttttattgtaaagcaagctcaataatggggtaaaatacacaaatacatgagtatgaggcccactaaggatatccaacccgtggagcaacagttttgtactgatgaggggaccatttggtataggacacgtgttgcatggaggttacgcctggcagataaaggtgtcagacgtgtcgtcagacaaaaggagtatgtgcaatgtgtacaataccatgatctaatacaacggacaagatctgatcctgtgttagagagatggacgtgtcatcttaggggagacatccgcttcttatttcacgatagacatctagctctcaatctgtggtaggctttgaaatcccatcctatggtaggggtccaggaccatctcacgtggcctagctccaagtatgcccttatattcattaggaggtctttatacattccgtgtctcagaaggctaaggaggctttcgggtcttagaagaacgttatgtcacggaggcgaagccttgagtcttcgttgcgcttgtgcccgttccaagtatggcttgggcttaggcaagcaggaaggctcaaacccattttggacggtgattactttttggttatgccatgtgtctcttcttaaaaacatagataacaaaatacaattgataatttgataccacatgtgagatttctccattcaaataacccacacatgttagaaaattaaacaacccaagatacaaatttgcatataatatatattaattaggtatacatactttattgatccataacaattaccacagtttgatagtacaatactatcaactaagtctttctccccagatcttaaaattagaagtagttttatttgtctaattatcaaaagcgtacaattgtgatgagacaacatgtatttatagagttaggaaggagacttagctacataatgtggtgaagaactcccttgattcttggccaaaccagtgccaaagcaacaagaacagtagaaaaacagaacaagtaatcaagacataaacgtcaaaccagaaaaataccagaattgaacaatgaaagataaatagacttagctttgaatcaaataaaaaactttattcaattgtcaagcacctttacaatctgatccatgtactcaattgagtctaagtgtagaa

SEQ ID NO: 49301 - DNA, 810 bp, Cannabis sativa
tgagggctgagcttagcataggaaatgaatttatcaattggaaaagctgtggaggttgtatgacagatataatctgttaagtattttggtttagtcacgggtctgccagctttggatagaggcaaagattgtggaattgaattggtggtatcagttgtgagagtagaaactgaagttggtgttggattaacaccagtttgtggggctgtttgtgaaaaaaaaccaggttgtgagctggtttttggtgatgttgctggggtgatatcggcagcaggtagtgggttatggtccttggaggggacaagtgaaatggggggtgattgattatcacttgtgggagatattggtgtgggattgacaccagaatgtgttgaggaattgtcaacacgatatggctgctgggaggtggcagcagcatgatgtttttggacaggttcaaacactggtttgatgaatgaattaaaaaaagtatttatcttgtgagaagatgtatgaccggtgaagggaaagatgtcttcatgaaatattacatcgcgagagtggtatatttgatttgtttcaatatcaagtaatgtgtaggctttcatgccttgcgggtatccaataaagatggaagcacggcttctaggagaaaatttatgtctactagagggaagtgtagatgcatatgcaaggcaaccaaatgatcgaagatggtcatacatggggggtttattatgcaagatctcataagatgtatggccttgaagtagttgtgagggggtcctattcatgagataggtggcagtatagatgaggtaaggccaatat

SEQ ID NO: 49302 - DNA, 1644 bp, Cannabis sativa
  modified_base (45)..(50): a, c, t, g, unknown or other
tgatctatattaataagtaattctgattatattgaaatgagtttnnnnnngggcataaaacccaacaccatggcatttctgtaatcaacttatactccttcactctccatcaactctgcagaatgtcaccgaggaggacctatcatgctcaattctgggttcaaactcattgtcttcctttcttaaggaaatcaagagctttggcaaagaaggttggtgaatgggtgggtgaatttatagaagtccacgaagattcactccacgagggctgtggtccatttatgcgtactagagttcgaattgatgtcactcaacctctaatgtgtggaaaaatggtcactctcccagttagagatgagcattggcttgagtttctctatgagaatcttcatgtgttctgttttcattgtggcattctaggacacccttttgaaaaatgtaacgcttttatggaactggtggacaatggagtggaccctgaacgcccgtatggcccacaaatgattagtgataaactcccaaattcaggttatgatcgatatcgtaatgacttttccaaggccaatgcttacccgttcttaacccatttaaccaggaaaaccattgcctcatgcatccctaccctttacactcatcaaaatttggctattggaacttcaccacatccaaactcgttaactttggttgaatcttccacaccaggaaaaactgtcactggccaaaaagaaaaataccctgaattacctttgccttttccctcttactgtcccaccaatttccctcatgaggtgactaatgcttcttcaaaatctcatcttcaagaacctatcgctcctctcatcaatccttcccctcctgatcctattactaaaggttttgatgctcctaatactgctacaaaaaataaaggcaaagccgtggtttttttttaggcaattgaagacaatagtgacattggtaaatcgtttaaaaggcaagtggaccttgataatttttgaagtgttctcaaaagatgtcgcagcaataagaaagagagtccgattgtagatgatccttctattcatcatgtttctggtctgtctaaagattcgaatgatgtgaattcatcttgttcagcggaagttgcacataagcagccctgctcacaaccatgaaaataataagctggaatgccagggcttggtaaacccttcagcattcaggcacttgaagctgctaatcaaagagcagcgtcctgacttgccttttattatggagactaagttgaaatgtaattctgtagatcgtgttcgttcttcacttaaattcagtaatggacttgaagtccctaggttgggtttaaaaggtggtttgttgcttttatggatggttaatgtcgaatattgtagcatgttcaaccgcactccgagaatggcactcatcgaaatatggtagaatgagtcgtgatatagctgatgcccataaaatttctgcacaattgcataacaacaaaaacaattcattagatcatatcaaaatggtggagaatgcagacagaattttagatgagttagagaaagaagagctttattggcatcaacgtgtaagagttgattggcttcaaagtggggattctaataccaaatttttgttgggttttatgcc

SEQ ID NO: 49303 - DNA, 1659 bp, Cannabis sativa
tgttggtaaaatttaataccagctttctcttattttactttaataaaaattataaaaaatcgctaattaattataaaatattaccttaataccctatagcaatgctcgcaaattgtgacaaaaatgctttctaggggtccacacaagaactccaaatcccaaatgattccatatttcgaaattcttgtaataaaagagatatttacgagttctcaaaattaattttataattagtataaactcaataatttttttttaacagtatagtatttagtattagtaaaattataatttttatctaatttctttttcacaaactcaattcaacttttaaatcatagaaacatttaatattaattacttacaaatttacttccaacaaatttacaaaattaggttttaaatttaaaacactaacagaattagtactgaaattagataaaaattataattttactaatattgaatacttagccgttaaaaaaatcattgagtctataccacttacaaactcaaaataactttggtacttgtaccacaaatatccctaaaaagatcaaagataatagaaggcaagtagtttacaaccgcatattttattaaacaagtaaatttgtttacaagggtttaattctaaacatactgagatttaagattattccaataccaaagtattgaaattaaatgaataaataaaacagtaatgaggttgattaagatcaacaaaagccagaaatgaagttgatctgaattccaaaagcattgttaagaaaacttccatcctttttaactaatattcctcatgatataaaatccctctttgttctccagccaagcaaaacaatagtttatgcaaaatcacatgggacccatgagctgcatattagaaatacaaaaattctgaacacaaacaaacttatttttgcctagttcattaggtggtcaatatttcaccaggggttccctcttccacttcaaccgaaaatggaataggtttggtaggagcgggtaggcggccaatgctatccactttatccttctgttttggaggaggtctagctgcttttggtaatagcctgcctttcttttcaaaccactcgggcttaagcaaagctcggaaacctaacttgttgtagtaaactcttctaacagttccacctgcagcttccacagcttcctttgccctaacagtgaccctcgatacctgtatacttccttagtaagagtcccaactttgttttcataaaatatgtcttgaatacttgttgataattttgtaacaataaacttggaattggatttgatataaaaccttagaaacacgaacgaaggaaaacaataaaatcacagactcgtactgagttagacttaatgttatggaggtttcaaaagtcagtaatctattcatatgagatacaaagaacagcaaataattccattcaagaaacaataaggaggtgacaaaatatacaaatggtgattcacaagataaaagaaataacagtatttacctcgagatgaataggccacttgatctggtcagacccgcgacccattaatcttactccatcttgtatttgtttccctattgcccctgtatcctacattaacaatgattaccagaataagctaatgctgaataaggaaaaatgctccaat

SEQ ID NO: 49304 - DNA, 920 bp, Cannabis sativa
  modified_base (44)..(49): a, c, t, g, unknown or other
ttaatcgtgtaaggctaaataaaaaaaagaatcgttaaaccaannnnnnttaaaccaagaattgccgttaaataggcacttttaatatataaagatatagctccatttcaccatatagctatgaaaatgtacttaattttctttcaaaacaaaaccaaaactatcattgcatcactaattaaatttgaattaaattgtcttaaagttttgtgctcgttacaaatgattttctaaatggtaaatacaattggtacatatagatactttaaagtcactttaatgaaatgaaatttaaaaaaaaaaaaacattttgggcctaagtgagacagaatcagaatcggattagcagaacatagcacacaaggtcacatgttaacctaggtgttgggtgctctttcttgagcttccaggatgtcattttgatacttctaaggatattgaaattgaggaaaagatatcctaccctgtttttaaccatgttggagagaattctcgaaaaagaatttgcattgggatgatcaaaactagtgcacgaggttgattattaacctgggcttcgggctaagcgtaattcttattttcttctcaagtttaattgtatcattattattttttatgatagaaagaaattcctagagctcccttagtaaatgtcattggaaaaagcatagattgacaaaatgtcaacctagcactaggcccagtactaggtgtcaacctgggcgctaggtctagcttatggcccccaaatggccccgttttattccaagaacacttgtatataatatttgacaaaagtaaagaatattcccagaagaattctcataaaaaatccttagaaatggcctagggatacaaaatgtcaacctgggtgctaggccagcactagttgtcaacctgggtgttggccccctttctga

SEQ ID NO: 49305 - DNA, 1029 bp, Cannabis sativa
tgggagtggagaagcaatcatcggacaatatgaaatttccaactcttttaaagatggaaggatgcaaggcaaatctcccgccagccgctcacactcgtgtatagtaagcgatttaagctttgaaaatgattccacattttcttttggcattgaccattccttccagtttttcatctttttgaatgtcaatgactccaacaatgggaacaatttggaagaactggtcccataaaaatcgagaaccaccttctctattgcgtcacaccctttaattgaaagagttaatagagcaggtagttgcccaagtggtggtaaggtacacacgcgacacttgcttatgtagagacttctcagactaatgagatggtgtaaattttctggcagtttggtcaggtgcatacagtgagacaagtttaatatctgtagattgtacaacaaacacatagattcgggcaactctttgattgaagtgtgggagagatccaagtggcgaagatgccttaattcacctactgactccggcaattcaacaacattttcgtaacctgctaaagataaataccttaaatgccccaacttcatgaaatctttcaacacatcatcttgtaaatacgaatttgaaaggaatggatttttgttgacatgtacaagtgtacgcaaataagctgctttagaaattaatttgcatgtctcatgaaaatcacaacgattgacgaacacatcaattgctatgtgtcttatttgcctgatttgtccaatatcatacatcatgttttccttcacataaatgaacttgtttttagatacaaaagcagccaactcagccataagatcatgcactacaaaaacacctttagtttcgaatctacatgctgcaggttgaaaaaaagatggagccactaaatcatcaaaatattcataccccacctcttttatattcctatttccacctgaatgctccaatatattatcaaccatccaaagtaagaccaactcatccttaacaaatccataatttctaggaaacat

SEQ ID NO: 49306 - DNA, 859 bp, Cannabis sativa
tacacttcagtcttgtcaaaaaaattagccaagaaaaatattgcttttacacaaaaaataataatcataaaaaagaagaatgagagaaaaagacacaaatttagtataataatttgttgctatttatagtgaaggtttgctctaaaatgagcgaaaatacatgcttaaattagaaaagctctaacgcataaaatatatgaattattaagtggtagctatttgaaagagtagttattaaattggagagattttagtgagcatatctaccattgctatacaataacaatgctaatatatatcctttacagttcaaataagcagctactcttgattgtcaaactaaactcatagatgagtagatgccctacctattttttcgagtttaaaacaatatgatccaccttaccttggatcttgtttatcaatatttcttacttgtatggttttggtaagtctcactttaaattaaaaaaaaaaacaaaaaaaaaaatattacttttaatcacaataaaaaattttattactaacactttacttacgactaaaaaattatatttattcataaattatctttaatatggtttgaacttatttgttaggactaaaaacactattaattataaataaattataatttttgtgactaataatttttataaaaaataaataaataaatgttaaaaaggtattagtgatgtttaattttttattcgttatcatgttactattagtgtaattaagtattagatcttatataatttaatataataaattttaaaaaatatcgctaattaattgtataatgctatttttaaaaggtgccacaccaataatatacttaatagcaagatatatgtat

SEQ ID NO: 49307 - DNA, 2216 bp, Cannabis sativa
gttgtgccatattaatgttgcaggaggatgaccatattttgtgggaaggtcatcacataaatactatgacttgggatacgttccgaactttacactatgagaaatattacaatgaattttattcgggttgctaaggtagaagaattcatacaaccagtttagggtagtatgacagtgattgaatatgccacaaaatttgattgactggctaaatttacttatgacgaagtagcaactgaggttgatagaaaggcaaagtttagccgaggcttagaagaacatattgcttgggtaataattatggctgctaaataaccatgggttgtttgatctaatgctgaagtggttgaattagcccttgctaataagggtgctgaagatcaaattcgaatgaagggcaacatttgaaaagattcttggaagcttttttccaatttttgtcccggtatgggttttgacaccaatgatcgaaagagaagacccaatgatccaccaaccacgcgtcccaataagaagtttcaaggtaatcattgtttttttttttttttgaacaaaaggaaattttattcaaaacctagcaagaaatacagcaaaggcaaacacccacaaactacaagtgtaacaccctactagtttaggcgtgctaatcaatgcttttcaaaactattgtgcaacctttttgctaatcaaagggtttttcaaaagtgataaaatttaaactttaataaataaacatatactgtattacatttataaaatctgggatcccatatttacatttttcaactttacataatcaaaagatatcgcacaattactacaaaatcgtgagccctagttgtctcgaagatccaacattccaggtcgaactgtctcgatatatacaatcttcatctagctcaaaaatcactgtcgttcaacaataactttgcctttacctgcacataacatagcatctgtgagtcgacatactcagtaagaaaagcataaaacataaatatataggcaacctacgactaagtgcccatacacctatcaacaagtcataaaccatgcaaacatgtataattgagtctcaaacgttcttgaccataataccacatacactcagtactctagtcgtactagtgttggtagcatcaatccatactataagtacaactagctaaataccacatgcactcagtgctctagtgtactagtgttggtagcactagttcatgattttgaaaggataaccaaccataataccacatgcactcagtaatctggtgtactagtgttggtagcattggttcatacttctttaatggccaaacacatacattcacgatatcaagatgcaatcatatatacaccaactatcgttctaacggatatgtcatacatgtagcaaacataaacatgtacatatgtatgtgttatactagtcttacctaaattttgatttcaggtgttccgatcaacctcagtggaaataaatgctggtaatcgaaggccctaagtcatattttctaaaaaaccaataagtgttgccctaacactttcgaggacataaattaacaactaaatttttttctattgatagatatcatggcagtaacctaggtattgacaaaacactcaatcagaatcctaggaaaaatcttaagatggacccccaaattttgcctaaattggatggcctaaaactccactatcccattttaaaacttccataactcctaaaattctaagccaaaccttacaaaattttgcagggtatctaaaagcatcacaatgaacatttttcatgaagaaatcccaaaaaaattctaaaaaaaaatcaaaataaatggccgtcctaaaactacctaaatcagatggcccaaaaccttcctgtccgagattggaaatcccataactcatccaatcctgatccaaactttaccaaactttgtagagaacctaaaaacatcataataaatatatttcttgcggaaacattaacccagttcccaacaaaattcaagttatcacaaccaagttaagtttgagttctttgaactcaaacgtgtataacttttgctacaaccacctaaaacaattcaaaccacttcaaaaccgtcctaaataaccttaataatcagttcataaccttcctaaacttattcaacatgttctattataaacagccactgaaaactaataataaccctagaaaaccaataaatttt

SEQ ID NO: 49308 - DNA, 861 bp, Cannabis sativa
tccacctcaaaattcaactcatctggttcaaaggcaactgtctgagctggttctgagtctgttagatttgtcctctctttgtaggccattttaacctcattgaacacaacatctctacttatcaagcatttcttgtgtctaggttccaaacaccataacctgtatcctttcacaccctctagatatcccaaaatcatgcactttagtgctttaggttccaacttgtttttccttatatgagcataagcaagataactgaagactctcagccttgacagatctagtggatgttcaaaccagacttcctctagtgtcttcattccaatggcagtgaagggattatcaaatacatagctgtaactactgcttctacccaaaaaatcttagacaagtttacactcaataacatacatctcaccctttccaaaatggttctactaaatcttttagacaaaccattttgttggggattcttgaaaactgtcttgtgtctagctattccaatctttgtgcaaagctgagtgaaaatatcagagtaaaactctaacccattatcaattttgaatctcttaaccttccttctagtttgagtctccattagagttctccaatttttgaaattttcaaaggattcatccttggttttctaaatgaacagccatagttttttggagtagtcatctacaatggacacaaaataccttgcaccaaaatgagagcatgtcctagaaggtccccacagattagcatggacataatcaagagttccctttgtcctttgctgtccataactaaatttcaatttgcaggccttgccataaatacaattgttgcccctgattttgcccaatgtacgtggac

SEQ ID NO: 49309 - DNA, 3670 bp, Cannabis sativa
aactaagcgggctttacagtcatcttcttgaatttactcagcttagctctcccaatccatttaatgagattgaagagagaagtatgagtagttctccaattctgccaagtcttcacagtctgtaggcatctgctagttacagaacagtcaaaaaataaatgttctgcagactcctggtgtacacagcgaagaagacaggtttgatcctccaatattttcatcttgaaaagcctatctttggttttcaatctctggtgcattgctaaccatagcacaaagctatgcgttggtgaatttaacctgctccagacttgtttaggccagtgcaattttgttcctgctggtttcagcaggctatacccttgagacactgtgtatttttgctgcatcaatgctccacccgatgtctccttgagttgatctttgagcctaaccaaaaacttccagtaccagctactttgatttgaagttttgtaggcccaccagtcttcattatgcagataaacactattaacccatatcagccatagtgtgtcttctttgtttgtaattgcccacacatattttcccatatgaaccctattccatgcagctacattcttaaaaccaattccaccaactgatttaggttgacatatggattcccaagagatagcccctagaccttggtagattgctttcccattccacaagtaattcctgcatattgtttcaatagtattcaccactttctttggcaaaatcacaacttggcaccaataagcatgtatagccattaaaacagaatttattaacactacccttccagcaaaagaacgattccttgtgctccatgtcttaattctacctatcattttctctgccaacacttcacaatctttacctaagatcttctttgcaccaattggaactcctagaaaagtaaagggtagagacatgcttgtaaaaccatatatttgtaccaatttccttaggtgatcatcaggcatattgcttgaatagattgctaattttgtggcattaggatacaatcctaatgtcacagaaaacagcttgagcccctacaataagtagtgaacacttccaaaatcaccattgcaaaacaataatacatcatcagcaaagacaaggtgattaagtttaattgcagcacatctgtgatgaaaatggaagtcatttttttctccaatcatccccattattcgggataagtattctatacctaacacaaataataggggagacattagatctccctgtgtaagtcctcttttagactcaaagaatccatgcaaagttccattaaatataagtgaaaatcttggtgttctaacacaagtcatcactatgttaatgaaactcgaaggaaaatgtagcccttgcaacatttcttcaatgaagtcccactctatagtgtcataggcttttttcaaattcaacttgataatacaattaggcttattgtttttcctcccacaatgcctaagtatatcttaacaaatcataatattatgtcctataaaccttcccctaatgaagcctccttagttttgagagactaaattaggaagaatattttttattctagagcacaaaagcttggttgcaatcttgtaaagaacattgcaacaagttattggcctaaaatctttaactgtattaggacattttactttgggcaccaaagtcagaacaatagtgtttatctcctcaagcagcttacctgtttctaggtatgatgtcacagcttcaaacaagtcctctccaaccagatcccaattgtcttgataaaagaaacccgagaagccatcagggccaggagccttgttgccaggtacatcaaatagagcttccttcacttcttctttggtgaacttttgagtcattattttagcttgctaagaatttaaaacaggtcctcttgcaatgattctatgcaccactttcctcctatcttcaattctcgaacccagtattcccttgtaatactcaacaaatgcctctgaaacctagtttggcttagttactctagtgccattttggtgctcaattgagagcacttgattttgccttattctctgctttatgctggccttgaatatggcagtgttactatctccattatgaatccagcaggcttttgctttttggtgcaggaaagaggtgtaatctttctacacttaaaacagtctggttctaatttgcgattcctcagcaatttctgtatcattaaggggacattgctgcaattcattatgatctctatctaactcttttctggcttgtattactatagtatgaatatcaaaaaacctagccttgttgatttccttgaaaatagttttgggggccttgagtttacactttgtacatttttgttccatcaatcttcttcccccaaacttcagttactttctgtccataatcagcacggctcttccatattctaaagtacctagcaggttttttcccacttgtccacctaggatacagagagagtctgcaaagagagtggtcaaaaagcccctcatttaggaaattttcctcagcgttctgatagtgatctagccatgcttgattggccataatcctatcaattttggaaaaaattctgtcattcccctgttgcttgtttgaccaagtgaaaaaattccccgtagcctttacatcctttaattcacataatcaataaaatctgtgttagggtaatatttaactttctcccctactcgctcttctttagctaaaatatcattgaaatctcccatcaaaagccaattagccttagtagcctactctctcagatctttccatcggcattgccttccatttttgtaattaaaagtatatattatagtaataaaactacaataggtaatatccactgtagacacctttaaatgcattagttgacttgtgcatttaatgatatctactatgtatctcatcgggttccatgctattaaaatcctccccacatgattccaagcaatatttgttgagaaacaccaaccttcaaacacaatgaggtacaaggttcccaacttgtgaaccttggcccttgtctcaaggagccccaccaaaccaacatcctaagtctgaataaattgtttaatggacttctatttcggaatgttgtttgctcctcgaacattctagcataaaaatttatccatttccaagagagggtcctcccactctcttgtgttgtcaatggttgtgttcaaagactcatgatgatcctccatatgaccattgttacttttagcaagcatgctgaatgtattgtttgtctttgttactgaaatcacttcttgttcttgacatctcttcccctttgtgacttcttgaaaaccatcttcatccagcttaaccttgggagcctcagtttttttatctgtcttcaccactcattcttgtttcgtcttcattttcttcttacaatcttctgtcaagtgacccataccaacacagtgtttacatatagtgggcttccattcatagttcacccccacatgtgtattcattccatgttcattaataaactctagcatccctgctaactcctggtccattaacacttcaatcaataccctaggatagttaagcctttccctttctttagtgatagctgttggaaatattttaccaggatctagatttaccacca

SEQ ID NO: 49310 - DNA, 787 bp, Cannabis sativa
tttttgaaaaaatgccatatttaatgcaattaagtttacatgccatatttatcaaaacttcgaatttttttcccatatttttgtaaatagccctatatttttagatgttgtacttttataccgacttttcttttcgtaagtatatctaatatttttaaaatgttacacttttataatatatcttctttctttaacatgaaattcacacatatatgtagtcaatattttagaaacattacatttttatacctaatctttggaaaataattttactttacgtaaataaatttgtttactactagtctactaccacatgcatttagggtagactcaagtgtggggatgtaggggcccacgcccaaggcccatcacccgggcccaaaattttttgaaaaaattacattatatacttactttatttttatttgttttaatttttacttttatttccatattctttaagatattatgatgtctccatcaatcttttaggttaatgcaaattatgtgctggacttaagtagagagtgagagtatattgagcagtccactcacgaaagtggatacattttaatgaaatataatataaatatatttttgattaatggatacaaaaaaaaaaggtatttctcaacttactccaaaaactttttactaaaagagctctaaatttattttttaaaaataccatattttatacttttactattaaaaaatgtaattattttataaaaaaatacctaatttattttataagatattaaatttatattttattaagaaaaaa

SEQ ID NO: 49311 - DNA, 671 bp, Cannabis sativa
taaaaaaaatgttaaattactaaattatatctatgaccactatataaacctcttttactatttaactttttcccaattttaatacaaatcaagtttttccttaactcaaagctcaaaaaactaaccaaatgaataagcacacttgatgttatacaccaattgagattaatctcaaaagcaaaagctttctgaatacttcctttgtctcaaatgtgacaaaatatacactcaccaagttagttttatgagagttatcatacaagaaaacacttaattaataattagttgttattatactaagtcatataaaaccacttacatacaaataataaaatcctattttgatttttatataaacaaaattgaatattgcaaatctaaaatatatatgtgaactaacatggaattttacagttaaagtggccaattttacagctttaagttgtacctaatggactagtagaggtaaaaaaaagaaaaggtgtgatagggttttgtacgaaataggtcaacaacttgggtaatatgatataagaccaatatgattctgtagtcaaaagaagacaattccatacacttaccaccacccccataaagtcgagaccaaagtttttgaacacccatatatatatatattgggactcacatgggcatttttgccaaatcaaatt

SEQ ID NO: 49312 - DNA, 999 bp, Cannabis sativa
aagagaatgagagcttagaaaattgatgtcatggccgacaaagcatgaacatgctctctctctctctctctctctcttttatattatatagtttagtgcttcattcacaaaggtagctgaaactgtgttttccattatttttttttcatttttctcttttgctctgtcttacctaagtttacacactatatatatatacatatataaatggcttgtaatgattccagactagcataaactttctcaatcattcaaagtgtttgatttcattctatttttctttttgtccacttgccaaccttttaagcttataatatatgtttaagtagctaggtataatatatatttaatatgtgaggagtaatataaatattatatttacataacatatatatttaatagaccaagtcaaaactgacctgacatttcctctgagatttcttttcttttcattatttgtattttgttagagatataaaatattgatcattcttatatcatgatactctattatagagatgtcccttctaccatttctctaaaataatagttgagacttgagagatttattttgattcaagtcctaaatgatcctgagcccacgttgtcacttctgcattctgtcgttcaagttaatttcagcttgttcctgttgtaaccaataattaaacatgtttactcatcataattatatttatataaatagaatactcaatctgtattacccatgtgtactaaataaatttaagtgtaaatatttattttaaaaacattaaactattaaatttttgtcctaaaagagaaattttaatttctatacataatttaactacttaataatatataaaaaaatagttctttttatattacatcaaaaatatgtttatataaaaaaaatatttaagcaaattcaatttttttttatcacttttttgtcggtttttttttttttatattttttttttcaactgatggaccaatttcaactcatataatgta

SEQ ID NO: 49313 - DNA, 1836 bp, Cannabis sativa
ctcacatatactttggaggggttagcgaagaggtcaaatccaaaattcttgatatggttcaaatagaagagggaagcttccccctaaagtacctaggggtcaatcttaaacctaccaaatggaaagcagctgattgtggagttattttggacaagctgaataagaacctaaactactgggcaagtagaaatctttcttttgcaggtcgtgctcaaatgatccattcggttttgctggaataaggaattactagatgagtatcttcattctcccatccaaaattacggctgcaattgacaagagttgtcgggacttcttatggggagtttcagggaacagaagtaagcttcaccgggtttcttgggataaggtttgcctcccgaaaaaccttggaggtgttgggtttcgagaaggggaaaagtggaacaaggctctcttggctaagtatctgtgggctctggctagcaaggcggattgtctttgggtcaaatggataaattccatttactttatgatatatggaactgccggaaaaaggttgatgcaaattggtacttcaagaaaatattgaacttaagggacaacatgaatgaaatgaatctcaatcaggctgtgaggggaaataaattcagcgcaaaaggatgctataatctgtttgtggaggggattaaggttgactttgctggggctatttgggacaaacttgttgtgcctaaccacagattcaatttctggcagatagctgattcccaactgctcactcgggattacttacagcggattatggctattccaagtcatctctgtccagtttgtgaagctaaaatggaaactcacgatcacttatttttcacttgcagcttcgctttgtaggttatgttgctattaatacttggctaggggatttccattggccaagattgactgctgagttgctttgtaactgctgcaatatggatactggtctggtttttcgcatttggaacgttgttttggctgcccccttgtactttctttggaaaaataggaatacttgtatctatgaactttgttgtgctactcctagtagtttgagtttggagataaggaaaatagttcagcttaggattcttagcaagggtccctttaaagattgtaaaagaaaccagtatgtaattaatgttatcaaaaactggtaggggttcggttggggctactgctttttgcagctgctgctactatttgtgtttgtggctttatgccttgcttgtatttgcttgtttctttgactaaagttccttttgttaaaaacaaaatacattattacgttcaaagatttatttatttatttatttatttatttttttacatttttacaattttctatagaaacaacacaaaaataacaagaaaactatataaaagtaacatcaaaaaatcaacaaaaataacatataaatagcaaaaaaattaacaacaaattaagaagagtacaatataaaagaccgtattttctgtaaataaaattataaaatttgtacaaatatttaaaattctgtataactgtatttttgtaatttttttgttattttgtatatttgtgaaataatctcattatataaaagcaaaatatataatccaatttaatataataaaatacaatacaacttaatacagcctactaagcgtggctaaatttttagacaatattaatatgaatattaattggagcatttgctaaattgaacagactttaaaagaaaaaggtaaattgcggcttaacccccaatacttttattttagtagcaattaacccccaaaacctaattttttacggaaaaacccctaaaactagct

SEQ ID NO: 49314 - DNA, 1329 bp, Cannabis sativa
  modified_base (46)..(53): a, c, t, g, unknown or other
aaaaataccatataaattggccaaacttaaatgtgccatatttatnnnnnnnncttttaaaatcccatactaagtgtaatttcctcatcattttaatataaaacatgttgggccatctattaagaaaaattatttaaaaataatttgaatataaggagtttgaattgagtttcttattgtacttggtaactgtaatggtagcttggccaatctcatcgttatatttttgttttttgaagaagcttttcttgataacaacaccttaagatgcttcacaccttatttttagcattttcctacttgaatgtcttaagattaaattccaaatgataaatgagcgacatttacaatgaacatacattattttgcttttaatatttatatatttcatctcagccctcttcttccccattccccatttgacactcagctaattagcctaatttaatgatttctcttttctccttttcttttcatggtttcttcattcaattggtgataataaacatgttttagtgttatgaatatgtgctatgttttgttattttagttttcataatggtttcttcatgccatctcttattattgatcataatgctctgtgtttgaattgatgctctgtacaaaaacttagaatttaagaaatttttgggtttttggaccatcaataaatttgatgctaaagtttcgatgtggaatgatccaattgtgttgtttgtgaaaagagcagagaatccttcatatcttcaagatggatgtatccgaagcaggttcttgttcttggaccgaatatgttcatgctaacccagtaaaatgtttttacaaggcgacattttggaagaatgatgagattctaatgcagctttggaacgaagtaaataaattggagtcatttaacattcatacacgaaatatacgagacattgtttgtgatcgaaatggagatgaaatcgagttattttattggaaatcttttatgtaaagagtttagttcatgttaggaggaggtaaattaggtgattgaaaaatggtaatgacttgtcctaagatggttttgactatgattttcacatggtagtttagttagtctaacacacaatgctctacaaagacccttcgttgagtatataaagaaaagtaaatgcatgcttaaacttaatttaatttaataatggggtgctacaaatattttctttggtgtaataaatgttggaacctgtcaaggttgaatttgctatttctctttcccattttgatttgaaatcgcgtattggactataaatagtacaaaaatcaaagtaaaaattgactgaatcaatcaaaagctcc

SEQ ID NO: 49315 - DNA, 3541 bp, Cannabis sativa
  modified_base (414)..(429): a, c, t, g, unknown or other
tatagacctaaaatcaaccaatgatattggcttagaaatattggcttagaaagatataacgataagtttatgatatcttatccaagttcactatcagttcaaatcgacgtatactctatacatccgacactaacatactttaccaatgccctggaaaggacataacacttattcaaagtgtaagtatattttattgctgattatcatgtcagtctaaatccagtgtattgacatatcatgaaacttaaactttgaaacatataatcatgattatattttactgtattgacaacactataatcatgaataactatatgttatggatttaatagattttatacaccaaacatataatcatgaaataaatcatgtaaaccatactacataaaatgatttttgatcttttattaattnnnnnnnnnnnnnnnnttgaaatgaattttatttagagcataaaacctaacataatctccataagaagacgatagacataaacaataaaaacaaaataaataaaaagagtatcaggaaaaaaaaagaaataaaaagaatattaaagttttatttattttaataagttttattattttattttattttttaataattttaatttaaattatgatgtgaaccaataaacttttgagatgtgacattcttgtcagcacttaacaaatctgttaaattaagcattgacgaacttacaaaaaacataagcttggggactattactgctatttttgaagattggtgactaatctgtatcaaagcgatatttttaaagacttttacggcaaatttccctaaaataaactaatataacctgaatctagaagatgcataaatcataaataaatgaataaatatagtacatacagtacaaataatacctttgagctatctaggattaacactaatctctctctctaacaagtatggtggtgctctttgtacaagacatttgagctatacacaaaatgtggccaatatcgccaaagattatggaacaaattaattttgggttattcagcgaaaaaaataataataattaattttgagttttttacttaaatgttatagatcattcttcataaaaatctgctacactacgacgtttgttgcgatcttgggtgtgactaacatccctcttcatgaactgaaatcccattacgtacctatactctcccgtaccaaggcatcgaggacagtagtcaagaccacttccgccacaagtcctacacctgcaagagtggttaaacaaagttagtttggagtaaaatcatcaggtgaaattccaaccatgcttccaaaacaaaactgtttcaagagagttcaacacctcaccatttcggccactcccccttcgggagcatttcaacgtgtgtacagtttgtcctccctgtcatataacaacattcttgtgtaagatgaaaagaactgagagaggaactgcctatggatgattctctcagcttagatgtctgggcaaaacgcaacatatttcagcaaaacagaatcttgaaaatccttaagaagataaccacacggtacaatatgactgaaacatgagaaatttctgcttaagacactagcatatagtgacattagatgactagattaaatagaaaactcagatgatgggaatatttgtggtcagttttaagttgagaaaaatggaaccaagataatgatatagctgatcaaacagctaattctccaagtaaatcataattttttaacaactcaaaatttactttgaggtaataggtaaccatcataggtaggaaagagcataatttacaagatgcaaggtgcaaaagcttaaattttgagaatgaaagacaattataagtgagacctcttccctggcaagtgtggcaaccagtccttccactccccatgcagaccacacaaggtggatctggcgttttcttctcttctctatgaacatttgactgccaaagaaagaagtaaaaggagttagtaccataaattaatagtatgaacggactcataggcagtgttttagcaaaagtatcacattcaatgttgatggaggttatgacatgttttgagggagaaaaaaaacactaataatttgagatataccaaactcccagtttcctggttttagaatattggcatacagatgcagatctcataagaaaacagaaatattagtggaaggaaggatgatagctatttattaggaaggtgctgaaaaagaggggactaacattaaggaacaatagtatggttttcaataagacgtgctaaccccgaaggctggtctaatggtatggagaagtgttggaagtgaggttagaaaagaactaaattatattgcttataattactttattcaatttcagagaaaccaaagtgaaaataaaagagaacagtgaactcaaaatatagagaacacatgaagagggcacttgcctcggtacggacaacccaagaaggcttagcaaatgaaagacggggtgtggggtttgtctgccgtggatgaggttgcgaggcctcattcaaacctgtggcttctaatcgaactgttgtagataagctcagcattcttactaccatattcatgtatgtgctcctaccaccgcagtgaaatgtatgaaaccacaagcgggcactgctaaacaccgaaaaatgaggtaacaaaatctgattgatagtttaacagtgagaaatgaggctattagaaacaaggatagatttttcttgtgctatcaattacgaaaataacaagtactagttcgatgaatgcgttacataaatgttctgtttttttcttgaaagagataaatgttttcattttaccatacaaccctacaatatttgacgacataataactatgcactgaaggacaatgctaacaaagtaccactacagtgaccagctgaaagtttagtactttgaattgggatctaaactttgaagctaaacaaagtcgtgtctaaatatattgtggattccttatatgaagcatataaaaacttaacaaaaattgaaacgaataattgctcctttgattttgatgtcattgatagaagttaacgtggtgagcactttccgtgctcataatctggtaaactagataagaaacttttttttttttaatttcttattttcttctctatatgaaacttgatagggaaaacatgaagcacccaaaagcatgagaggatcaagaatgatacaaatataaattttttagaacatttacaaagtaggcacgtgcttaacttaaggataatcatatgtgagctttctagtgatgtaagctcctctaaaaaagaaatgtaacataaactaattagaagtatagtgcactttatattatcaagcaaagaatgaaaaccgttaagcttgccaagtagagcctaactgtgaggataatttctgagacatattatcaaacatctagcgagcgagttattttcaaagtaccaaaaataatagacaaaagttattaaccaagtagctaaacgaaatacccagatgggttcactcagttcatccaatttggct

SEQ ID NO: 49316 - DNA, 724 bp, Cannabis sativa
tttatgtgacatatgctttatatagcatgttgtaacctttttttaattttttttaaaagtttgaactttattaagaaatctgcagccaccaatggcaacaaatcataggacaattattcattctatacggtcgtagagataataagatgctctaacaagtcaataagcaactaaatttacagacagtttaacataacaaatagacacattcataagagaaccgagaagttcttgacaatcatgagtaataataccaaacgtagaaagtatttcaatagaactataaatgacattattaacaacattgatgcagtcggtttctactttggcatgaacaacagggttattctttaaccaacttaaagtttcttttacaccctagccacctctgcacgcacaagaccctcgacacaacaaactcgggtctcaaccagcacaccatcagtgtcacaaatgactaaggaaaaaccatactttcctgtactattaaatattgcaacattcatgttacttttgatcgtatttggcaaaggtttcgagcagtgctcaacctctctaacagatccaaaagaacttttgaggaacaaaatttttatcttcttgagcaatattttccaaactatctaatatttttttttcatgttttagtattatataattgaagaatatattaaaaatatctaatttgttcatctatacacatatattatggtgaaataaaaat

SEQ ID NO: 49317 - DNA, 1750 bp, Cannabis sativa
actagtagtgttcaaaaacagaggacttatggccaaagatacaaacatgaaggccttggaactaaaaataaagtaatgttctaaaaaggcctcaggccacataggacatgaaagtggtgttctaaaatttcctcaggcaacataagacatgaaagtaaagctccaaaaaggccacaggccacatggaacacaaaagtgagtaatgttctaaagttgaacaaccacaggctatgcagaacgtgaaaatattgtttatgtgatacaaatacaatgctaaatgatgctaataaaaatactgtctaaatgtgtgcaggggaagaaagagctaaatttggaaccgcgagatcgagatccacagagtctaggccagccccatcatcaccatgttggtcggcctggtggtcagtgtcttggctggccacctcctccataggtgggtcagcaaactcctcatcttgttcccccgatgatgacccctctcgataggtagcaaccaggtctgtctccacccgactctcaaacagtgcctttccacgggcaaatgttctcaccacaaaagtcatactacccatgtacaacagtttagcttaagggttgtgcaactagaactcatagataagtttgaagcataggtcgacatactcctccctaatggcctactttccatcaagagcctcctgtaacttcttcttatcatcatcaagtttagtttgcagcccaaagatgagggtagcctgggcagtgttctctacattcctggcgctaagcatggtctccaagctagaaatcattctctatctgctagaaggacttctagctcaaaattggcattatcctttcctacaagggaagcctccaaggccttcacaggctcttgacaagcatctgaaaatcccctaaagcaattatgggctcagctcagtttcattatggtataaaaacaaatcaaaacaacatcaatgccaaaaccgcaacactagccggccagtccccccttgggactactatggccagccagccccccacataagcttccaaggccggccagacacatgcaagaagccacatggctggccagttaatacagtgccaagaagatgagcagagctaaaagtataattcaccagagaaagatcccaaagcctggcagagtaaagcctgtaaggtccaccgtcacctatctcccttagatcctcgtccaagaaaggaagagccccctctatgcgtcagattgctgccttagcaaccttctatccagcaaatgaccccgctcttctactaggcctccaagcaccttggccagtaggccgtatcatagcttgtccgcctagtgcaggccctggtggagggggaggcagtgatggcctagaagcatcatcaccacgggaattcctaaccaactttgccctcactcgtttagtaggctcatccaaaggtcttcttgttagacctcttaacgtagaagacatgtctacaaaaagaaagtagcaaagtcaaaaagcaatcataaacattcaagacaagtacaaaagcatgatgttattaaccatcaaataacatcatcagaagagggactatcagagtcctcaactacagcctttcccttgcccttagatgcaggcatggggtgtgtagttctctcagaaacctatcctctaggcccgacattaagagaagcatctgttggaattatattttaccaagaacttagatctactcacaagtatgttgatttaacaacctaaaattg

SEQ ID NO: 49318 - DNA, 902 bp, Cannabis sativa
tcttttaaccattgaccacacttagggacttgtaatccatcttcagaaacctccattagaacttcttttccacactctctcttttcatgtccccatattccacaagcaaaacagagtgttggtaatctttcaaactttaattgaatccagaatttcctcccaccacaaggtatatatctgcccacgaagatactctgtttcaatggaaatccgattttcattctcacgaaaccatttaaaaacatccgattttcattaatccaccgcaattcctgcacttcacccgccatctctcccaatcgcacaacattggcacgagtaaaagctttaatcggccatcctttcatcttcacccaacaactgaccatgtctaacctggcttctctccacaaacctgatctaggccacttttccaacaataataatcctccattaaaaatccacggttgcttgttgagaatacctgttgcttcctccctgtttttgaacgtaatcccaacaaaggaatcttcctcatcttcttctaaaaccttaacttcccagcctccaattcccttctacattcgactaaaaattgtggtgaacaatgactccttaatttccctctttgcaattagtcttcctaccaacgattgttcaccgaaagaggatgcagcctcctcattctcctcccagtcctcctcactactaacccccattttacttgtcatggaaacaatatcatccactgtttcattcaaatccccctcacagccgccagttgccatacataccagtaaaacaaaaagatcaaacatgttgcagttcataaactatcgctcagagcagggtcctttagaccatcgagagagtgaaaaaattccctgtcacttcaagatacttacccctttttatatgatgat

SEQ ID NO: 49319 - DNA, 667 bp, Cannabis sativa
tcaacatgttcctgctgaacatcagattgcagattctctcactaaacccatctctagctctaggttctcttttctttgggacaagcttagtgtggcttgcttaaccaccctaagcttgaggggggctgttaagagtacctagttagttaagctgttagaaaggtttgttatggttagttaggacagctgttgtttgttctaactaactttctgttatgggttttgtattctgtacatatataaggattgaatatctgtaatcttagatcataatgaatgaatctcagtttcttctctttcgttctctctatttcattctctctgtttttgagctgtaacaatactaccattgtccatgtaatctaattctcaagctaatcaatacaagaagtgccatcgaaagctgaactatttttctctgcaacttgatcttattcatctaagttttctttactgatttttagttttaattcaactcatatttcttttcttttagaagattgtttacgttcttgatttctgttttaattgtactatcacaacagcatcagtaatggtaaaagtaacctcagaaagttacattggttcaagttcaagaagaatagaacgtcacattctgtataatctaccaaatttatgcaagtgaggtaaactaatttgcctttca

SEQ ID NO: 49320 - DNA, 1973 bp, Cannabis sativa
aataatgtaagtaaacaaatgtaaggtaataattaccttactattgattcttattacttattagtaaacataccattaactcaaacaagttaaaaaaatttattcatgcaattcttttaaataatcgatagcaagttcgttgaaccctgtaaattagtgtaaaattgcatgagtccaaagatactccaaattcgggagtccaaaggtatcgttgattggctagccattcctgaaaacatactagacattaagaagcatgcgatacttaatccattattaactagttattaattaatctattattaattagttagttcaactaattaatcttttttaccaatagttatatacttttaataaagtaataattttagtagcaaacactgaggaactagcctaacttttttgaaaacaagctagtcaatgtttcactttcaatttttcatatattatatgaaaacttaattaattattacataaaattaaaggttaattaattttgtctttaagcctaaaagaaaagtataagattgtcctgatcatttttcataaattaattatatattaaaaaaattaaaaataaccccccaatatttttcctttctttattgaaaaaaaataccaatcaaacttttgagattagtaataattagccattaaataatttttatattatacatttctttagcaaatataattataaatacgcttagttaatttataaatacacgtaaaatattaaagtattataaaattaagaattttgtgaaaactaaataatattaataacgtactcatgagatcaatattttttatatatgcatgtcatttaagaattaattaaattttcatacaatgaaaaatgattaaaatatataatatttatatagcaaggctaattaagttggtcaattatgctaattattataataataagttgtggttgaataatttatcaaatacacacacctatattatatatatatatcatcattaaatttttgatttagtgatataaattataatatcgcagtcattttttgccgactgagaatatatatataattaattaattaattagcaaaacatgttatgcacgttttaaatattgatttagaataaatctcacacacatataataattttaataatatatttataggaaaaaggcaaaataatagtaataaagtcaatgaaagaagcagctttgtttgcatccaatattatatttatctttctactaataatattaacagtacaccatacttttatagattagtaaatgtaattaacataaattattccaattcaaaaaaaaaaaaaacataaattattgatattttataattatatataattttatattttactataggctccatttttagaaatagctattagagttataatttctcaatttcggaaattttattaaactctaagagtattatatgctaaatataaaatatgcaatttttatgatttttgctcgacgatgatggaaaatgcgatagatgaccattaaagtcagggtaagttagaacctattcttagtgggacaaacataagagatattttagatggagtttaggcggggaggtggtatttgacaattttacccataaacctttagttgcttaagtgtgaaacaagaataaaattgtaattttactattttagagagaattgtctcttagtggattttggtggaatggtcatttcagcttgaactatctcttgaaattctccttctctctttccaccctagcaaaaaccagaaaaatcagcccaatctcatcaagttttttgagatttcatcagcaaagatttaaggtagcttaagcctaggtatgctctagaaacttttgatttgtaacgtccccgcttcaaacttttattgggcctttacacccaaagaatgatggctcttatacacgagtacgtcactctggctgcttcatgggctgacgact

SEQ ID NO: 49321 - DNA, 1142 bp, Cannabis sativa
aattacaggaggaggcaaagaagaagacggcgccaaaatccccttctccatggccgattgctccgacccaataaaatgaatagccattctagtccacaaagattaaattaatataattttggagctattgaaacatgggttttaatagattgagtgtatacaaaaagggttttaggtttttcagggataaaaaaaatcccagaacagtataaatcagaaaaggacaggtctttgcaaagaaacaaataattatcaaaattatataaatatatatataaatgaataagaagaagaagaagataagaggtatgagaagaaagagtgaggatgagacagtaaagatagggtttttggttgaataaatgggagatttgggattgggagtatgcaattggtattggacttttatgcaatccctcattcaatctcaaccatccaaataaaaatagattctcatctgacccttgatagatttagaattagatgcatagggatttgaactttttgaaaagtggcaactgaagtcaatcaagtcaccaccaccaatacatattaaattatatatatattttttattttgggtggaattggaaatgtgtacattttgtggatttcataataataagtgaactcattatattcttttcaaaaaaaaaaaaaaaaaaagtgaactcattatatattatcagtacttgtcatttgatgtttgtataatgttattaataccaaatagtcaactcaaaactcaacctaactctcggttaattttttagtaaattataattttttgttttaaaaatactcaataaaactcttttatctattgggatttgtaacataatttgttatagagagagttttaattttatgatttttacctgtttattttttttttatttaagcgtttatatattacattatataacctcggattcgaacccaggacctccaacacacacgcaccctcctatggccacttgagctaatctcaagtggtttacctgttcgtagaaataagtgaataataatacagaaattaacagtgctgttaatttaatgagatatttttaatattatacttaaaattaattttatttataaaaatacattttaaaaatttaattgtaaaaatacaattatat

SEQ ID NO: 49322 - DNA, 1370 bp, Cannabis sativa
ttagtgtaattaaattttaaattttataattcaatgtaatcatttttttataaaatactactaaccatttgttaggcaccacttcgtagcgtaaggaagaaaatattgatatatatatttatatatactagaaaaaacttacgtgcatactaaagaaatgaggtaaaagaatttaacagtactttcttctaaatttcgaatcccaaactagtgaaataatgactatagcaacagaacccaaatcatacaacctaagaaacataagttcatgaaaatttcaaaaacaaattacataaaatacaaacaaatatacgaatcaaaaaggtagagtcggagacagcaaaccaacccaaaaaatcactatatagattcaagatgattcctcacgtaggtgtgacaaggaacaacttttaaattcctttttgagggatatgtggttgtcggagtttgagtcggtaagaagcatgtgagatggggttggtacagaataatcaaacaccaagttggctgatccaatgcagcccaacaactcaatagtttggataattttcactcaccaagctgtcagaatcccaccaaattcgtgaactttgtagaattcttgagatttttgaggttaagagaaacaggaacactaaaagactatacaagccttggaattcagcttcatggacactttaaaaaaatgaatgaaagagagttggaggacttctgtagaaacctgttagctaccaacatttttttttttgatgaatcaatgaatttaattgcacaaacttcttttttacaatctaagcacacctatgaaaggatgcaaattatctatacataacaatatttacaagcaatcaaaccacctcctattttctgattgattttctttgttaatacacaagaaattcttgtttttatttgccatttaagctcctatatgtaaattcttcgggttctgctgccataaaatttcatttttttgctgccatataaaatacactaaaccagcaataacagtcgagaatacttgctgctggaatttgcttctcttagatctgctaatgcaccgaaagctaccaacattaatctcagtatgaaatattatctatgctagaaatgaaacagctaccaaaatttaaatttcactcttcaaaacttccaaaagtgatgtaggccagtaccattcttattatataaaacaaaattactcaccaacatgattgaaataataataataatatcttaaagatataaattaaaattaataattgttattcgtgtttttagattaataacgtgtgtatttttgcaagctttttaatgtttttgatatatgaaataaattatattttttatttaataataactaagtaata

SEQ ID NO: 49323 - DNA, 2397 bp, Cannabis sativa
gtgcaggtggtagtagcagttcaagcatttgaaggtttagttatctattgcattgtttattttagtttgagtcttagctttactcgggggtgagtaagcgttgactatgaagccaaggaattttcccctgcttaaactaatacaacatttgagggagttgagcttcatattgtagatgggaaggattttgaagcacttgcataggtcctccacatgcccctcaacctttttggatataaaaagcatgcgaacatcatgttcactagcctttgatacgtggcccctacattttttagcccaaagtgcatgactttgtcgcaggaaaggcctggctccgtcatgaagctagtgtgcttctaatctggtggattcatctttatttgattataacctaaatacacgtccatgaaactcaggatttcttagccagttgtggcatctgcaagcttgtgaagtaacataaaatttgctctagtgccacccaatgatgaattgttggagaagacataaactgactaatgacactaactgggaatgcaatatctggacgagtcacagttagataattcaactttccaaccaatctgcgatagttctcaggatcttaaaatggttccccgtcacgtgtaagatgcacagctagattcattggagcattacaaggtttttctcgtaactttcttgtctcagttaacaaatcaagtacatacttccgttgagacagaaaaataccttttttacttctagtaacttcaatacccaagaaatacttgagctcccctaaatccttcgtgtgaaactgggtatgaatgaaagacttaagggataagatgccttcagtatcatttccagtaataacgatgtcatcaacatacactactaacaaaatgatggcagcagttgatatgttatagaacacagaattattagacttacttttcaacaaaccaaatttctcaacagcctgactaaatttaccaaaccaagcacgaggactttgtttcaatccatataaatatttgcaaagacgaaaaacttgccctaactcccctgagcaacaaacccaggaggttgctccatatacacttcttcctcaagatctctatgaagaaaatcattttttatatcaagctgatgcaaaggccaatgatgagtagctgccatggaaaggaacagtcgaatagatgtaagtttagcaacaggagaaaaagtatcacaatagtccactccataggtttgagcataatcattggcaataagacgggcctttaagcgagcaattgttccatcttgattgaatttaatcgtaaacacgcatttgcaccctatggcccgttttcctaaaggtaaattaaccaaacaaagtaccatttgcaactaaagcattcatctcttctatcattgcagcaagccaaccaggatgagacatagcttcacgaacagttttaggaatagtgacaaaatcaagagacgcaataaaagagcaagaagaagaggagagatgattataagaaacaaaagaagatataggaaaagtacattggcgtttacctttacgtagtgcaatgggaagatgatctttcagttctggatctaatcactaagatgcaagtggaggacatgaaacaggaggtggaggagggggacgcttggtgtacattttaggaggccaagggagtggtggaggtgtaggcattgttggagttatgaccgagataggtgaaggaacaagagacttttcagaacatgtatcaagcccagaggatgtgacagaatatatcaacaaatcatcatcctcccctttacaagtaggagtagttgaagatgaaaaatagggtgtattttccacaaaggtaacatcaatagaaataagatatttgttaagagcaggacaataacacttataccctttctgaagaagagaataaccaagaaagacacactttgatgccttagggtctaatttggttacatgtgcacaaacatcacgagcaaaacaaacactgccaacccgaggagcaactagatacaatgacttacaaggaaaaagaattttaaatgggatctcactattaagtacaaaggatggcatgcgattaataagaaagcatgatgtggaaactgcatcggcccaaaaaggtttaggaactttcatttgaaacaagtgggcacgtgcagtttcaagaagatgtctgtttttacgttcttcgactccattttgaagtgcagtatcaacacaagaagtttcataaagcataccattagaggtcatggaaaatcaaaattgagtagatgtgtactttttggcattatcacttctcaaagtacgaatagatacattaaattaatttcgaatctcagcacaaaaagcaaagaatatagaaaacaactcagaac

SEQ ID NO: 49324 - DNA, 1562 bp, Cannabis sativa
aacttaggtatttaagccgcaaataatctttttttaaaaaacttttcttttataattttttaaatatttttctatttaatttcacatgtatcttgcacaggatattgaacattataattttttttttatttgtttatatcttttagctttattcacaatgttattgaacttttacctaagaaaaaaattaaattagttatggtcattttgtgcgtatctagtttaagagaactaaatggtgcataataacatttttttttcctcctgacttagtggtgaattaggctcttgaatttctttggaacttccaacattgcaaggctcggattgggcctactatttctctaggacaggcaacctctttgtcttctgatgaggctgtttcgaaatggtctcatctactggctggtactattaagattaatagtgatgttgctattgaaaaaattagttcttatattgatcttagtatggtagtgcgtgatcgtttggctagcgttcttaaaataaattatataacaaacaaaagagagttatcctaaaatggttggcgccattaaaattgcacgtgataatgaatggtactccgtcacactgcatattatacaataaattagtgagatatttgcacaaaagaggaggatgtaaaagtgacacgtgggaagaaagaatgtaatatattcaaagtggaatcggaacaaacccacccactcacattcaacgtcaaattcaactatgaagataaactctctttacaattgactttacacccatacattgcatacatttatatatgtgtattttctatgcatacccaaccaaaccaaacatcacttgactttagatttcacttctttttgcttctctctctctctccctcaacaatatatatatagctctttctttctaaactgagatcacagaatgatgatgatgaagcacaaggccttgatgatgataactatcataatattttcttatgttctcaccttatcttcagctacttcgagtaagcaacctatgtatatataaatacagttattctttattacgatttttgcaaaattgtgtcgattttatttgtgtgtgcgtaacatctttggatatcgtaggaaggctgataaagaactcaaatcagggaacatcaatggtccacgagtacttgaaagccccacatcaggtaactatatgtatatttatatatattatttttgttgggactgaggaattaagcagtgccttatttgggtttgaatttgcagataatgaaagtggataataataatattgaaattggagaagaatttattgagggaagaatggactttgaaaagagtgattattcaggtgttggagccaacccagagcacgaccccaaacccccttctggaaatgtttaactttaatttcttttccgctccaatatatgtttaactatatctaaatatatacatatactattttttttagagagagaatatatattactataatatttaggtcgtgcttttttcttgtttttgttattatcttttttgggaacaccaaatttaaatccaaaa

SEQ ID NO: 49325 - DNA, 1078 bp, Cannabis sativa
ataaatgcatcgatcacctgatcaagtttttccaccctgtctccttccaagtttgtgacagaaagcaccctattctgagttcttctagcccgaaggtaagcatgaaaaaaacctagaatttttgtctccctcttttagccaattcaagttacttttctgctgcaggaatgaatgataattttcctacgcctgtgtataattatctcgagccttcttttcttgttgctgcaattcacaatttagagggtctttcctcagtctctcttgacagctatcaaggtcttcctttgctatgatagcagtgacaggtacattattaaagtgcctcctgttcaaagcatatagcccttgctttaagcttctcagtttaatcacaacttgatacattttcgagccttttacttgctttgctcaactatcagagaccaaatccttataagtaggatgcttggaccacatcctaaaataacgaaaaggccttttgttcccacttggcatattatagatagttactatagttggagaatgatcgaaaataccttcattttgaaaataaatctcagcagcatgaaacaaatccaaccaagtttgattcgctagaactctatcgatcttggagtacattctatcttcaccatgttgcttgttactccaagtaaaaaagttccctgtatacttaacatcttccgatttgcacactttcacacactcgtgaaactcacttgcttctttatacattgctcaaaaaccaattctctcttccttgtgaaggatctcattgagatcctcaagaaccaaccatgcctccttaatagccaactccttgagatcttgccaaaggattcttctcccttcatcagagttgaacccataaataaaggtaacaaaaattcttgccttcctatctatggattccacaaagaggtcaatcatttggcaagtacattttaggatattgaccataaagctatccagcttccaacattgttttaaaaataaatttaattaaaatatttttttttatgtaaatttgaaataataaaaaaaaatatataattaaaactaaattttaaataga

SEQ ID NO: 49326 - DNA, 1782 bp, Cannabis sativa
atggccgaaatccttatgaaagcgactatacttggaatggtccctcttgctcgcatcattttttaggggtagagatctcttgtatgacattaacgattatgttattgtgatggtttttttttttttttaatcttcagtgagaatagttaaggacgtaaactttggagctttttcctgcaagtattggtttttagggttcttaaattatcctttctttccattgccctgattgttcccaccatttgatctctttctgtcgtggctgcccctgccttgcttgggactagagcacttagagacgtgctggtattttacttttggttggtggaaaccatcctaggggctgcattccgtactacctcctccaacttaataaatccatctgccttatccaggaatttttccatggagttcattgtaagcctcttgatgtctttctacaaatcttctagtggcatagttcctccgagcacaacaacaagccttccttggtcaacccttttactctggtggcttcagtcatgaactaacttatgctgtctttaagtggttcgtttgggggttgctttactccgaccaagtcttcctagtgtacagggaattacctagaagatgagaattgtgcgtggaactctgatataaggagtcccacgaatcaaactttcttggcgtgagtttgaaataccattgttgggtttcctttgccaatggctgggaatactctacaacatacatcatcgtacgcactgtaaatccatctgcaacttgaaattctttatatgggataatgggtcttcttttcctgtgtatgccttccaggtaggcattttcaacttggacggtagagggagtgcatttattcaagaagtaaatggtgaacctcttgcctggtcaagctcaaggttggtgaattttagcctggtcacacttttgactctgcttttaaggtgatccagttgggcttgcaccactggatcaacttgctttgattgttgactagcctgtgtcatttgtttccctcttagagctttgggcggtgcgtaagagtccacattaatgggttgtacgtttggaagggttactctctgctccctccgttgattcaatgtgggcctgaggtcgacaggctgggttcctatcctcccgaaagtagatttcctcggaggccttcatgcattctcagtgttggctggtggaacttctctccaagcacatcgatctctctacttttgagcacaggttacactatctgctccatcatcgttgttacttgaaaatatttgactacgagcagttgtagtttggccctgcctcaaagctatgtatggaatgtactgaaaatactggacttggccatttttatcataaatggatataggatcttgaaaccccgcatttttgctggtcgggtgttcccacttggaggtgaaaattctaactattttttcctggtaattcatgatcgtttactattgggcccatatttacatgtgaccacaaattggacggtccgacatgcaagggttttgggtgtgggtcactagaacttccgacccgtggttattcctgggcaaaacatatgcttcttttccacgaacaagatccctaacgagaggaatttcttcctgcaatttttgcccggtgtactgattaaactgccttatcaactccatgatttcacgtgatcggtggttgatcgcctcttgctaggctctcaggctctctgcctgtttttccatctactcttggaaaagctttttttgttgcgcaaaggcttcgttc

SEQ ID NO: 49327 - DNA, 1057 bp, Cannabis sativa
taatatttatttattttctttttcttttattaaaattaaaaaaaacattatctaagaaattaaaaaaaaaatcctattattaattctcaagtctcaccctaatcctcctcttcttcttcttcaaagaatctattaattttacaacaaaataaatctaattaattaaaaaaaaaactaatattcaaatctaactcgtcactcacaaatctctcacaaactcaccattatgatgattgcatcaaaaccatggctccagtcgtcgatgactgaatagaaacaatgcaaaaaaaaaaaagattaaaatattttggtgtatacatagttattttttttttatatgcatagtaaaaaaatgtataaatttttttttcgacaatataaattattgaaatatttttataaatagtcataaaaaaattacaccttacatgattatataatcataaaaaaatagattaaaagtctcttaaatagagagcgtatggaacaacttttaagaaagtgtaagaaagtgtatgttatattattttgtacaattaaatgatttgctgaattttttttttgataaggtgagggtgagtgcattactctaaaatgtactatcattttaccaaatacttactttaaaaaactatttaccaaatgataatggtgattatgtggtatcacttgtgtgactatatatgtagtactagagatatgtcacatagtaaattaattaataatgatagtgaccccttcttatcttcttcaaaataccaacatgtgttataattattttaaatatacattattcatgatatgagaggtggggtttgtggttgtactaatcacattacacagtcaaagatttagttatagactttgtgaaaaaagaaaaagtcttattgatataacgtcagtcatattgtaaattttcctaatggatttagctaatctttgtaatcatattcaattgtcactcataacatatagtaataattagttcaattttcaaagtgatcaccaactaatcctttcataataataagttcaaaattttctctttatcatccga

SEQ ID NO: 49328 - DNA, 2685 bp, Cannabis sativa
tggatgggataaggtggcaagtctgcctttatgagcctaattgcctgaaaagcaaatttgaacaaaatgttcacaaagcctccattacccaccatgactctagaaactcttttgtaagctatttgggcttcaatgaccaaggggtcattatggggaaagtgcacatgtcaggtgtcctcctttgtgaaagtgataggcagattcattgttcgaggacgttgagctagtgattgcaatatgacacgcatttccccttccctgtctaactcccttaaatacttttttgggagtttctagtgcttcctggaaggtacggccctctaaagattgtggccacatgttcatctaccagtggtggagctaagcctaggggatatgggttccccggtatcgaagccactatggtcagtgtagtcatagctagtggagcaggatgtgctagaagttgcattctaaggactcgagggtgacctaccttttgtggaggatttacggtaccctactatcctggaataatcaattgcctatgagtgaccccttattcgggatatatgatgggaatatggacccattgcctaaactttcttgctctgaccaacatctcaatttcatcttttaggtggttacaatcattggtggagtgtcccacccctctgtgatggtcgcaccttttacttggatctcttttcaatattcccccttatggtgtccatgggggctttctatagtggaccatgttacaagttgctatatacacattttctcgagtatccaccagactggaataattgatgtatcttggctcatattccttctttgctctatttgaagtctcactttgtcctggaccctttcctccactcttgtttagagactgacttacgttctgctctagaacttttgctttcgattgtttgagagcgatactgcatcagacttatgtctctccatacccgaaaaattaggttcgtgtaggtgcttttgtatgtatgcaaatggtctgtatactgttggggtatactaagttctaggaacaggaacttgtgagacaaatctgaaagcagaagcggttggagttggtactagagagactccaattttctattggtaaacatcttctaggcttatgaagccttaggccctggccataaattcagagaacgtctcggccccttttctttgcatttctccccatagcatggtaccaaccaaaagttccgattgtaacgccacaagtttcatatcatcgattactttagtctttgttgctccctccatcaaatgctagataaagttcttcaggatctctcccgcctgttgcttgacgttagtgatggagtccatttccatgtcataattacaggcagtaaaggcaaactgtaactccttcaagaaatgaatcgatccgagagcccatatctgccaccaatcctcactagatttggtaatggttagggagaagcacaaacatttggcatcctcacaaactctttccacttgcatcatcttgtggtacttcgctaaatgagttctaggatcactacacccatcgtacaactcaatttggggcatcttaaagttctgcgagagtgaagcttctgtgatctttcttacgcaaggttctaggtcctcatcctcaaattcggtgagggccccactaagtttctagacaaattttgttagtgcaccaattttttcttccaacctctttatgtcaatgttcgagagatctcttccacgtactttgtcattcaagtggttcctgagatcatcaccacatggcctcaccttgttgctttttgctttcttgtacttagcatctaaaggccttctaagatccaccatggaccaaatgtcttcggatgactgtccccctatcccaccatcctggtttactgaatcactagggtagtttttctttcccttaggctttggtactttcgtaccaatcctttttggtgctacagggcctttttgggccgaatggtatctgagaccgaaggcgccggtctccttctgcgcttgagaaggcatgttggctagattcatatttttgtgaggaggaatgggagcattaaggttattaggatcacctaccttcgccttccccttgtcctgcgtaggagcataggttccagcattggttgggttttccctagtgtttccttcgacgcattccacttagggatcatcatcggaatccccctcatctagatctctgaacttggctcgagggtgagccatcattttctcaatcctttgagaaaacttctcttgacgggctagcttttgtttggtcttgagcaactcagtagacactcgaaccacttcggggtcttgttcgtaatggtagccaatctttgtagtacccatctttgatgtactctctgtcatcttcctcttcttcatcaatctcagaatctctgtcatcatcgacatggtcatgctggttgtttgggtcatcctcttgatcattcacattggatatatcattggctctcgcatcgctcagttgggtgtgctctagaaagagggggtttacttcctccatgaccatcttgaggccacattgaagagtcttgttaggaaccatctttcgtgtgaaaaccatggcaaaaatagtggttaacgtctttcttcagctctcaatgaaagcaccaaaatgtttatcgagatttttagaaa

SEQ ID NO: 49329 - DNA, 1308 bp, Cannabis sativa
  modified_base (129)..(142): a, c, t, g, unknown or other
aaaatggtatcaaccctttaatcataatataatttttttgattaaatgtgatttttaataacaacaaaactatttctgactaaaatattgtctttagatataaaatgtcactaatttagttttagtcannnnnnnnnnnnnnactaaaaatacatttagttacaacaaagtgtgattttataaaatatctttagtcacaacataaaaataataatttataattagtcacaattttttaacttttaatcacaaattctattgtaacctaactaaaaataagacttttttttagtaattattgcttattggtggttagtggtcctagtattagtattgtagtgacgtgtatttttatttacttctagaatgtaccccttagtttgcgtatgtaattgagctggttttggtgtatattcttttcaactttatagacttaacctaatattatacacaatatttctaataaactaatattaataattaatcatctctatatatgacattttagggcataattgaagagaaaagtttggataattgtaacatagctgtgtattgtccgagtggaaaggaagtgagaaaagtgattgaagaagaaggatctttcgagttacaaaagatggaaatgtttgaacttgcttatgatgctgggtttattaataacgcaaaaataggagaaaccaataatgatgataagtacaatagagcaaagtatgtgtcggattacatgagagcagtttttgagtctatattacaaaaacattttggagaaagttccttgatgattttttcatgaggttcactcacaagatcattgaatcatcattggctaatgaaaattggccatacataaactttgttatttccttgacaaagaataattaagcaagcataaaaagtatcaaactttacattttgagtatttttatggtatggaaatgtatgtgtaggaagaactttaattaatatatataagagatgaattaatgtagttaaattattgtgaagtgtgtatttgaattattatttgttaaagttgtttcaaaagtcaataaacttttttagttctatgctttatgacttttcttttctttctttattttgtttgttaaataagctaacatttcattgctcttaactaacaaatttacaacacctacccattggagaaacagcccaatcataaggtgttatataattatgtggcgtgttattaattatgcatcatgcatcggatcatatatattttaatttaataattattataaaatattactagttatttataatattgcttcattttgtgat

SEQ ID NO: 49330 - DNA, 1330 bp, Cannabis sativa
aatcagattgtgggaacccgaatgtatcaattagtcaataaattgaagaatcttaagaaagagcttagagcttggaacaaagaaaaggtgggagacattggagctgcagatgcacaagcctacaatgctatgatagatagccaattggcttatcaacaacaaccgcttaatgagaatctttgtaatagtgaagctgaagcaagaatgaaatatgttgatatccataaagcatacctttccttccttcatcagaaagctaaagtttaatggatgaaagaacgagatgacaatacagctgcatttcatgctagcatgagagcctgaagagtcaggaacagggtcctttcaatccgtaatgaggaaggggtgtgggtagaagacccaaacatggttagtaatgctttcttgcaatactatactaacctattgggatcaagcatggcaatgaggaaaaaagtgaacacaaaacttgtgcaaaatggccctatactttcaaagcaaagacaagagtttttacagatggaatttacaacaacagatgttaaggaggctttattcgatattcctggaagcaaagtgcctggaccggatggttttagcagctatttcttccaagataattgggagatcattaaagaggatgttactgaggctatactctcttttctgcattcaggaagacttttgaaagagctgaactctacgtctcttaccctcattcccaaagtgaagtgcccgaagagtgttagtgatttcagaccagttgcttgttgcaacgtcatctacaaagtggcaacaaagatgctatgcaagagattgagaacagtcctaccagaattagtggctcagaatcaaagtggctttatacaagggagatatatagcttataacataatggtttgccaagacttagtgaagcattatagaaggaaaaatgtaaggtcgaattgcatgattaagctggatttgaggaaggcatacgacacactggaatgggatttcatagaagaaatgctggttgcaatgaaattcccaccgaaattcatccaaatcttgatgatatgcatccgagctcctaagtttagtttgtttttcaatggatcaatgcatggtttttatgaagcaaaaagaggccttagacagggagacccgatgtctcctcttatctttgttctatgcatggaatacctttccagaatttaacaaaggtaggaaagaaaatagatttaaattccatgacaggtgtttggatatggagctcaaccatctttgttttgcggatgatgtgctgatcttttgccatggcgattttaaatctatctattatcta

SEQ ID NO: 49331 - DNA, 776 bp, Cannabis sativa
ctattaataataaacaaattagacaataatccattatatatattaatttagttgaatcaacaatataaacaaatcatgtcgtttagtcaaacaagaaagaataacctaatagcacctttaactaaaaaataaatatgcggtgaagcatcaaagaaacacaaattaattcaaataaatatgtgacaaattacacttattaattactataaacaaaaaaatattgcaataaaaattgggtaataagaacctcattgttcaagtgattagaggctagctcaagtggagggtacgtgtgtattggaggttctgggttcgagtcccaagttatgcattgtaatatataaacgcttaattcaaaaaaaaaaaaaaagtcgtttgttgttaattattaaacaatacatcgatgctatgattctctaaaaatattccactaggttgaaagggtcttaagagcttattaactataataatttacaatgatttattaatgatatgtgtattaattataattagcgatcaagactataattttaataaagtcttcctttttatataaaaataatattaagataacctaaatatatcttaattcacatatacccacaccacatcaaccataaatttgtcaatatatatactcttatatttcttgtgccctacgtaaaataatttaagccttcttttaaggcccacccaagacccaaataaaaaaataatcttttaaaaaatatacttacattttaataatgttatttaaaactaccctttatcttgtt

SEQ ID NO: 49332 - DNA, 772 bp, Cannabis sativa
cttttgtaggtttgatttctaactcaacccccaaaaacagtaaacacaaaacttgaaagtgttcttctagtgtccaagtttccaacaaagttagagtgaacaaaaccagttacaatatcaatattgttgcagtatttgccaaatactaagccaattattagtgagccttggatgtatcaaagtatttatttcagccccatccagtgttcttctctaggaccactaatgaatttgctgacaacaatcatgctatgtgccagatggtctggtacacaccatattatacatgaggctccccactccatttgcatagaatatttttccataagtttcctttcaacatttatctttgtgactggttttgagatagtttgaaatgctgagcaagtggagtagttaatagtttggcatctttcatgccaagtttatcaagtaccttctcaaggtaattaccttgagatagacagatggtacgaggtctatttatcttgatctcaatgcccaagatccttttagctggacctaagttcttcatctcaaattcaattttgagtagagacttgagcttttcgatttgatttcgttctttcccaactgttagtatgtcattaacatacaatagtttatagataccatcatggaagtagacacagggatcataattgctcttggtgagccaattttcatcataaattcatcaaatcttaggttttattgtttaggagcctgttttaacccataaagtgatttgtttaggaggcatgcctagttc

SEQ ID NO: 49333 - DNA, 1150 bp, Cannabis sativa
taataataaagttaaaattttaatataattttattaagtaattattattgattaaaatacacaatttatttatatataatctaaaatattttatatatcctccgcgaagcgcgaggtatttactaatatatacaaagtgtaactaattgtttgagacatattaaatatggtaaattacttgaaatctttttgaaactagtaggataaatactataattatcatataacttaattacacccaccctcttaaagtgtggtgatggaatgtgaggctctctgaaatattagttgttgtgattggccaaatattactctcaccaaattactcctgcagcaattaatttaaccttgcaattttttgagttagctcctcacgtgtacgagtgttttctcgaagtatttcagcttgtgcgttgggaggtccttattgttgtttaagcgctacctcctctattggtgttaccagtgctccatgtctacttcccctgctgctttagcctccacgtcgaccatcacctctgcctccgccccttgcgggtgctggagctgtatccacgtggttgttttcattgtcgttaattttgaactgatcttcttggaggcatgatttcttaatgttccttgtttgtttctaagaatatctaaaagaagataaacttaaatgagatataattatcactatttttaagaaaaaaaatgcatacttacataactagttgacaaatcatttctattttattctttaatagaataaataaccaagtacataattaagtcatgtaaaataatataactaataaaactttaatataatcataaccatttacatttacaagtttacaagaaaatatcattatgactccttttatctatcatgagttgatttgaattattatttttatgataatacaaagtaatactattttattctctatatgaatctaaactcggatattggtactaaggtttttgaaataaatgttaatttttttaatgattgtgaaagttagtagtcttgtgattcgtaagaagaaatatcgagtaagctgtgcaatcccacatcacctggagaaggtcaagtgtgatgattctgagactgtataggtataaaaatacacagttaaagaggacctaaatagattgattaata

SEQ ID NO: 49334 - DNA, 1936 bp, Cannabis sativa
  modified_base (1808)..(1822): a, c, t, g, unknown or other
  modified_base (1910)..(1910): a, c, t, g, unknown or other
aaagcatggaggatggttctttcaagatggtctcctcctgttgtggtagattctgaaggtaattctaaattgaaatcttaactagaatggtctactgaaataaatcccacaaaaatcgggtttggtgggtggctgtacgtgcagcccaggaaggctgcacgcagcatgatgcgcgcgcagatgtgggagtttgcagcctccctgactgagatataataatgattatatcatttaatgaaaaatgaaataactcattaaatatagaattaatagagtttattcatagctcgctgactgtatagtcttaggagagacaaggatactcaaactactaattcctatattgacgaggcaccaacctactttggaatacacaatcccaagaataagactcgtttataagtaaagttattcgaatcaaactcggacagtctatagtgagacgtctatctcgctatacatcagagaatattgacgaggcgaattggttgtttaacagttagcatattttccacattataataataagcgtaacaacttggaaacatgtaggacacgattgtccagtctgtgaggccttatggtcaaagagcgattcttaagtttgctcagtacactagagctcatgccattgctggaaggcatatgattaaaccaagttattattggtcatctatatgcaaagcgagatgcctctacccacgtcagcgttaaccgccttaaagataggaatgataagtggttgtgcgtttatcaattgttatctacacgtgtttaaatgaaacgtgatcaagcccacgtttcatgaaacagttatataattcaaatttaaatgtgaataactgccaacctatattcctataaataggaacagattctacagagaaagggacggaaaaactttgagagaaggagatcattaattgtaatattgtagcgaacactcagaattatcttgaataaaataaactcgtggaatatgcagattttaactgcaaaaccacgtaaaattcttagtgtcattattataattattatacttatcaactttcctatacatatcagtgcttaatttattacaaaaaaagttcattattaacgaaaatccacgttgacaataattttattaaggtaattgatatagcattctctaaattgtgttgttcttactttttttttttaatttttctccataattaattagtaaaaataaaaataaaatactaaaaaagtaaaataacaataaaatatacaataaaaatatctccatttaataacattttgtcaaaaaaaaaaaaagaagatatattatcaattttctttaagtaacatatgtgatagttaattattttgtatgtttatattcatgataaatctaatattaaataatggttactgatttatttttaattttataaaaaatttagccatatacatttatataacaaactaaatacaattagttaattaattatttaattttaagaattaatttaaattgatttagagacaataacttttatttatttatttatttttataatagcaatttttttaatgaatcaatttaaaattctatatatatatatattaataatataattttaaaatttttaataaataaataaataatagaatactttaacaaaattttcgataattctccaagtaaataataaccatataaatactatgatgatgatgatgatataatatggaaaatttatatggtatactaaattttgtcatttttttttacaaaaatactgcctattttttttaatgtgtttttttataagtttcatacnnnnnnnnnnnnnnntaagttttcactagtgttctactgttattttttaattgctctactgttgatttgagttgtgttgctttgtgttttactggtattttanaaaaacacagtatttttgaaaagatt

SEQ ID NO: 49335 - DNA, 1484 bp, Cannabis sativa
caaagcatacccaattacttcatgttaactgctcaagtgcctagtactctgtgtgatcaacttgatcatattctagctcgtttttggtgggtgggaaatgctgataaatgacacgactgcacgttaatatgctgggatgagattggtcaacccaagagatgtggaggcctcggttttcagagatttatagatatgaacatggctctcctctctaaactgagttggatggttctgcagggacatcacaaggtttgggtgaaaatgcttctagataagtactgctccaaggtagatttttggcaaatagaaaagcatggcactaattctagatgctgggaaagtttacttgaagctaggagaatttgcgtggaaggtgccggtatcttgatcgctgatggtttgtgtgacatttgggataggccgtggatcccttggcgcaaccttgaagagattaaagataaatttcagttcagacacaatcaagctctatggaaggtaaaagacctgtttcttgatggaacccgagtttggaatgctgccttgatcaaggagtgttttgatgaagagattgcaagtgatattctgaagataaggccatttcaagaaggatctgatatccttttttaaaatgcagcaaagttaggcaagcactctgtaaagagtgcgcattggattagccaaagacgaagattcaaagattcaatgtcgatctgggaaaaactgtggaagattaaacttcatcatagactgaacttgttcatctagaaattgttctctgatattctcccatctagttccagaactagttttatccaaggtgctatctacaactgtggcttctgaaacatggaagtagagttaattgactttccatctgttctgtcaatgctctttcaccagaggattatggtttaagaaagggattcgtctaaacagcctccattggaacaaccttctggattttggtctgttgtggagtactttacaggaccctgagatgcaattgttcactgcgtgtatttgtgaaatggtgcaccactgttctgtttacggatagacaatgctctatggatgcagtggtcctcgattgtctctgtagaatggatgagttctcaatgaacaaggcctggtatgatctggaggagtcccctgctgtttgtcctatgctacatccttcaacggagagtgtcgattactggtgtgtcaaagttgatgcctcgatggttggcactgaagtgggatttgctacaatccatctgcaggattgcatccctgactcgtgtatctcaattgggttttcttaggttaaggatatccttgaaggggagctttgtggaatttcctgtgctattcaactggctctgtcaaagaagatcactaaggtgcgcattgagatggattcgaagacagctgttgttgcctttgagtcccatgaactcccattcggctggcatacttaccctctgttttctttctgtttaact

SEQ ID NO: 49336 - DNA, 973 bp, Cannabis sativa
cactcatagtcacacgcttaattttttttttgttttttttgagataatagtcacacgcttaattgaagggtggcaaaatgaattttaatatggtataacacaaacacaatataaattttataggttaaacgctagtcgaaaatgaccatattgaacttgacataaaataaaaactgatcaaacacaacacaattgacttaatataaatttgacatgtttaacacagttttttaaataaaaataaataaaaaaaattaataataataatataattatataaaaatatatatttatatagcgattcaataaattgaaaatattttaagaaattttacaactttagctttaataatagcaaaataggttaaagtggattaatatgaatacgctacaattttttacaagctaggattgagaatattagacacaagtcaaataacaagtcgacacgtctgatacgaaatataaaagcaactcacataaattatgacacattttgcgactctaaattgaaaagaattgctatagggtaccaatgtgtcaagcactattgtaaggtgatgtcttataattaattagcggtgaagcgactgcttgctacttggctttggaagtggctaaggagaaaagttggaagtaaatcattttagagagtgactctagggtagttatcaattcgctcaacgacctggatattcgatggtaaattgataactatgctaaattttgtaaacaactctctcagttttttaatatttgtaatttttcttttataaagagaagttataactttatgatccataatgtggtcaagtagattttcattaacaatcagtatggtcgattgtgtgtatcttcgctccgaaataatattttttgtaatgaccgtgaggtctaattttatcaatgcacgtttttcgtttaaacaaaagtgtaatatgactaacactatatataaaaaaaaaaagtaatt

SEQ ID NO: 49337 - DNA, 1439 bp, Cannabis sativa
atgttgaataaaatggattacattgaaatgaagttttatttagggcataaaacccaacaggtacccctaataaattcttattttattgtgttgaaataggatgatgatagtccaataatagttcgatcgtacccccaataaattcttttttattatgttgaatggaacgagggtaggctgataggtgcctagtagtggtacgatagtccatctttaaatgcttgtccttttatgttttattatgtttaaattggacgatgataggccaataggtgcccgatggtggtatgatagtctctcattaaatgcttatttttatgtttaaaatgggaagatagtagtctgataggtggctgataatagtacaatggcaaccatttaatactcatcaggcttacattttaaatggaacgatgaggtacgataaaacgatactattaacacataatttcattaacaacaatgaggttctttaaatgaaattaaatgaaatcaaaggaataatctttatagaattaataataatagcaataaataagataaatacgttttgtagttaaatctacatagttcatgattctatatattatttttaagttgtaaatccttacaggatacaagatattaagtattaaatgtaagaaatactgggttttctatacttattctctcagagggattcttttagaaaattggtcgtctcctatatcgtaggttaaatccctattataattaaagtgatgcgtccagtaacgtgggtcctagtgtcactagacttcctcttgaactgtcacgtattttgggagaaatctaggcaacacttattataaatttatgacatatattttttttttatcttttttaaattagaaacatatttcataaaaattaaattttgaaaacaaaaataaattactttcaaaatttatttgaacaattttttttttatagtgtgtattttatttcatttaagggtgtttggtacaccgaatcatgttcctgacgaccccaaatccacactcgcacccgtaattagaccgtgacccgattcccgactcctgagcccttagcccctgaccccgacctgacataccaaacgaacttaaatttctctcttaatatttattttccccactttctctcacctcacactttcttctaacttttttttacgaagtgattagaattaatcatgaattaacaacgcaaatattcacaaccggcgctggaaccttctcgaaccgacttaaatatttatttttatgaataaacatacttttggtaacttattaatttatttaaataaaaaaacaaaacaaaaaacaaaaatggttatcaaacacatttttatttttgaaaatttaaaaattgtatcgttacttttgtagtttaaaaacatcatgtttttttttaccaaatgcacccttaatttttacgtt

SEQ ID NO: 49338 - DNA, 755 bp, Cannabis sativa
taccaaagaatctgattcaatgaaatccattggtagccgaaggtcttgaatccattgcaggctatggatcagtgccaaagcttccatagtttctggtttagaacagcccgggaaagggctagacatagcagcgatgcattcgccactactattgcgtaatatagcaccaaaaccagtaatttgtttagctttgtccacggctgcatcagtattaagcttcagcctgcctgatggtggattcaaccatttaggaggaggttgaatcgggctcacagcaggtggttacggaatggaactttgctggtgcgaatgcagctgctggtgtgaaggcttaaccaaacgagcagcatgaaactcttctagatatgaattggacttaaataaaagcaactcaactagatgaggtttagtaccatggcgttctttattcctttctctccataagctccacaagatgcaaataaattgttctaactccagctgagaataaagtgtagaggctctgatcataatctcttgcaatgtagcatgtggagagaggatgttgtcaagcgagaagtgagaggacctccagaattttttaggacgtgtgcacctaaaaagagcatgaatgatggtctccttctcatgattacataaagagcaggaactagtatcactaatgtgcctcgtatgcagagtatctaagactggcaaacagtcattcattgctctccacagaaaaattcgaactttagaaggaatggagagggacc

SEQ ID NO: 49339 - DNA, 786 bp, Cannabis sativa
ataaaaatttaatcttttaaatttgaagttataattaggtacattttctcttttatgctacattaattttattaatatagtaaaataataaaagatttagtaatgtacttttcagtatcaagaagggctttttcatcggaaagtaacagtaagaataaggacccagaaaaaggtgtggatttagaattcttcgataaagaaatgccagtttttgacttggatgatttgcttagatcttcggcacaagtattaggtaagggtactctgggaacaacctatcaaacaacactagaaacaggtcaaagacttgccgtgaagagactaaacgacaccaataacgaattgggcaagaaagaatttgttcaacaaatgcaatttttgggaaagacaaggcatttaaaccttgtgcaaattgtgtctttctattactccaaagatgagaagcttgttatctatgagtttgttcctcatggcactttgtttgaacttttacatggtaagtattactactcaattcacttttgatttgattaacttaattaagatttttttaattaattttgatgatgaattaagggttaaaaattacataatttgcattgactattaattatgagtttaagagcatgtccgcttctcttactcatatcctcaattaatgaactttagacaaatgaaataaattgacatcttatatattttaatttgagttgtcttattttattgtttgaggatatggggttacaaaatttcaaatgcacattatgttataaatatttaaattaa

SEQ ID NO: 49340 - DNA, 1468 bp, Cannabis sativa
tttttttatggaagatggtcacgtgtaatgtatccacctatagttaattggtcaagtaaggtttggtagtagatgtgatatactataactattctagctaccctctcttgcgtgcccatgcttctcattaaaattacttatcatatattaattacatgcattcatataactatttacttccctatattttttcttctcgtgttcaattgtttctgaattattggaaagaattttatgttaattatacgaaaaaaatgagagggagacatcaatttatattattgtgactagcaaagagaaactataaaatctcatgtaaagactatattttggccttttcagctaaatgccaaaatttgtcagtggttgaaaaaaaaaattataataatattaataatgatactaatattaaagatttagtcttcacgtataccaacttggaccttttagttaagaaataagaacattctctttattattgacatctggttgttacacttcatttattgaattaagtttcaatattctttttcttttttcattcccagttggcagcctcttgaaaaggaacatttataattaatttaaaatttaataattatgttcagaatacatttatactaaagtgctaaatatatttatctcaaaataaaaaaaaacaaaaaaaaatgataaatatatttaaattgattcgtatttctaattttttaaaaatacattaaaatgtataaaaatattttctaattttttttaacaagaaaaattttattcaattagtgttagaaaatgaagttgttacctgttactagttaccatttaccattttacttgtaattagttactctgccatttctttgtacaattatcaggcacatgatctgtcaatcattgccaatcatttttctctctcctttccgttatttgtcagagaatattctcttgtattccatccttttggggtgaggtgtcccccttctagattgtactattttgttgccctagtggctatataatgtaaagatctgcagcagagctcattgagctgatttttcacaaaccttgtgtctatatctatattttatcttggtatcagagcttcagctacgatccatggcgactggtgagcaaacacctggaaatggctcagctcaatctggcagcaatattgcaagtcagaacttcagcagtagtggttcgtcttcttcgaacatctctgttcctcactttgggagtactctcaaccagccgttcgctctcaagttggacagaaataatttctctctatggaaaacaatggtaaaggccattgctagaggacatcgacttgatggttacttgacaggagcaagaaccatgcctgatgaatttttacctgcaaacaatgcagaagaacaaccaggagttgaatctgaaatcaaccctgagtttgaacaatggattgttaatgaccagctattgatgggctggt

SEQ ID NO: 49341 - DNA, 859 bp, Cannabis sativa
tagcaaacattctctaaactgtttctaggcttatctagaaaagagaatcgaatgaagatggataaattcagggtcttaaatatgattttccttatgatgtttacagggtggttaatggtttggattttgttacctacaaaattttacaaactcaagtggacacccaaattgcaaagccaccttaactcaatatactttagagaacaaggttgacatacatataacttgtaaatatattcttagaagtattcattctttctaatcattatatcaacattattaattgatttgcagggacaaatattctgcttttctcattcccaataatgttcatagcagctttgagctgtgtttatctccatctccacaagaaatcacctaactccaacaggtatatagagattgcttaacttaattaaactacaatattatgatttatctattacagaatcgatacttattctaatactgaaatgctaaacaaagagtgtccaactctatcttatatatacttttataccattgctcctaattatctgaagacttctaattagtatgattgtatacttaattattataattatgatatatgtttcagcaatgaaatgaggggacttggtcgtcgtttagcgttatggagaagtccagtgagtgtaaaagcacctctagggattgttagctcagtggagttatgttttgcagtcatgtttgttgttctcctaatatggtcactagccaattatttatatgtcagttttagtggccacctccacatgcatgcaggagacaaaatgtacgtaatatatatttaatctcttaattaatcataagcttacaaatatatatattaatttgtttg

SEQ ID NO: 49342 - DNA, 772 bp, Cannabis sativa
aagtaaattaatagagaataaaagctatcatatcccaactttaaccttaaggtaccgagctttagattggagcataagatttatgagagatcttttctacattgaaattttatacacttatacatgagagttttattgtggagtgggcaaaaattggccttttactgcagggattgactttaatgaagacatttaaattttgttttcacgaaaagaatatataaattatgatagtatttattatagtcaattaattactatgcactaatgagggttgaatataagttgttttcttttttataaatttaatcaaaaaaattatatttattcaattattaaaatgaagttgaataagttattttcagcacatataaataaattaagtaaattagcaaaacaattgctatggctacaataaatactatcatcaaaaataagaaaaattaatatttaaattcctagattgctctctaaaggtatgttttgcaaactctctataacagattatttgaatttcaaatgagttcatatgcttttgaattcgttgggacaaattttttttgactttagagaggtgggaatggaacttagaacttttctttgtgaggagaagtttggaaccactagacaatgtctataatcacatttattgggaccaacttattcaatttatttaacgattattctagtcatagtcatgatcacattagttagattttacaatatattcaaatgcatggaatataatgagttggctaattagtaatttttt

SEQ ID NO: 49343 - DNA, 942 bp, Cannabis sativa
  modified_base (843)..(860): a, c, t, g, unknown or other
  modified_base (910)..(914): a, c, t, g, unknown or other
cccattagaggcctcaaaaaccctacgactcaccttaatactgccacaacagagaagcagaagcagcaaagccatggtgaaatcctacttgaggtacgagccggcttctgcctttggcgtcatcgcttccatcggatcaaacatcgcctacgacagttctaggaagcacctccttgccccggctgttcgagaaggtcggagttcggcatgaacgacaaggcatccgcatcaaaaacctagacccatctgcgtcttctcatggtccttccctccgtgtcaccgcaatcgctgtcgatgcatcgcattcatatctggtaacctttttattttagcttcttaatgttacgtgctgttctgtttgcttccgagagtgaagttagggtttaattgcatgtagcgcttgggtatgcagatggaagtattcgaatttgggattttgagaaaggaacttgtgaaactacattgaatgggcataaaggggctgtgactgttcttcggtacaacaagcttgggtctttgcttgcatttgggagtaaagataatgatgttatactgtgggatgtagttggagaggtgtggtttttagttgtggttttgattttgatgaggtgtggaggaaagagagggatttggattaggattttgatgatgaatttgaagattgagagatgaacaaagatgaagatgaagaagagaagatcttgggtttggaggaaagagccatttttgttttgggaaggttaagatttgagattgttaatatgtatttttgttcttgtgggctgggagggtttctgcaaaaaaaaaaataagaaagcagattgaagaagaagaagaagaagnnnnnnnnnnnnnnnnnnaaaaagaaaaaaaaataattttttctgatttttaatttttttaaatattnnnnnttattttttaaaactaatattatgtgga

SEQ ID NO: 49344 - DNA, 1498 bp, Cannabis sativa
ctaagaattattactgattttgatatacaaaaataaataatattgaatactgaacgccacctgtatgtatccataatgaaaaagaattggtagccaaactagaagtgaagtgtggaaatgggtgaagccgagtagtgtggaaatggattgaacccagccgagcataaaatacattacgttgggtaatggggtctaaattaacatgtgtttaactactgatttaaatattacgaatcacacaattattaaatataaaacaagtacaatcagtaagaatattcattatataaaatgtactaattaacaaatatatgagaaattaagagagagaagaacagagtgaattctttattattgctctccttaatgaaatacattaaagacccgagtttatataatactcggtatcaacaaagctgttagttatagagtaactaactgtaacagaaataataaaacagacccaactaattttaactaacaacccgattctaagaacccctctcaagatggagtgtaaatattgattaaacctattttggatacaatattagaaaaattactaggcaggagtgctttggtgaagatgttagctaagttgttttgggaagaaacatgaagaagtttgatgaagcattgttggaccttctctcgaacgaaatggcagtcgatttcgatcgacatgttttgtgcgttcgtagtagactggattctcactaatatgcattgctgcagtattgtatcagtagagtaaggctggaggagagtgagtgattccaaagtctttgagaagagcaatgatccaagtaagctcagttgtggcattggccatgactcgatactttgcttcagcagaagacacagtttgttgttttttttattttcatgatacaagagatttgccaaggaagaggcaatagccaaatattgacctacgcgtatcttggcaactttcccagtcatcatcagagaagaaggatatctgaacatttgaaggtgacaagcttgtctctgcataggctgtgacagttggggaagtgttggagggaaaaaaaaggccttgtttaggagtttatttgagatactgcaaaatacgatgtgcatcatgtagatgggggatgcgaggacaagacaaaaattggctcaagtgattcacgacataggatatgtctagtaattgttatggtcaagtaaattaacttgccaattaagctacaaaatgctgtagggtctgttaagggattacttttgtctttgctaagcttgagattggtttccatgggggtagaagtaggcttagctcccatgtaacttgtttcttttagaagttgtattgggaagggcctctgtgaaacagagatgtcgttgttggttcgaccaatttctaggccaaggaagaaacgaatggagccaatatcttttaacttgaacttgtcatgcaaatatgttttgaaatgtgcaatggcatgtgcattgttgctggccacgattatgtcat

SEQ ID NO: 49345 - DNA, 1710 bp, Cannabis sativa
  modified_base (994)..(994): a, c, t, g, unknown or other
agctttgatattaattttttatataatagtatatatcatagttatatcatgtaatttttttgaaaagtttaaaataatttaatgcgttgaaaatgaatttaaaaattgctcgcgtacttttttttattttttatatgtgtgaaataaattgtaaaaaataattaaattataactattcgattatcaaaaatacaatatatatatatattggtagttttatttttatgagtgcgaacacctaatattgtttctcataataaattagagaaaacatattaatagatagtatacatataattaatattgagaaagtctatggtacatccttgatattccattagactcttattaagtttgatattcaagagtttttttaatttatctttttttttattaatgaaagtgtacgttgaagttatttagggtcaattataaagtgtaaatttttttttgaataatttactataatgttcaaatatttatttccacgtaatttttttatatacacatagtaaacaactttttaaattttaatttatttttagtactcaaaattatttaaagttctctaaaaatttatgaacaatcttaaataattacacatgcacaatcataaaaagaaaaaaaataagagtaccaaaacaatccatattttgtgagtgtactagagattctttcattaatgtataaaacattgattataataagggagtagtgtaccctttaaaatattaaattttgctgtgaaaaagcaaagtccaacattaattgaattgaaaatcaatctcaaaggaggttgcttggaaatagagaagagagtccactactcatggaattgtgggccccactcaaaactgttcatatttcggctccctataaaaccccttttcattcctccattccttcattccttcattccacaataacaatatttcctctctctctctttatcattctcaattcaaactcttcaaaatctctctctctctctctntctctctatatatatatatataatcatgtacatgcaaactgaaaccatggcagcccaagtcatgcctgagcaacctcttcatggaattcatattttagcaagagaaaacaataccccaattcccagaaggtaacacacaatctctctgtcttgaaagaatcatttagtcccacattgtttacagctaaaaaaattcatctttctccctactatatatatatatataaactagtcaacaatacactttttctttgtcgttttacctttttcaaattgtcgttttaataactttatttatttatttttatttatttagattggaaggaaaagtggctatcgttacgggaggagcgagaggaataggagaagcaacagtaaaactcttcgccaaacacggcgctaaggtagtaatcgccgacgtagaagacaccgccggtaaaatcctcgccgaaaccctaggttcatcggtaacatttctccattgtgacgtcagctccgaagatgacgtggagaatttaatagaatccaccgtgtcacgttacggccagctggatattatgttcaacaatgccggaattctcggaagccaatccaaaggaagaaagagcataatggaattcgacgcagacgaattcgattgcgtcatgcgtgtcaatgtcaagggcgtcgcccttggcatgaaacacgccgcccgagccatgatccggcgggggggc

SEQ ID NO: 49346 - DNA, 2193 bp, Cannabis sativa
taacctaacctaattaacatagcaatatagatgtattactactcttaagaataatttttgtcataataaaataacaataataacatttgtttgttatcatatcttttttattttttatttaattataattgaataaaaaatatgtaaattttgttttacaaataaatattgataacaatgtaatgaaatatagtagatttcccaaatattaattaatatcattactttagagataactaagtgtaatagatattgactttaattttatttttaatgttaagaaaaatgtatacctagtcaataactttcatgtcatgtgacaatattattattaattagaaacaccaaaacttaaaattattactaaaacaaaagaaactagttattcaacaaaacacaccaaatttagaatcattaattttaacgcgtacaaacaaacttacaaataatattatcatgacatgccctaataaggtactaaaatcacaaaattctgaaacaagatgtgttatcttcaatgcccatgtcatcaccagcgcagtgttctacaacaaataaaaataaataattaatgtacgatgatcataggagaacgtaaaagtaattcaaagaaataaagtacacataaaataacaaaaaaatatatattattactaacttgttagtgccaagctagctttttccccatcaatgcagctcctttcatgagggtaatcatcttgtaaagccaccctctcaatattagcatgaactgaagataagcaaatctccaagaattgtccaacataaaattcccacaaaatccaatgaaaaatccaacaccgattcccatgtaaaccgatgacatgttaaaccatttgtcatcgttttcgcttccatttgaagtagaaaaactttgtaatgatgtctcgtctccagggcatgagcttgtcaaaggaactccacaaagagcaaaatttttagcgtatgaagaagcattaaagctttgcaattgagtacttgtagggattcttcctgataatttgttatttgacaaatccaagtaatccaacattgatacttctcctaagcttgtaggaatttttcctgaaagcttattgtgagacaaatccaatgattctagtttactcaagcttcccatcttctttggaatatttccactaagttcatttcttgataagtttagttgaaccaattgtacaagattagtcacttcaataggaatttctccattcaatttgttacttgatagatcaataattcttagtaatccaaggttcttcctgtattcatactcagttcctttccaaacaatcaatgcaatattattaaagaaaataaaagggccaggtaaccgacgaaaaaaataccaaaattgtgctaccataaattggttactcaaccattgaagtgaaattctcaaagcatgaaggaatggatctagacaaattgttttgagaaagatcaagtatttgaatcttagtaagatagcaaagatttagcggtacatttctttgacttcacactaagtaaaacaagatctgttaatgcttcaccaatccacaatggcaatgtatcttccaaattattatctcccaaatctaaaactcgaagttgagtgcagttcttcaatgtggaaggaaattttccagaaaagttattatgccctaattgtagagtttcaattgatgaatatgaacttgaacatattgagttagggatctctccaaataatctattgttgttgagcttcaaaacaaaaaagtgagtattcttcaaacaatcacttggaagacttccaaataaatggttataagaaatatcaagaaatagtgtttcaatatctattgtttgacaaagaaagggcttacaatcattgaatttattattggagaggtacaacactgttgcattggataagaaatgtgggatagagccttggaatttgttgaaactcaaatcaacataaataggctcataagatgggaagaagggactagattgtaatggaaaatttggtaaggtgccaccaagaagattgcaagacatgtttaaatagtacaatttggaagttatattaccaaaccaactaggaatgagaccagaaatttcatcattggaaatgtctaggtatgagagattgaattgtgtttggagccaatgaggaaattttggacctagcttactagaaga

SEQ ID NO: 49347 - DNA, 2182 bp, Cannabis sativa
acttaattagaccaatagcgatattgacacgtaggagggtgcttgacaccactagtgccatttagcatttctcatatagatgtaacggaaaacctcctaattaatataaccaatcaatttactataaaaattatttatattggtatcttcctatacaagtaagaaaaaaaaaaaactcaatactccataaactttactgcccaaagatattggtatctttccaaaaataaaatcaatatattccaattgactattagtgtttccacctcccattaattacaaaatctccacgtttatatttatataccaaaacgatattatattatatatagtgaaacacatattaattgtcaatataaatttccaaaattaaattagaaagaattcactaatataatcaccatctaatttgagtgttaagcttaattttcctttaaaatgtttatataactatttttctaattaaatattaatcaaacaaagctattaccctataagctttattcctcttaaataatactctaattcactttaaatctttccttaaatcatacataaaccaaaattactcttttataccaaaaagtaaaatttgaacagtggattgttaactttaaaattttatatactataaatacatgataatgtgatattttaaccaacttaccctaaataattaggggcgaaccatgtataataggtgccatagccttgaaaggcaccaaaaccataaacctcacccatcaaactagtacttccattcctttaaccaaggacacatcataactgcctcaggaaagctatctttacctcaaccagaattctttaaaaattgctatctttacatacctactacctaaaacaactatgacatacaatcacaaacaagaagtatgaatgtataccaaaaaattctatcaccaaacagctcaaaatttgtcccccaccaattacaaacaaagatcttaaagaacaaaacattcatacaaactttacagtaaatcccattttaaatacctactaatatagaacaaaaacaataacaaacaaacaacaagataaaatcaactaaccaccatttcagcaataaagaaaaaatctaaaaaactgaagtcactcagaatcaaaactaaaattttaactcaagaacactccatcaaaactatacatacattcaagcaaaagtactaaaaccaagagaccttttactaactcaaaataaaaccaaaataaagccacacataatcaactacaaacaatcttaaagattcataaagatctactcaaattaaccaactaatacaaaaccccaaatcaacctctctccaagatcataaaaaataaattttatcaattcaattaatcatcgagcaccaaccaccctacaagtctaaacttagagctttgaaaagtgcaatgaattagatttaaaaatttaaaggaccccataaagctaacaaacacattagaaaataattaaaaaaaagcatacctatgatattaaggcaattatatgtgatatttctcctagatctctatatcgaaagtgagtaatgctaataagaaacgattcggagaggtatctataaagaactcatcttttcctttggagaaacccttgtcgcccctttgaatttgagattaggtctgattggatgagttgaacgataaggattggtgaccaacaacgaatattgttaaatccacttgaatctaggcaacgcatccctcccaattgaaacatccagcctcaaacactgagattccaatctactctttgcaaatcacaaaaataggaaaaaagtaggatctactcatccttaatccttgaaaaactaccttagtggcaatagggtgtggcatatagaatctctatcctccatggccacatcggtcaaagattgatccttcacatgatgaaggaaacggcgatcgaaaacgaagaagagagcatctaattttttttttttcaacctaagcaagacattcagggtcattgcttttcaagacagccaatgcaccgaaaagatttgggtcgatgccaataacccaatcagacctcgcattacgtgggatggagtcggacccttcttcttcttttgcttccctatggaaggtttcgaaatctctaggtaaagggcaagataacgaggctaatcaattttctttgagctcaacttcg

SEQ ID NO: 49348 - DNA, 1614 bp, Cannabis sativa
tttaatctcaccttctccataacaacattatcataccccagccaaggcatccaaggttgccaccaaatgtttacatctctcccatttgcgataatagtacaggtcccttccagaatgattttcctagcctctagaatcccttttcaaatagcagaattagaggcttaggctttacaaaccaaaaaaactgttagaagcataacatgattcgaaaagccataacccaaggtttctcaacattgccggctatatccaaagccgatttatccatcaaagctctgttaatatcctcaaacttcctgaatcccaaaccaccccgttgtttaggttgacacaaatataagagtcccaaatcttagtagccaaaaaatgagccttctccacaccacccgtccactagaacctacgaatcaaggcatccatttgtctacatactggaagcatgaaagtggacatggaaaaataggcatagcaagagccattgaattgatggcgactagtctcccccaataagacagggttctcattctccaaccttccagtcttgccttcaacctctctttaaggaaagagaaattattgctacgagtttttgacaatataaggggatttcccaaataaaaacccgtcgcatctgccaccttaatctgaaacaactcctcaattcttttttcctccaactagaacaattcctcgagaattcaagtcccgatttatttttactacacagttgcctagaccacaactcatactttttaatgcactcccccagaactacaaccgcctttttgcttggtctcgcaaagatcatcgtatcatctgcgaacataagatgtaattttggatcctaatattctctagtcaaataaataatgatataataatcaaaactagtcttgtcctatactatatgttcaagtaattttagtgaatacgtttttgccttatacatgatttctgttctgatcagttgcaaacctaatctttatggttgtcttttcctttggtttttttttattattattatttaaaagtttttctctttccatgactaccctgctgtcaattattatcatataattaatatcatttctttcctttctgtcactattctctcttatttctattatgaaaaataagatttttttttttatttcttttttatgaatatatagtattaattatcttttccaatatgatcttcacatattcttgtcaataatgataaataaaaaatgaaatatatagcgaatatatgttcaagtagttgttactcaacacacttgaactggaaaacaaagaaggtcctaataataatgtatataggacctctttctcacatataatattcaacacacttgaactgtatatgcatattattattatttgccaaacatatcttttgggttgttttttcttatatcacattgcttaatcactacatataatctaaaacattcatttagtgtagcagagagaagtttgttttgatgtatacacacacacatatatatatatatatatttatagcattctcatctctagctaaagtagggtctaccatatttctagaaaagattaataattaacctaattaattaagttaacaaacta

SEQ ID NO: 49349 - DNA, 1344 bp, Cannabis sativa
aaaatacaaaaaaaaaattattttaaagtgtaaaaatgaaaaaaccccaaaaatattattaatgaagcaattattttcgctggaagtggaaagagacatagttttttgtaagacatgggataatgttttcatgtgccctagttacagttgtgttttaggatttttctatatgtgcttccaaaccctaattttggcactgtttttgttcacgtgtttttcacattattgataaaacatacaaataataaggataaacaaatatataactaataatgtgcaattcatgtccatataatctttgtttttaagctaaatatctttcttttctttttttttttggttgaaaatatatatatttttacacaatactaaattactaatatagagccaaagcctaataaatatggcttatcagacaaaaaaaaaacacaattcaaataagctaaaaaactatgtttaatttaggcttaaaagtcaaaaacacttgtacaaatccacttttttatgtttatttttcttcatgtgtagggactctttatctcaagttcattgatcttgagctcgtctaatcattattcatcatggtttttctaagtgatcagagaagttagaaaaataaaataaaaggcaggccattggaaatacagctgcataccacatattataaataagcttttattattaagatggtaacactagtttatacattcaaactatatggacccagatctaactatatttattaaacctttttttttttcgtaaggactgtatttttttttttttgaaagttggtaaggactgtataattaaacgcgaaagaagtaaagttacgaaaacgttttttttgtttttgtttttggagagagggagagggcccaatttttttttttcttttttgcagaataggagagggcccaattgagttaattatgaaagtaatgttttatgggctgctgtcattgttccgatggccaatttttcaataggggctgcaaattgcggctatatggtgttttgctgtcaaatatatttattttcaaaagaagaaaatagtatttttttttttgttttttaattgaaattaattattcatgggttagactacagtgaattcatggtgtttcattagacttttatctacttcgatatttatgagttttttagtttaatttttttaataaatttttagaaaattttaagtaatttacaatgctaaaaataaagtttaaatattttgttatatgtaaatttattttttttatacgcgtggtaagtaactgttaaaaccatattttttaaactgtaaactacttggagttttctaaaaatttacgagtgatc

SEQ ID NO: 49350 - DNA, 2178 bp, Cannabis sativa
tactttgggtacaatacatataaagagatgtatgtttcaattaaatataaaattagaagtaaatttgatcaattgattaataaaagtggtattttttaacttacccctttaatttaaggtcataaaccaaaaaaaaaaaaaaaatctcattgaatttacactgtgaaaccaaaatgtaacggatattaaaataagctataaacttttgacataaaatattgaagttgaaactattaaaatatgacacgagcattaataggaatttaaaaaaaaaaactcagtatagtttcaaggtcacaaaaccttaagagctaacagattgctcttttcaggaaaaatgaaaaagaagaaaatgattacataaattatctcataaactgatttggtttttcaactctaaaaaagatagattaaatcaacaacagaagaagttgtcacttctttttttgtttcttttcaagaaatgataatatatataatgcattattcctatttccaaaggattatactacatatattgctgctactaatccaaaaaattcacagtacaacatccatacacaacgtagtctctaccatttctttaatttcttaccaagacttggaataaactatacatgcagctttcttattctttaatttcaaagctttaatttgaaaacgaaaacagctttctctcatattttccttttttctttttaaacattaaaagctgtcttagtgatccaattctcaaaaagcctaattaaatggtatgtatatattttcctgttggctcataaatataacatttctttaattataacaaattaatccaacaatacggccttaaagtgacacgtgtcattcatttgataagatatcaaaagataaagatactttggacaaaaaaaaataaattaaagataacaataatattgtttggttataatatttaaatcaaactcacaaaactttcttataattgatgattaagcttttttagggtgacaactcactcccaagcaataaataaagcctggttggcaagtccatccccctgtggctttgccggatgttttccggcaactaattgagtctgtctttgactctcaataccaatactactctcctctttcgaaccacttacattaaaatacaacttaacaaatccacgtctctcttctaaaccctaccctttcatatccctatattacacatcaaatccttgtttggtgcttgtaattattaagtgaatatccctatcaatatatagctaggttttatttgggtcacaagctatatgtgacacacttgggcccacatcagattttggtgaatcaaaaaaatttcgtttgagatagtgactaccataattattttttatggcaagtgatatatgtatttatgggttttggagtggagacaatactaaattttattggatgaggctatatttgcactaagttatagtatatttagtggcttggattaatagtttttagtctagtttatggccggctagctccgataacaagtttaaatatggctagctatatttgatgttgattataaaatgactaaattgtttaatgtagagtatagttcctataaccttgatatgcgtatatgtataaatatatatatatatatatacaaatacatggcatataaataatacatatttatacgttcttgctatatttgtccaactatagtatattaagataaaattttcaaagttagccttaattagtatgaacactttataggacacctttatataatctacatgataatgttcaacatatatgttaaaatggtgtcatacttatttatctattataaggctacgcaattgtgtgcgttaatttagatgaaattcatctgaatttttatttttttatttttttttatgaatcaagtgaatttcagtgctcaaacacacatatttataaaaccaaatagcattctccaagtagaagaatttaaaaaacaataaactttacaaactttacaatgcttctaataaccattctttatcactaattgacgctttctttggccgtgtacaagatatttttttctttgacacatgtttaactttgcacactatactatctacactcagtatcaagttttgccataaaatgtcatttctagctcgccaaatgaagtatacaagggttgccaagactg

SEQ ID NO: 49351 - DNA, 1321 bp, Cannabis sativa
gtttaggtagttttaccaccaaaattttagattagggggttagttgcgaaaacctgtccactttaggaggttttgccgcaaataacccttttaaaaaaaaagtcaaactcaaccttttttttgtccttttttttacccaaaaatctttttttgttatatattttttttttccagctgatggaacaacctcaattcatataacgtaatgtatttttttttaattagataaattaagcataaaaactcaaattttcctaatactacccattcatgggtaatacccatatatatattttatatagagtaatttttagtataaatacttaagtttaacttcgagttataaataaatatgttaacacataatttcgttaacaataatgagacatttggaataaaattaaaagtaactattcataatagagataaataagacacaagaatttttacgtggatttgtagttaaatctacgtagtctaagagtccgtattatttctgagtttttcatttgtttaagattacaagatatttgatacaaaataataatctttgggttgtatacacttaatttctcaaggtcttttttccgaaaaattgtctatctcttacattgtaggttctgtcctatttatagaatttttaggaatattccatttcgttcttaactagatagccatttccgaaacgagaaaaatgctcacgttttatttttacaacatgtgagataaataagttaaccactggtaaccgctcttgtgcttatcttgaaagcattttctttcccaagatagcatacccaaaatatgcctcacattctttagtaatgctgggaatgactaggcgtatgttgcgagacgataattgagctattgtttacaccaaaagtagtcttgatgatatgtacatcaatgtttgacatgtgacaagaaatgacatcttaaagttgagtatcctgaggcatagcaagtcagtttgggagaggtccctagccctgcgcccaggttgacttcgagaactctaggataaaagtttagaatttaataactcgttttcaacttactatatttcaatattatgtaccatgaagacatgaagtaataaatacaagccttaggagctgaaattacatgaacttgcaccctagaagccaacctggcacctaggatttcacccaaagcccaagttgacattcccaactaggattttagtttctaggaccgtcttagtgaaaatagatcaaactttgcattgggacatgaactagacataccacggatgtatttgaggcatcaaaatcagattcggagcaagttcattttt

SEQ ID NO: 49352 - DNA, 865 bp, Cannabis sativa
aaatttgtacttatataattcttccatccaccaggacatgagaagtttcatactactcttaatttgggtagatatataataaaatatttttataagctgtaattccttttagtgctcttaaaattcattaaacaactcatactacaatattatacatggattactttgaaaattcttcaacaaattgattacacctgtttgaatcaccataatcgatgcaataaaaataatattttattaaaatttataactatgataaatatagatttttgtttgtaatattctacaaaagatctcaccatagataatatatatggtctcccaactttcatcaatgcaagatgttatttgactcatcgttattcacattggtgaagaagttgttatatgttgaaaattacttatagctagaagatcttattactttcatattatttgtttattaaagtttaacaacatataaaccctaaaatatgttactaattgaattctaaatgtagttctcttaggtaagtgatcaagaatcttaaaataaaaattagaaaattatgtgtcatttttgtgaaataactttgcacaatttagtgagccgaacatatacttaaaaataaaataaaaaagtgaacttgtaaatgactttagaagactaagaaatgtacataaacttttgatactttataacaccttgccacagatagaatttgagtgttgaacagaaggagtcttataatattccgttatgttctcgttataaaaaaaattctaactttattttttgggtagatcaataataagggtaattattgaaaatacatgctagtaaataaggtcctaataatatatgttctaactagggctgagcatc

SEQ ID NO: 49353 - DNA, 547 bp, Cannabis sativa
tttttttttttttttttcatgagaagtacaaaatccaatatttttattatgaaaaatgttatgagtaccttaatcaatcaagtactactagatgtgcttaataaaaatgctatgtaccgatctattgtaattaaaattatttataaattaattgacaatgaaaaaaaaaatctcataaatcttatatattttattttcttttcatataacactatctaacaattaactcctgtaaatagtaatatctccggttagttttagcaattgttgaaaaaaaaaaacatatttgacaataattataatgttttgggtggaatattggactcaaatggtaatacagtagatcaacaagtttgttagtattcaaaggtcataccaggttgaccaaatttaataaagaccctgcattattagaaccagtcttctaaacctaaatatattcggccccatgtactattattatgtttgtcactttgtgtataatataattagtgataaatagtatattgctccgtcttgaatgtgtcaactattttgacaatggcca

SEQ ID NO: 49354 - DNA, 1319 bp, Cannabis sativa
tctttgtcaaaaaaaaaaaaatatctaattattaacattctatcgcgtgattagaggagtagagcaaatccaacactaactaccttctaactacgttggtggaccctattttttattttttaattataatacttttaaactgaacaattaaaattataaaaatgtgtagtagtactagcaatgcaaatatttacatttaaaaagttaataatttttttttgataatgaatctcattttttgacaaccacattaactagcattctcattgaagttgcacttatacctttagatagataatcaattagattattctttttccaataataatattaattactaataagaaacaccactccttttcttttcttttcttttttctttttgttttaaatagaaatatcatgcacttaattgtactttgtgactttatttgatattgactttctaatagttaggagagaactaaactaaaaaataaagggcttacccaatttgcatttatatctaaaagtgaagttaccaactttatactaataaattgcataaggtgttagagatgtatagattctatattttctcatgcaatcttaattataaatagtaaaaaagtgtttgtttatgttttgttaagtgttgtgctaattatactacttattatattgtaatggcatcttattattgttcatggcatttgttgagtgtgaacaatattttctttttattgtccaaaagatataatgttagtttaatctttattaaaaaaaataattattcattcaataatgttatattatactatcattataaacttgaaaaaggctaccattgctttccatcaatcttcattggagacttttgaattgaaaaattgtaatcaaccacatctaatagttaattaacaatcaatatcaatcatcaatatatcatatataagaaagtaagtttatgtttcttataattttttctttctatttcttttatttgtttaacacattttcttattttatttcaaaatcaaactacacatataaattaaaagtcctataatatttagaaatcgtttaaattttacatatataggttataaataatattcttactacattacttttctttatttaaaaaatattattttttttttataggtgattaattaatatcttatcgttcttaatttttatctaataaaaaaaacacaaaaagaatgaggcgacatcttattttttaagtaggtagttgatgaacttaattttaaagagaatgcaaaatatatttttgtagtttttaaaatttgtcaagtttaaaataattataaaaa

SEQ ID NO: 49355 - DNA, 1943 bp, Cannabis sativa
  modified_base (51)..(73): a, c, t, g, unknown or other
  modified_base (1809)..(1815): a, c, t, g, unknown or other
tcgtaaaaaatgtttaaaattccgtgaaaccgtatttttgttttttttttnnnnnnnnnnnnnnnnnnnnnnntgtgaaattaacccttttaaaaatatatattttttgtattacttttgaaaaaaattctaaattttttttaaattaaaagtaacaaaaatattttttttttatcactaaaccctaatccttcataatagacaaagaaaatacttatactaccttgagcattattataggatactaaagtgcctagtatttttatgatatgacattttataatcacttagtaattttttataatctttactgaattaaaataaatgagatattaaattatatcaataataatattatatcccataaaagtataaggcatgctacaagaaatgtaacttttaccagcacagttcgctactgtgctgataaaagtaacttttactagcgcattttgcaaactgcgctggcaaaaaggtcaaagttttactagcgcatatttgcaatggttaaattttaacttttatcaatgcatttactttacgcgctgggaaaagtcatttttgctagtgtttttcattttgtactgacaaaagttctaatattaacgttgatttatcatcccctcttgcaaacacatcagaagtaaattttattttattagtgtaataccaaatttttaccagcacaaaaatatactaacaaaaataacatttcactacgagtattgtttagtatttatatgtatattcatcatatacagaatcattgtatatcctctgcccttcttttcctctgaataatgcctatcctctctatcttcattttcaatgcatatgattactgactactggcaagttattacaagtttcaatataatgttaggaattgctcaacaatttatgtgccactattagagatagagataacaattcccatgtgtcactgctagttttctttgtgtttctttatttttatttatttgttctcatttcctttcttcaaatttttataaattatatatatttttacatataaatttgtaggtagttttacaatgcatcttttaaaaatgatgtactgatacactttctattaattttaatatttaaaaaaaaaattaatttaatttgttcatatgtgtgtatgttatacttatttaagatattttataaaattttgaaaaatccgaaataatttctctcctcagtttggcctcttatatttataccctaaatacttaaaataaaaaattaaattaaatggcgaagtcattatttaaattaaatgtaaaataaggtattaaacttctcaaatattccatggcgaagtcagtttggcctctttgatttgcaaccatcttttttcaactcatttattttcttttttattcactaaacctgaaaacattaataaactaaagcataaaataaaactaaatgaaactaaactcattaaaaacacttaaaataacaaaacttgaaaataacacaaactaatacctaacacttatttatatttattttaaaaattacaaatagtatatatatttttcaaaacttaaatattaaatgtgtacatttatatacaaaacaaatcataatctaaataattaaataattaaagtatctttgtacaactcatatttgtaatttgatggttgatgccagcattcaataaaataaatatttatcttctcaaaaaaaataatataacaaatatttacaaacatatagatagataatcacgtgattaatgagctttaaattattaattaactaatgtatggtaacatttttattttttaattnnnnnnncacaaaataaaagtaaaatttttaattttaaaaattttggtgttcggtaactacttttgttttttcaattttaaaaacagaaaataaaagtatgttctgtaaagttcattttttattttatttttatt

SEQ ID NO: 49356 - DNA, 1832 bp, Cannabis sativa
ttagaccccgacccttgaaccccagacctaagaccccggaccctggacggcctggacccctggacttttgaaccccaaacacggacccggacccggacctagacccctgaactccaaactcggacctggactcaaacccatggaccccgaaccccagagtacctcgacccagacccaaactcaaaatcaaacctggactcggactcagaccccaacctggacccggactcgaaccccaacctagacctagacctggaccccgacccagaccctaacccagacccaaacatggacctggacccaaacccgaacccgaatcccaacctagactcagacctcaacctcgacccgaaccccgaccataagcacgaacctagactcgacccggacctaaatcctagaccccgacccaaacccgaatccaaacccggacctgaattctaaacaccagaccctgtccctagaccccaacctgactcggaccaagacttggatctcgaaccccaacccgtaccccgaaccccgaccagactcggaccctagcccaattttgggtctgggatcggggtctggattcgagttcgggtctgggtctgggcttaggactgagtccgaggttggatgggttcatgtcatagcatgatgtagaatattaatttttttagtaaaaaaaacatctaaaaataaatctaaaaaaactgagccaaacactattaaaattttaaaatgatacaaaacggttttctgttcttacttttgaaaactaaaaattaaaaatgcagtcatacagactctaattatctcactagacttttggttagccacaaataataaataaatacaatagaatctctatttaagaatacaattataattcaattgaaatacactagattaaaaaaaatcaaaacactaaaaagtatcaaatataacaacaacaataataaataatgcttaatactatattataataaaattatttttgagtaaatacaatttttatacatgtattacaatttaaaataaaattcataattctacataaataaatttataaactatatatattttattaaaatgtaattatttttatatagatttatattttttttaatacaagaatatataattaattataatttaaaaattattttttggtctaaattaaaacttaattttgtttgtaataaatttgtttgcgatttgagcatgcaaattaataatgaataagtttttatgttttaatgtcctggcatgatttacagttgcttatcatggttacagcaacactaatgttgctggatatgatttattgtcttattgtaatagtaataaattttcaaaaatttaattagatatacatttaattttctattgctttaaaaaaaatttgcagaccttaggaagaattttggaaggtttaggtgttggaatgatttctaacttggtatgattttctatgtatttacataactataaccttttaaagtaaatgttgtagatattaatatgtgactaatatgtgtatctttggtgattgtacgtatcaattgatcattagctaatttatatattagcatgtaatgcaacatttacaatggtagaaaccatgtgggatttttttcatagacactaatatgtcaaagtactaaaaaaattataaaataaattaaaaatgtaaataaataaataatatagaccaattcttttttatgtcccatcaccttttcattatttttctttatatatatatatatatataaattaaagattattcttaaacatattattcttagaaagtaatatatatatatataatggcacctggaaaa

SEQ ID NO: 49357 - DNA, 1276 bp, Cannabis sativa
tgctatttattagttgatgactataatatcatcaacatgattaggtccattgttaaatttattagacattttgcatgttgtgaagtcttagtattatagtaagagatttagaaataaatatagtatatttaattagatttgtcccctaagtatttgccattttcatttttacaaagttgggttgttttatttatggttcaacttttggtttataggggatgagagaaaaatggcagacatgtctgagagggctcttaaagctgcaaagcctaatgcctctgcagatattactcaccacattctttctctggtcgatgtttcatcgaccaagaagtaacaataactcaaagaattcttgttctcttgttatcttctacaaattctttatttgggaaaatatcattccatcagaacaaaaattacatcagtgtatgtcaattcaagaaaaacatcattgttttcagagggagaaaaacctgaggttgtagataagacaaatatcatcttgatttgaccatttgagcatctgggtctccttcaaatttcaggtagtgtttatcagtgtaacttcattaatccccaatattatttagagagattgtgtagtctgttgttgtaatacaatgaacaagtgcacatatatacatacacacatctctcagctcacttaatgtaccctttttgaatctttatgatatatttgtgtgaatatttatatacttgttctaaatcaatgtttaagtgagtctttgttctgtctttgttcaatccccaataagcatgcagaagatgttatgcttggtgatcatagccgctcattgttatcttttgtaatccaacggctttggtaactataggtagcatcaccaattggggagaacacctataattgtcaaaatacacaaatcatcttaaaatattacttttttattttttctctcatctacaaaatactacatttgtactaatcttatctttttatcaacttattgatcgatcaaattgtgtaatatttcatccgtaattaaagtatttcgagttcttattaaaggtaataactctttctattatctaataagtaatcaaaatccaaacaaatattgcattcacttaacatgctatgttaataaagagggtcgaccttaggcataggcgggctagacccgtgcctaaagcccacattttttgggggcctaaaataaaaaaatttattaggcttttatgtaagtaaaatttaagtatattataaataacaaatattcatagcttagttggt

SEQ ID NO: 49358 - DNA, 1327 bp, Cannabis sativa
cacatgacaaccttccccacttgcaacccatttgtttagaagaagaaaaattaagttaaattattaattttttatatatttatataaaaaaaattaaaaaaaaaaaaacagatatgacctcaaaatttcttgtctcaatttttggcttgttttgtattttgtcacaaatgtgttatggatccaactatgagaaaaaagttggcccaacaaattatctttaatccacaccacacatttatttaggttattattattattagtattaattataatttttattttaaaatgaattctattacttgtaatttgtaataatataaattaagtgatgtttaatactagagattatttcataaatatataaaaatggtaaaaagatttacattttcacggatttactgtttttttacaaaaaaaaatacggagtgttatttttgtgttgttttagtaaaattattgttttgacattgttgttatgggagagcaacatatttttttatatataaaacaatacgaaatgttgtttttgtgttgtttcagaacaatattattttgatgtttctgttatggaaaaacaatataaaagtaatatttttcttggaaaaaaaacaagtgaaaatcttttttaaaatatccgtaaaattgtaaataataataataaaaaattcctaaaaatataaaaaatatatatttaggtatattgtgtaaaattcttttaatactactatatgacccccttataacaatactctcttaaattttggtttttgttttttgataggtaaatgagaatattcattaatagataaatcaggtaatgttcgttatataaaactattgctcatgaaacagaatcaataaaaatagacaaaccaagcacaaactcgaaatccaaaaatctgaacttgaacaaaatcgaaactcaaaaatccaaactttttttttaaaaaggaaaaatccgaacttctacaaactcaaaatttcaactttatacgaattataatattaaaaaatttaaccaatcacaaaataccacaaatattattataacacactacgtaaatatattattaacaacacaaataaatatcttaaagaattatttcaagaagatacgtaactcgaaatgcctcgtcgtaactcatttcaacattatttttattaatgaaaagaacattactaaaacaaaaggctccccaaaaacacactattgtccacttgaattgaaattgagaaactgaaaaggtttttttttttagttattatgaataattctaaaacaaaactcataaaacaaaaattaaaaaacaaatgaaaaaatgggccg

SEQ ID NO: 49359 - DNA, 2281 bp, Cannabis sativa
  modified_base (1950)..(1962): a, c, t, g, unknown or other
tattgtaataaaatagtacaaaaatttcacatcaaaaaaaataaaataaataacaatgcaaaattttaataaatatacttttacattttgacacttataatttcattaaacaaaattctttcaaaggaaataattgccagactttcatggagtgatatttcattttagaatatgggatatctaagattaatttaccagaacaaatagagatgtctactttgaggtgacatagacttggcaactgcagagcaagtgtagtgttaataggaagagagttgagtgtagtttcattgagaagcatgcataggcattttggctgctgagcatagagttggttgaggttgtcgcagcacgacagggctggcgatgaggcggtaccttgcacgaatgaggcgcagggtgcaagcggaagcagccttgtcgcgcactgagccacggttgtttcttgcgaaaaggtggtaagaggtgaaagggaaatgttcaaaatgaagaggagaatcaagaaggtgaaagagcacattgtgtgtttgtggtagtaagatgaaagaaagtgaaaatgtgaatgaagctcttgttgttagtaatagtgcttgtattgggtaatggatagtagttagtgtcatcttaagtgttgaggacaaattaggagtaaatagttgaaaggaatgcatgatatgagtgttagttgttacacacatcttgtgtgttgacatgcttttatgaaaaaggaaataattaataaaatattattgttcaaatctactataacttttaatattttaaaaatattattccttaaagaaaaaggagtaaaataataaaaaaaaaatacattgttgtaatctaatttttttttcttaggtagtgaacagagtcatataattaataaagcagtaaattacaattagtagtggaacttcttcgaaccaaaatagttcatcgtctaaccaaaaggtatattttaccaaactatgagctgcaaaattcatcgcgagccacatgagaactgcttccaaaaaattagacaataaagctataacgtcttcaaacaacaccccatcatattaaaaaaaaataccatcctattattaatgattgtcgctaaagttaatgaaattaaaaaaaaaaaaaattatagcagaatgacaatcatcaaaataaaattaatatacaaacttaaaatttcacacaactcatatcactaactcaaaattactaaaatactaaaaaattaacaaaattttaaagtataattagccaaaaatattattctttagctagtactctaatttaaatttatttacaattcttacatatttttggaaggagtattgatggttttcataaaaatgagaggagagaaaaatagtagctaacactactacttacatgggttgaccaacaacattaacttaatttgggaacaaataccaatatgtacatatatttgaaatttggggtgtccaaaattgtggaatggaaatactccacaatgcactaaaaattatgttgtatatatgtacatatttataaaattggtatttttctaaatagttattaactcagttacaaactagtaatcatctattactaagtgggtcattctttaaaattattagtaacctcaaagttgaaagctatctgtctgtgactaataatttgtcaaatctataaatattaaaatatgtttgaaatattagtaacttatagtagctaatatttttgtaatttggttatgtgatattttggtctgtgttgaaggccgagtatgtactaattataatgggggaatttttaattttatgatttgtaagtttcacattgcaaaaacatggattttgttattgttttgatgttattttcatattatttttatgtaattttctagttattttcgtgctgtttttaaagaactccgtaaaaatgtaaaaaaaaaaaaaatctttaaannnnnnnnnnnnntttttttttataaaaaataatgtcttattttatgtgtttattttgtttagagctataatattatttaattttttgtttttgttattatattattttattggagttatatttttggttttatatttctattaaagacaactatttcccaacatgaatgaattccattaaaaaagaagaagaagaagaatggaaataatatgggtttgggcagaagaggagcatgagaaaatttattttgtttttgtgtgaacgtgaaataaagttaggtaaacatgtgaaagtttgaaaacgttttaattggtttacacgcccttaatta

SEQ ID NO: 49360 - DNA, 1296 bp, Cannabis sativa
agatttggtggagaattggccattactctcctttatccatatccaatagtaatttccttgctctgagggcctgcccccttttaagacagcagagacagtttctttatcaaataggcatttcaatttccaagtatcccagtcaccgttttccataaggaggtcgactactttagtagtattgggatgcgtcctaccaacaactttaggcatgaagtttttcccatgggtaacccaaggcacttcccaaatattggtgtccttaccattcttaatcactttacaagtccctttcaatagagtagtattagctttgaccacatttttccaaaactaggaatccgactccttatactgacaatggcctccaaaatctaacagcagagcgattggcttttgattagtaaattccatccccatttagctaagaaggtttgattcatctctttcgtttctgaagcccagccctcctcgagctttcggatggtacaatttgtcccaggccttgagatgaatctcgtgtttacctttattgaatccccattagaaatcatgaactattccatcaattttagtcgcaagctggtttgagagtttagtagtttgcatggagtacactggcatagccagccccaccgatttgataagggtggctcacccaactttagagagttatcgctttccacccttgcaactttttagaaagcttgtccaggatcaaattaaaatcaacatctttccgtctagtacggaacaaaggaagacccaggtacatcacattacttttcagaacactaattccaatggcctctctaattccccttttgaccccattagtcgtgttcttattgaaaaaaatttaggttttgaccttgttaacttgttgaccgaaccaagaacaaaacttttccaaacggagccagaaggctttggcttcctcaatgttggctctccccaacagaatgagatcatcagcgaagaaaatgtgggaaagaaccggtccgcctgactcagcttgatcccttttatcctacccttcctcaaggccccctcaaaaagtcttgataatatttccatggcccagataaagaggtaaggggatagcgagtctccctgaaaaaataccacaagacgggactaacttaccaacctgacctctgttcaagtagacattcagagtagtggttgagatacactgagagatccacttttgaaaagtttctggggcaccaaaagacatgagcacttcatcaataaattgccagtttaacttgtcgtaggctttaacaagatcaattt

SEQ ID NO: 49361 - DNA, 3049 bp, Cannabis sativa
  modified_base (1392)..(1398): a, c, t, g, unknown or other
atgggggtgggggagcgatccccgtacccgtcccgccccgtttacatccctactggcattgggatccatcattttagggttggagtcaccaatactctccttattgcccaaactcatcccaaccatttcaggaagaaaagaatatgccatcacttgcagaagaaattaaccacttggtagacatggtaagatctctatgtaataatctaatggtgcataatttggagtgttttaacgacaataactcaaataacaaaagttatgagagttgtttgaataatgaagaagtgccattagttgaatacatggaaaagattgagcctagaattgaatagaaagaatcctttgaagtaaatacaaatttgggtatattggatgatatataaaatagaagaagattagaaaatatcgaaggaataagatgaaaaaaaaaaaatctcacaaaaagatgatatataaaatagaaaaaattgtgcaagaaaataaaactaaaatttcaagtctgaattggactatcttctgattagattttggaaaaagtcaaaacataaaagttctagatctctcttttatcttttcggaagatcttgaatcatccaattctaaataatatcgagagagttatggccaaaatactatcagtcaacgcagtagaaaaatcaccacctacttaaagaaacgaaaccatgtagtgaaactccaacacgggtcacagcccagcccttgtggggccgcggcccgccccttaaactacacaaaaattgtctttttctctcacgtgggttttggtagtttcccaattcgaataggaatttaacatgtgcattttcttatatctttttagtccctgaaagcttatataaagggtgaactggaatcgatttcagtcaggcaattcagagggaaataaacagctaaatatagagcacgagtttcaaagatcaactgcaatactgaaggcattcttcagagggttttcagcattcttttcttctcttttcttaagttaatatgtgtgattttgcttccgtgaacatgagtagctaaacacttgattagggttagatggatattgtttgacattgttttatggttttaatatgatttattttctcctaatttctatgtattctatgtcattcgtacttaattacttttaattgcctagccatcaattaacagttttatgatttcgatgcgagatctgagaagtgagtgtcgattatgctattgtgaaatagaactgaattttgatataggacaagagtacctatatggtttagatagcttataggatttctgtgtttaatgcttgttacattttaatttatcaggagagtagaaaatttgcatgtaattgagatttatatatctaagaagactataaattannnnnnnaaacctgctattgcatagaaatttataataggaagataatcatattaggccataattaataggaacaattgaaatcaaagctctaatttttattaactgttaactttatttatttatttatttgcttcctacttccactagttttcttaatttaattttctctcttaatttttattcaaccaaatagaagtaaaagtttaattttaaagtacttaactgcaatccctgtgggatcgatctcactcttagtgagtctactacttgttacgacacgtacacttgcgtgttgaatttaccacaacagcaagaaactagaactgctaataccgcgattgaacaaattactcctggtactggaatgtcgtccactgcaaattcccaaagattagttggggatgacaccggactgcaaaatttgcaagctgcattggggctaatacaaggccacaataacactcttcactaagaccagcaagatatctgaggagctataaatctcgcttttgatgagcaaagacgtcagttcgaacttcgaagagtggagggatcaagatatggaagtcatgagggcctagtaggcattgattgacaaatgttccagacaagccaccgtactgatctgaagagcctattaagtcaccgaccagcagccaggtactgatacttataatcctagtggaccataacatggtcagaagaacgaccagttgaacatactcaacaaaccccagttaacggaccgtccaatccaagaccacatgatcaaattgtgggccaaatgtagacgggaaaattttaccaagtcgttacttggaaggaaatgatcaacttagcacccatcctcaaacagaggtatcaagtcagcccataattcacaacggtcaagcacaaaggcctccatacacatcaatgtttgatcgattgggtaccgtgcacgacctcaggaatcgcataagaggattagatggacaagatatttctctgaacgtacaaccagacaacaaaaattactttgtgtccaatccagttttaagagatccttatgtgacacaggcaggtcaagttgatccattagtgtgcaagcacaaatagatcaactttaaaacctcgttcaaggcttgatcggcctaaaactcaaaattctagaacatgatcggcccatagctcaatgcactgtatgtcaatgcaatatgcacacacaacactcaatagtggagcatacatacacttgtgtctgtgtgaaattactcccataactcgtaattgaaaactacctaacaaccttgtaattactaatgtgaagttttattatataatataattttgcaataagataggaaaaagactaccgtagagcatccctagttagtgtacgatcttgatcattcattatattaattaatggttaggattgattgtatggtctagattaatagtagcatgttgcaccaccaatggtaccctactacagtaaaaaaaaaaaatcaagtcatcatgtgatcagacatggcatagtcaaagtctgtctaaatagtgagcaataaatgaggacatcatataatcattctcagttctgatgccaggacctgttaaataaatcatgcattattcatctacagacaatataactaagcatatcatgggaataatg

SEQ ID NO: 49362 - DNA, 1707 bp, Cannabis sativa
  modified_base (26)..(52): a, c, t, g, unknown or other
  modified_base (1049)..(1077): a, c, t, g, unknown or other
  modified_base (1173)..(1175): a, c, t, g, unknown or other
  modified_base (1271)..(1273): a, c, t, g, unknown or other
aagttcttatttaggatgttaataannnnnnnnnnnnnnnnnnnnnnnnnnntggtaaaataatttccaaaaaaaaatagttttgaagaccctcatagagaaacttgagccacttagtaatggccaatttcttaaattggacgttcatacatcggtgtagaggtttggaaatgtcaaagaggactctgatcctcataaatggagtgatggaatcatagagggaggcaatatgagtctcaagaagatcacctactacgtcaaccacaaatagggcaagcttgagagacctattgccaaatggaataaaatgcacttgcatcaacagaggaacatagcgaagctggttagggagaatagtgtcgaaaccattaaggatggcaaagatcatcaaggaacggtcaaagtgccatggttgcccttcaacaattctactacgattgccttcacaaccaaaacgcacaagaaaaagctagaatgatagttagagaaagtgaaagggaaacaaatagtccaggcgtccttcatagcattacccacccaattaggcttaacagacttaggggtaagaactttgacaaccaaacagtaagactcagtatgaggttatgggttaagggagacatgatcaaaatcatggatgacagcttcctcaggtgtgagatggatagtagaatcgggggttagggtgctagtattcattgctaacgacatacaaaaaggaaataagaaaatatagtagaaatttaagtagaaaagtaggtaagaccaggagaaaccatacaaccttaaatagttaaaaaaaaaaaaaggtaagaaatacctgatacataaggtagtcgaaaggtgtagagatgccaaaactatcatagcttcgtctagcccagatcttacccaaataagcataatgatgatcgaaatcctcctaaggatgaaaattctagccattaaatacatgaggggatgcgaaggaggagaagaaccaagagatttttgagagatcaataaatgtaaatgattgcgtgagatatttgttggggattattttaccnnnnnnnnnnnnnnnnnnnnnnnnnnnnntttaacatcctaaatatgattttctaaaacaatagaatttaaacacatatagagttcaagaaaccttacattgattgcagcggaattaaatgactnnntccactcagatctctaacccgtgttcctttctttcccagagtactatcaagatatgagcccgattctcgtttaggtgttggattcttcacagtctnnnacactatgattgagtactaacttgttatgtgtaggcatgtactcaatcactaagagggacaaaatttgaagaagaaaatagggagaaggattcgaaaattagagagagaaagagaagactcaaatttgactgaaaggctaatgactataagctgtcagttttgagtctatcactatctatttataggaatcattctaggtttaggtttgaattatttggcattaaaaagttgattaataaattgagcttaagtggtcggccattaggatgtgggcccaccaattacaattttgtaattttactcaattattcatcctattctttcacaaatgccatattttgcaattcaaccaattaaatgtcaaaactatttattcaataattaaaatttattatcaaataaaatttctatataacttatttattagttagac

SEQ ID NO: 49363 - DNA, 5171 bp, Cannabis sativa
aaaaaaacctcaaaatattagaacccctcaagtttttgatattttgagtgaaccacacacaaaacaaaagtcattttcttaattataaaatctaatactcaaaattattttaagcataattatgacaaaaaataaattaaaatggtgattttatttaattaaaacttaaaacacattattatcaactgcaaaagataaataataactccatcaccatataacataaatctaaacgataacataatttattcttgtctccatttggtaaaaccatagcattaacacttaatttttaatattatcgtcattaacagtgacattagtcttcacatcttcatcatcctcgtttgttgcagaaacctcagccttagccgcaatcaccacttgagacgtcgagttggtgttattattctcggcatcaatagtctctatcctcttattaatttcttccaaattcttatcaatgatacaaacaagatcattcaaatctgtagcagataagccaacgagattagccttaccatatagattggagtacatgagttgggttaactccttctcacgattctcttttttcagctttttgacctgctcgctcactttgttgatccttttcctaaggaaagcttcttggttcaccatcttgttgttctgctccatcttaaaagtacgattcaccccaccgtcaaaggaaacacctcaggttgagccttgtacgaaccaaagattattgcaaacactcctatagcgcacaacctgcccaactcgctcccttctttaccaaatctttcttcctctttttagttatctcttatcgtctactttgtgcctctatttataaagaaatttacttaggtatatgtgataaatgagtatttttccgttaaatattgctaaaacgtattaatgtttgttcaaaaacgcatcattatatatggtatatattttggtgcattttagtatcatatctcatatattttaatttaaagtgttaatgtttgggttctttaaggcatttaaaagtaacaccacataaattgacacttttataagtgactggttagcattttttatattacatataaattagggtaaatattattttggactttatattttacaaaaattactgattttggatcctgtattttgtaaaagttactgattggaccatgtgttttgcaaaagttaccactttgaatcatgtgttttgcaaaagttaccacaaaatggaccttgtattttctaaaatggtaaaaatagaaccctaagctcaagttttgataatttttttaatataaccaacttgaaagcaattccttacacgaacagatacagaaaatgtaatcagttttgtcgtaacacctctagatcttattattattaaaaaaaaatttgacaaaaaatcatcagatcatggacataattgtaccattttgaaaaaaatacaggatttattttatcatttatcaaattagaaggtccaattaataacttttacaaaatagaggatctaaaatagtatttatccattaaacatatataatcaaaataaaattacactaatatataataatatgacactttatgtggtattagaaatccttttttaaaaaatattaaatatcaataatggccaataagaccatatgaaggtattttatgagtggttaacagtcttccataaaatggtcaaatttgcttgtgtcaccccattattgactgaaaagcgacattattgctactattattatcaaagttagtcgcaacaactgttggaacttaatttaccataatcttatttactatcatgtatgttaataattaaatataattattaacaacctaaaacatacttttttctataacgataattcaaacacataaaagttaagaattctcacattgagaatacaccaaaattaattagctcattctatttaataactctagcctttatatccctttctgtaacaaggtatcgtaaagtgatgaacttggttctcttttttctgaattgcaaattgatttctatacagtctttcataatttcttgagtatcaccttgattagtgtgggttgaatactcaatcactaatggatgctatgatgggagaaattgagaaagtgaaaaaagccttttgtgatcagattttggttgtctgacttgtgatgatctttctatatatagtcctctattaaatttagattattactttgatttaaaaatataatttaaatcttttaattagtaataaaaaattattattattctaattaaatcttactaaattaattaatgaaataacataagataaattggcccaaaaatcatgggcatggccgaagacaccatttggagatccattttgatttttgctattttttttaaatcaaatcttgattaaaataaatttaaatgtttataatttattaatttaatttaatttgaaactatttaaatactaatttcaatttagtaattatcaattaaatataatttaaatatatttattaatttgacccacaaaatgtcataattaacatataaaacctaatttatttaatcctctcaatttagcccaaccttagtgaaaattctcaaacttggcataattagttttcaaatttaattgattaaatatatcaattgattgagtctttagggggactatgggcctatgaaatcaatctctcaatgatttgatctaaaatttaccgggtacatttcctcacttgttaattcctcgtgactccactatagatttcgaatatcactcttgattacatagaacattctatatttctaatatagatacactataaattatctattatcttgacctgaacaatcaatgatcatctatagatggtcaacatcgagtggggggacccctccatacattttatcatttaaacacttagtttcttgtaaatgatatttcaataaactaatataattattaaaatgagtactccaccatttaactcatttaccaagctcaaaataaaccatcattttacttttaaataatcatagaaactataaatgttcatatctatgattacgctcccactaaattaaactatcgagctcccaatatgtaagtatgagctagaccgagaagtaaattggtaacgaataaatcaaagaatcatgtaacacaattagctcaaagcttaacgatctcaaaattgatatcaaatctatctaatttcaactaattaagtgatattgacttagaaaagatatataacagtaagtttatgatatatcttccactgtcaatatcagtctagtctaatgtaaactctataaatccaatacaagtttactttgctaatgccttggaaaaaatatttcactcatccaagtgtaagtaaactatatcgttggttatcacgtcactataaatcaagtggactgacaaatcttgggactaaaatagtttgaagcacataatcacaattatttttctactgtggtgataatactataattgtgaatatttatatgattagaatttagcagaagttatatattaaacaattaatcatgaaataaacatgtgaagaaagcaatagacaatagtaaaaaatgatctctgatcttttattgataaatatataagattatattgaaattgagttttatttagagcacaaaacccacaacaacatcaatcatagtagcatttccgtctccaacaaaattttcataggactagagttgttatgggtgttgttgctgttgttgtctcaagcatctgagtagacttattcttgctatttcactttatcgatcttattcattaggtactcttcttgattcgacatcttcttagtttgctcgatctttgttatgctttgaaaccttgttaacacacaatgggcttcctccatcgacgaaaacacctttggtgtgctctccatcgttcgggccttagaaaattgcacatgcgtcgatatcacataacgtgcttagctcaacaacttttttttagcatgccattctttctctttctgaaagtatagttttcaagaggagtcatcagtgatgcattgtatagcaaatttaccttctttctggtcatgatggattttttttactcgatttgtctcaaattgtttgtcaattataattaaatatagtttggttttaaatgttaaaatggttaaaaaaaaataatggggacaatcaatatcatctaacaataatatctattagttagccacaaatcaaatttcatgtgctaactcaaccaatcctagtttagctatcattataaaaatagaaaagttggtaaatagtatttttgaataattttcattcatagttaaatactgtcttcttttttccttaattagttcatcttattttttaatgattgttaattgtcctttttcatttagttagtctcttttaaaattacttaggtacgtaccataatgattgttacaagagtgtcattatctggtagttataactataatatatatttacatatattagttaatgatcataatatgaagggaagagcttcatcctttgtatattcatatatgtactattaatttttcataaagttggtagatgaatgcaacaactaatttaaaattagggaaatttgcagcaaaaattctcaaaatgttcactttgttacaaattagttttcaaattcgagaaatagcggcaatagtcctcaaggtcaagcttcttatttgtccgttagtcctaattttaattgagccgtttacttttattaaatattattagtccaaattattcttttaattttaataaataaataaataaattatttaaaaatatcttttcttcttcttcttcttattgccagaaacaaccccaaaccagcaccaccactaaaataactccatttatccatgaataaacattaaactcagacatgaaccaaaagaaaaagaaaaaaaaattgaagtcgccccaatctaaaaccccgcgtacccaaaccccacgatttgtggtctccatttcggcctgcagttaccgaagcaccaccactgtcgtgcacatcgagaaggagaaaaggagaaagatggacaggcaaggggctcgagggtggaaggtcgggtttaggtttcgatttttttgggttcatttcaagcttgaaggaccgagaatggccgac

SEQ ID NO: 49364 - DNA, 2013 bp, Cannabis sativa
  modified_base (28)..(51): a, c, t, g, unknown or other
  modified_base (407)..(408): a, c, t, g, unknown or other
ttttgaaaagatttccgtgtgacagtannnnnnnnnnnnnnnnnnnnnnnnccagtatttttgtaagttttccctgatagaatgggcttacaatgcgaatgtccaaatggcccatatagcctcgtgaactctaaaacgttctcaccttggcattcatcggatctgaacaaattatataaggcactatttttttttggtaaaacaaattacatttttacatttaaataattttttttatatatatttttataaatttctatagaaacaacatgaaaacaacaagaaaactacataaaagtaatataaaaataacatctaaataacatcaaaacaacaacatacatataacaaaaaaaatcaacagcaaattaacaagaatacaacataaaagaccgtattttctatanntaaaatcaaaaaaatcgtaaaattatttaaaattcaataaaattatattgttgtaatttttgtaattatttttatgtatttgtgaaataatctcatttgcgttttctctttaaaaagtgagaaaatctcaaaaccaatgaagttattacactcgacaatttgtccagtattggaacatgaaacaagttacgaaaattttaatatccatgcattaaaaaggtctcattaataaaaaagaaaatttacaataatatatatttttttatatttaattttaacagttttaattacctttaaaatttatttgtagacatcttaataattaataattaacatttattttaagttatattatggtagattataatttaaaatacatgtaggtaaccttaaaaattattttcaaaactaatcaattgtcatgtaatataacaagttactatttttaaataccaattattttatatacttttttgttattttgaaacctaattaattatttagttatcatataatataatataattcaattaacaaaattataaaattaatgttaactaagatttaaaaataattataaaaatgtaactaatcactatattagtaactaaatagtttcttttctaaacatagcaaaaaacatgtgattctcacatcttaaaatgttcacattgaaaactaaattacaatgatattttttttagacttatctgagtaacaacgtgatcagaaattatttttaaagtttaagagaagagagagaaataagaaagaataaagagagaagcctaaaagaaggggaaaaaaaggaagagagagaaaggggtataaataagggtattgaaacatattcaaacaaataaaaatattgttgatacttgaccaagttatttttgacaattagataaaaaataaggagtgaagtgtaaaatcataacaaaaaaatccaatatacaaatagatgcttaagttttataagttataccaattttacccctctaacaataaacacttctattaactcccctctctctctctctaccaaactccaaaacaccacaatcatgaagctgccagagccactagtcatgtcccagccatcgcacatccatcgttccacgtcgacctttgcacttctgcctttggcccttcgaaggaaatgatcattatgacaaaagacataaaacattaaaaagaccatcgattacccatcaagaagccattgagaaaccatcaagaaaccatcgagaagccatttgaaatgacctatcgagaagccatcaaaagtcattgataagctatcgagaagccatcaaaataacacctcagtttagctttttacataggaaccccaaatcagatcgaaaaataccacaaccaccttaatcttaggactcaaacaaacacacacaaaataaaaaacaaaagacgaaaatctaaccaacaaaatcaaacctttggctcagttgataggggtggggcttcgacggagatgggactatcaacgaggactcgagatctggtctttcaagctcgagaactggttcggtagggcttcgacgacagattgggttctgtcttaccggagagagagagagagagaga

SEQ ID NO: 49365 - DNA, 1357 bp, Cannabis sativa
atcacaaatactttgccaagtgagtgaaggtaatattccttttttgctgaaaggaaatcaccattcttataatatcgggattgattagtttttttttcttcaaacatcttgaatagctacattggtaaaaagaaaaaggatgattatacccattttttgttttgaagccaaaacattagcttgaacattagagtccaaaaaaatacaattaggtgatgtttggttcatcgtaacggtaatcgtaataataatgaataggtttattatattgtttgtttttccattttaacttttgtaatctattacaatgtaatgattattatattgagtattgtaatgataattacataccaaacttaatgtaattcccattacaattagactctattacaaaaaaaaaaaaaattaataataaaaaagtcaaaagtctatttttttaaatattatatatttataaaataaaagtaataaaattattttagtcaatacaaattttattatattacattctcatatcaaactaaatacaataattgggattataatgttcattctaactataaactaaactttataatcaatttttatttctattcttattccattacattattattgccattaccattccattacaccgaaccaaatagcacataatattttaaccacgagcaaaacatcccatatgatcccaaacaactccaccataaccatatcttccttcttcttaagaaatagcagcatgaatattcactttaaaactatttaactttggttttgtctaaagttcaaccctgcccgacagttgccaaaattctacagatggataaggactcctaccctgagctttactccaatgtttaaacgtgattcgagccatattgacgacttgctctaccatgttctttctccccttctgaagaagttgattacgcataaaccgcaatgtctaacaaagcattatggctcgaccacaatcactctcattttaggcaagcacaaagatgcataaaccagccccaaaacaacctctcatcctgcggaacatagcccaaaccagcaacatgccaacactcttgagcaaaagcacaagtaaacaagcaatgcataacagactgggcagcgaaatgacatactaaacagagtaaagaaacattttagttttcaactacactctagttgaaagacatccattcaaacaaaattttaggtaaatagtggcataagtactaaaaattttgagtctataaacgacataaactcaataatttttttagcggtataaatatcaatattcgtaaaagtgcaagttttgtccaatttcgtcagtcgttagtgtctttaaacaacacatatt

SEQ ID NO: 49366 - DNA, 1426 bp, Cannabis sativa
aaaatctttactttctgtggcaccctcaaattccacatcccattccaccaatgtgcttgattcccagaagagctaccagatctctcacccaccagctcaagagcaactgcatacccactcttgacagtataacacccattaggagtataatgccaacaccatctatcctgacagagaccatgccgcaacgggatactaagaataacatcgatatccaatcccagaaagtattgagacaaagaatggacatcccaagccccatcccccccaatcaattcattaaccatcacattactaggcgaagaaggtgaaataggccgaaacgttttagccctgggtagccaaggatcccgaaaagcattaatactccggccatcccccacaactttcctcattcccttttgcaacaactccaatccccacatcaaacttgaccacagatgagacgaaccctggcgatctttcgcctccaaaatagacgagttgggaaagtacttatgcttcaaaacccgaccaggcaatgaattaggcgattgtagcaagcgccatacctgtttagcaaccatagcctgattaaataggacaagatccttgaagcctaaaccccccttagatttcggctggcacacactctcccatttcacccaagcaatcttccgcttatcattcttcgtaccccaccaaaactgaagaataatcgaacgaagcttatcacatgttgtattttaggaatgagaaaaatcaaagtagaattgatgtaggagaaatcaacatcattattcaaaaaatcaagggcaacattaacaaagtcagacctaaatgtagaccagttttttttgatagcaataaacattcaaaccatcaatatattttatgaatgtcaaatagaataaaatatagtgtttttttataaagaataagttgattttaccacataaattatataaattattgcaaaatagtttcctccatatataaattgctgtaaatattttctccaattacattctgcgaattttttaaaatattttgtttatgtggccatgcgttataattatagttatttatttagtaactttgagctaactgaaaattactttttttgaaattatatatataaatattaattttaagattgcatttacatatcatcataatttattattaaactcctatttatgtatttattttttgtggagactcttaaactggactatattgacgttatattagtggtacattaataaattatttacaaaaaataagcaaaatgtaacggagggagttatatgtagacattttgttgttgagagagactttttacaactaaaaaacgttcgaggggaaaaactccgcaagaattatagtcctatttattcttctatagattacataaatgattaatttaatattacacacttataca

SEQ ID NO: 49367 - DNA, 1335 bp, Cannabis sativa
tggtttggtttaaaaccataatttgtaattcgtagttgttttagtatttttttactgaattatttttattttaaaacttataatacgtaaataacaataaaaataaatattcttaacacaatattaaaatattatcaattttagacctaagattgtcactaaatagtaaatatcaatattcagtaaaaaaaaatcttattaagtatatatcaagaattatgctgtatggtttggtttgaaccacagacgagaattttaaaaccgtgaccgaattaaagaattacaaatggtccgcattgatcaaactattgacaccaaattcatttagcctgatcttaaatagcttgatccggattaattggaatttgagaccacaaattatgaattatatagaatttcctaatataaataagagatccttcttaccacatctaataacttagttgtctatctaatatttataatttataatttattatttatacttaaaatttattaatttatcaaattaattagtgaagtcttttttaattccactaaaatttcatcagtataacaaagattttctaacctactcaaattttaaacctgtaaataacactaaaaatagtctcaaaacagctaaaaaatataacacaaatcaataacatttacaaacacaacctcaaatccattcttaaataattaaaccttctatcaatttcaaactcaataccaatttatattactattgatttttttttagtaaacaaaagaagcagtacaaactacaagcagaaatattcattgaagaaacaagtcaatcccacaaaccaaacattttatcaaccaaatatttttaaatatcaaatgtgcaattctgtttgcagatttagcttaaaatacactcttgcagaatcaatttatacataaaccatacactaatcacaatatctaatctctaaacaaaaaacaactctacaaaagaagcagaaatagccattgaagataaataaaaatccaattacaaggtttggattggcgactcttgtatggttattcaatattcaaactttcaaattcaatagcattaaatctctaatttcttttcaagcactggaattgaaatctacccaccaaaaaagagagagcattttaatgcagctaactttcctgatctcaactagcagcaaagctaagattaaaggactctgagtctgctcctcaacacttaagactcataattctgttgtcttatctaaataaactcattatgaatttcaagaacttgattttacagttgagcttaataaacaaaagaagcagaaatagccattgaagaaaccaaatattctt

SEQ ID NO: 49368 - DNA, 883 bp, Cannabis sativa
atccataagactaaatttaccttcacaattcccaaacatcagtgtttttatatgacgttgaacagtttgaaatcattcttcgggctttcctttcttcttcttgacagttacttctcgataatcattcacttattataacaggtaggaatgtcaattggagcaaatacattgaaactcgtctcttaatcttgaactcgcaacgttaattccccattttgtacatctattaatgctcttcctgtggccaagaatagtcttcccaaaataatggaaatgatttgggtatttttctttgtaggtcttttactttgtgcattgtggtgtgttggtgcagtgctcatggatggagacgttatgggaggcaggtgttgaacaaaggctcttggtgcttcgcttactgtcatgggagctccatactcagattaagctaccattccagcttggttttgtgagtaagctatggagactaggaactatacacttggggcaggcacccctccaggtggtgttgaagattcgttaagtacccctctaggatgttgtaccatgtaagtgtaattcaaccctttgattgggtaatatccaccaaatgccatgatctatgcttcttcaaggttaatgtatttgtgggttagcttttggaaatgttacaagcaggttgcaccttcttattgaagctcgttctaaaagggccccactctactgtcggctttcagtaatgccaactgctttacatcatttactttcttagttttggatgtttcttccttgaatctctttataaaagttttcaaagtctccatgggcaactacttgatgttggtcaaagcactaacttcaaggtttattttgttggcatccaaaaaatgcctctggaagttag

SEQ ID NO: 49369 - DNA, 2783 bp, Cannabis sativa
  modified_base (2732)..(2750): a, c, t, g, unknown or other
tgggcacagggctagggacccctcgcaggtcgacctattatgactcgagactactcaactccgagatgtcatctttcttgacacgtgtcaaacattgatgttcacatcatccgggctactcttggtgtaaatattctgtaatttacactattcttttctaatattgaaaatttcagagagattgcactaccaaagaaacaaatgaatcattttttagatgagatatgagtcatattattgacggatacaaagttttcttttttcaactctctctctcgtgttcattacttacactattctttataaaaaaagtcacacacatcgttatattgtgttgtctgtacattttctatttatttcaagaacatggacaacaacataaataaaacgtgacaacaatgtaaaaataacatatttttatattaaaattttaaaatacattcactattcttattatgtgacctagaaattcaattcactagttttcttccaaattttgaaaattgtaaaaaaataataaaagtacacaaacaaacatccctaatatatgtgaatcaaccaaagaacaacaataattaacaaaataatcaaataaaacatactacgcaatatgaggtctgtttttttcaaaaaaaaaaaatacccaaagagcccttgctcattttttcttattggcattaatggaggttctttgatgatttttttttttgttgcgttcatggagatctccctttgttggtcacactgtcatggttgatttctaaagcaagcttcttaccagcgttcatggagatcgacataagttttttgccagcgttcatggagattgacaaaaagcttctcgctaatgttcatagagatcggccaaagcttcctccagttgctttttcaccaaataattgagatccatatatcatgggctatttttgttattcgtgaagcaagagagctatttttattatttattcaagatgagccttaaaatattgcatagacactatttttgtcaaaaatatatttataaaagtgaaaaaaaaaacttatattactatatgttaatataaatgttaatttttttttgagagagtgatatatgaatcacaatatgtcaatcgttgacgtagaaaatttttagtcaacaagctacttatctagctaaagatatacaaagtcagaatatgagtcactattaacaaagcgacttatataaaaccaagttatctcagaaatttagacaaaacaacttgagaccactttcaagagacatctgataatgctagaaatttttaaattaaggataaaacgcaaatattatgttaacaagaaacacttatctttgaatcatgatgtcaccattgaaactaatatgttatgtccaaatattaaaactaagtcttccaaagtagaaataaactagccaccataacttgcaccatgcataatatttgaaaaatcaatcaaacttaataactcaaatcccaattaaaattaattattttttaaaagaagtaacaaaactcaattaactaacaaataagtaataagaaaataatgaaataaaataatagaaataaaatttctccaaaattattaaaatataattaaaagtaagattcaaaacttatctgtgactctttgaggtagcctccatgcgcaaacgagtcaacaacatactagccaaaaatatggtacaaaatagccaagaaaaatggctcaaactagccaaaaaaattggcacaaactagctaaaaaaatgacccaaactagcccaaaataaaaataaatatatatacatatagaacataaataatcaaaacatttgactatatcgaataaaactactaaaataatacatattaatatatataagttgtcaaagtaagaatacaattcgaagtaaattataatagtgatagtaacatataaataaaatatgaaaagaaatccaaataatttgcacacaaaaataacatgactagattagaaagaattaaaacctattaataacaataaatatttaaaagcaatagtaataatataaataataattattgaataataacaaaataagggatttaaaataaaggaaatccaatttaatgagacatttataacatatataaagagttaacaaaactaattcattaaaattaactcaaaattaaatacattaacaactagtttgatacgttgtattaggtcgtattgtattatattaaattagattatatatatatatatcatattttcatataatactatgttaaattttaatttatactaaaatattatatgtttatgtgctcatacaagtcaatattacatataattttacataaaaatattgcataaaatataattcaatataatacaatactgttggaattaaatccaactaagtctttcctaaccataagtcggttacatgaaaagcaacttgcacatctacaacaacctaaatacagttacaataaaagatcctaactgaaataacagaacaacaaaagatctatacctgctagatcatcacccaaaaagctacttactctactcctatcccagctgtatatattgccactcccagtttcgttttttgctcagatctgaagacatagagagtgagagaacctgtaattgctctgagttcaaagataagaactcagagttgagaaagagagaggagagtgtgaatctaagagagttcttgagagagaaagaagtagaaaccagannnnnnnnnnnnnnnnnnngaatcgagtcttaccagttgatcttgtagctgg

SEQ ID NO: 49370 - DNA, 1541 bp, Cannabis sativa
tattgactaacctttggtaggtagttccagcattgtctagtctgaacgacataacttcgtagcagtgtaaaccaacattagtacaaaagcttgtatgttcttggttgggtggatgtattcttatctgattataccccgaatagaaatccatgaaacttaggatctcatgacttgctgtagcatctaccagctggtcaatccttggaagtagaaaacattcctttggacaggccttattggagtttgttaaatcaatgcatactcaccatcttttgtttggcttaggcaccagtacggggctggctacccaagctgggtagaaggctttgattatgaatttaattgcttgaaacatgtctacttattatttcaatgcttgtgcacgttctttgtctaacaatcttttttccgctatataaaacaaaaattgggatcaatgttgagagcatgagaaattacaattggatcaattcctacaatgtcttcgtgcgagcaggtgaaaatgtcaagtttgctttaagaaattttatcaaagtagcttttatttcaagcaacaaacctttaccaatttcgagcttcttggtgaacatgacatgatatttttaaacttctactggccccacattcatacttggttccgcgaagcaagaatccatgtctacatctctgccttatgcgaatccctatttggaaatgtctttgcctttccctgagctttgaccagctgtgtcttctttttttggcctttgtgaaagcgaggttatagcattcctgtgaagattttaattgcctttcaaacaacctattccatttctagttggcaatttgatgcacaagtggtaaactaagataactgctttcaaatcatatagagctggttggcccaacatgacattgaatgcaaaaggtgtattgattacttgaaattgtgccataattgtgttggctgttggagatttttgcactatgagaagaaggcaagtttatccaatatgctttggctagagaagtcgtatgccaactgtgtacaaggggcaaaatctttaagttaaagccccattttctcatatgtacttttgaaaagaatatttgatgaagcaccattgtcaatcattgtccgagaaatgatcttatttacaatctgtacctcaacaaccaagggatcattatgaggatagataatgtggtcagagtcttcttcactaaatgagatggctagttcttatctgagtagttgtttcgactttttttcttccatggctaatattttatcttcttgctcatactacagggtcctagcatatctttctttaccttcgtttgagtctccagcaatgtaagggtcctaaataatcaattgtaaatgcctatccacatatggagacattaattgattctgattattatctggacgggtggccccttggtcttggccaaccttaacatacatacgtaagtgctagttattcttcctgatgaggaattctataccttgttttagattattgtactcgatggtatctgttggattttatgcccta

SEQ ID NO: 49371 - DNA, 1422 bp, Cannabis sativa
taatctacaagttttcttatatcgccaaaatattatggtggtataagtgtcacattttttttattattattaatttagatagtttattattgttatctatgtttttcagatggggacacgttgaagttctatgacaaatacagttcaaatactctagggcaaaaggctagtccaaatgaaataactgtgccgaattcgtaagcagttaatcatcccagatgaagagtaggcaacccgttaaggctggaacccattcaacatagtgtatattcgaaggacattaaatagtgtcttttgaggaagtaatcaatgaaagtctgaacgcgcagtatatttttccattaattatcatgtcccataatattatgaatttaactcccaaaggatctcacatggaagatcatgtcttactaagtatggaaagagagtaattggtaatcagcatttaatgtgtctttattcttcacgaagataagacattattttgacaactattattgtgatatggcatccacataagcatacacaagacacctctggtcgggtttcaccaaataagtccaaagggttattctaacccttcatgcaaagagttagaaattcattcctcaattgcttagggaaaaacagagatttcacatcttcttgtaaaccctacgacttttctagccttacagtaataatattgacttaggtactaaggctcattaacttccaaccacgtgaaaatcctagttgttcttattctctttctctttgaattactgttctttagctcatataaatataaatactcgattttcaaaaatcttggtaaatattttagtgctttcatggagagctaaagaaagcagtgataccatcaaaggttgtatattacaactatggtactcacccaaaccaaaactggtggtggagatggagatactcctatggacaacatagatcttgtcgcacatgcgaagataggagttgatgcagatcaaatagaggcaaccagtttccttgctaaaaagactcaacatatactgagaaaaacattcataaaattcccatcatcgaggatcacgaagaggaagatctagaagacgatgatcatgaaggcgatgggaaagagaaagataaagagggatattattacgagccagatcatgcagttgttgaaattatcagagacctcgctgagacaaggctgaaattggtgacaaaagaagaattctctcaccaaaagcaagcaaccttgaccaaactgaaggataggtttgaactaaaaaattctactcatgatgaagaaaatcttgtagatcctattattaggacaataatattacaaaaagaatggaccctaaggatcctggaacatatgatgccaaaagggaaaaagaaaaaggtttcatgggagaactgttggaaattatttta

SEQ ID NO: 49372 - DNA, 1761 bp, Cannabis sativa
agagagagagagagagaccaataatcttggagagttgtgagattttctttttcattacttcttttgaaaaaggaaaattatgtcactatttaaatagtcaatattcatgcaactaatcccttgagttattatctagttcaaaaaaatgttgaattaaccattatgccactaagtatcatcattaggaaattaaaaataataacaataaatatgtataatatgagagaataataatatatagtgtaaataattaaccccacatatatatatatatatataattaattagtagatacattcacatgatttgatcatgatatatacacatgtttgatagaaagaaaattaatgaggatgcatagagaagaagaagaaaaatgctaattaatgagcttctatatatttaaaagagggagataggaattagggtagaaggagggagttttccctttaattaattgattaattaattaagatcatatagtaattaagtaataataatatggattaattaattaacctttagttctaataatagtgattgtgcctctaccttgagtttgaatttttgtgagagcaacaacagctttaccagaaaggcctggaccatgtggagacacacatggtcgacaggcaaagtcaccgaccggatgcttgactggtctggtcggtggcatcaggattctctcgtttatatcgtttaaggtcacctcaccctctattcctcccggcttcaccaccgcgaatgggtatgccaccctctttatcacccttttctttctctcttcattttcaccaccactactactatctgcacatgtttattaatatttatcattatggaattatgataatcagattatatgttgatgaaaattattgatttttttaattaaaaatgagttttaatcacaatattttattttaactttttttttccttttgtttcaaaaaatacatgttaaattattttttttattattaatataacaatatttattataattacaatattttaaaaaattaattgtatgacaaacataatttatctagagcataataaaatcttaacccatgtaaatcctatttatatatatatataactattaatttgaaaaagcattgttagaaaacactctgaagtatttaatattttaaagataacatattattattagtgtaatttagtattattttatatatatttttctatatattagaagtggattcgaactttgaaacctctttttcaaaccgtgaaaaataaatgtgaaactactaaatcataccgtaaaattaaaattaaattttgatgcccattcaacaattctttaaattaaaaaatacagtatctattatttcaaaatgtattatgtatagtattcatgagcaagtgaagactcctaactttaactagtgaaatatataactgtagtcttgtaaacttaactgtttatatattttcaaacaaaaataattaaaaataattttaagtgtgtattttttttttttttttgataattttgtatttttttcatgagtactacaagttggtgctagctgttgatcattgctgactttttattcaccaaaaaacactgtctaataatataatggtaattatagtgttatataatttatactctgtagtaccaagcagtactgtcctatatataaaaatttaaaaattaatgattattattttaataacagtaagaaaaaatctgttttgaaattgaaattaattaccagaagaagggta

SEQ ID NO: 49373 - DNA, 1755 bp, Cannabis sativa
  modified_base (44)..(46): a, c, t, g, unknown or other
atttaatagtaatctaatggcttaaaaaaaatgtaaccatgatnnntacaataaaaatataaccattgaaacctcttccatatatatatatacatataaagaaaaagagcaaatttgttttggatctgttacttcggtcgtttgctatctccatcttcccctgccattaaagtcgtcaacatgattttgactcgatttgagtaatatttgaggtggctcgcgatatagagtgtatgccaataaataattaaatattttggatgaagaagataaggagaagaaaaagaaagatgattttatgttttaacgttttgggttttttctttttctttttcaatcgaaatttatttttgcttttgctatattttttaaaatttaatttttaaaataggtttattttattttaaaaatgcatctaattctgagaaattttaagatttttttttaaagaaaattttaagattttaatttagttgaaattgtaaaaatctcctacattaaattatattgtagttaatttgtatcttcaaaagtcatgtcaatctatagtttactaaatgtcccaattctataagcacaaaacaaaacaagtgtacatacataccatagaaattttctaaataacaataacaaattggaaaatacaaaacatcgaagcacaaaacgagtggatcgagaatgattcaatgtaaagaataatagaagttagtgatagtgaataagccacaacaaaaggacgcgtaacgataaaggttcgtgtgtcttattcacctttcgccacagcaaactcgaatctcaccacttattgtcgattttcttactagtctgactattaaacgccgccgtttcatcaggagattttgtatttgatgttaaatggtttatttaaaggtctccttttacaactttcgatatacctaccattaatattaaaaacctaacagcatcaaacatgggcgtagtgatcatagacggatcgacggtaagggacttcgtcagcgacgaaccggagttcaacaagagcgtggatgagcaattcgtatcactagatctgaacaaggacggtgttctctcccgaactgagctccggaaagctttccagacgatgaggctcatcgagagccactttgggatcgacgtggccaccacggccgaacagctctcccagctctacgattccatcttcgacaagttcgactgcgaccgcagcggtaccccgtcgatcgagagaagagttcaggtccgagatgaagaagatccttctcgccatagctgacggccttggctcgtcaccgattcagatggttctcgaggacgacgatccgacgttcctcaagcaagctgcggatcttgaagcttcgaagttagctaagctccaatcctcaaatgcttgaaacctcaaaatttcgaagtgatgctttctttgtcttttagtttctgcatattacctgtttgtgaaaacgtttgagtgaataaatttaagaaatgataaaacatatacgtacgtttttgagctagctataataataagaatatgtatttgttgcaaacttatcttttaagttcagtcaaagtgtaattcctagatctacttgttttgtgttggagctgtttgtttatatgaaaagagtgagaaaattttgagcgctaaaacagtatatgagagaactcaataacaataaattgctttagggagtacagaggtttatacaggcaatgagtttagctagctcggtggagcaactatcctagtaa

SEQ ID NO: 49374 - DNA, 1388 bp, Cannabis sativa
cgctcttccgatctataagatgcaaggaccttcggttattttgggaaacctatatgagatgaatactcctccagcagcatgcactacaaaatttattgaggaaccctgaggaacattggttgcttgtagggatattgtatcttttgcttctaatcgtgaaggaagtggtactaggtccttggttaaccttaagagaaaagttgcatctatatcactgggtttgagtcagggaaataagttttaggggaaacaaggacggggtggctatcagagtaaccattgaagttattatacttatccagagtgcttccattgcaagaagcatcatctgggagagtgtaagcattagaaatatttttattgtggccaagtaggactttacaagaaaaattgtccacaactacagaagaaggaaccagaacaagaggaaaaatcccccttcatgtttgagagtttgtcaccacctaaactaatgtagaagatagtacgttagtggggtcaggtcaatttcagatcaactattttatttaactctgtgataattgattttggaactacacattaacatgtggtagtaagggtaattaatatattggatggatcctaagataaatatgaaatagggatttgaaactctattacgtggcaaaaaattagttatctccaaaaggtggcttaggcagttgattagagttgagaatagaaagttgaactatggtctcatagatttaggtatagcagagtttaagatgtgacttggaatggggttgtcgttgtagtaagccgttagtatggattgtaagtagaaaagttaactttttaacctgtaggttatgtattatttttattatgatatcgacagagggtttcagactctagtttccacgatgataaaatataaagattcatcatgggatgaatgcgtagaattagtagctatggtattagataccacctggccgagacaattcagcctatggatattaaagtggtgtaaaagttcttggatgtattctcaaaatataatttcctgccttatcatcacaacaaatatttttttttgttgtttggcatttagagtaaaggtggttctgaggcacaatacataatggctcgaacaagacttaaggaagtaaattggcaacttcaggggatgatgaacttaggatttacctgacctagtatatcaccttaggaagaccaattgttaattattaagaaggaagatatatatttttatgtatgttaactatagaggattatgcaagttattaatcaagaataaataccctctgttagggagttatgaatgcttcaatcagtttcagggaaagataattttctttatgaatgacccttgctcgggttatcattggttgagaatctga

SEQ ID NO: 49375 - DNA, 918 bp, Cannabis sativa
  modified_base (849)..(864): a, c, t, g, unknown or other
acaatccatgaaagtacaataacaggacaaaatcatatccctatatatatatgtagaaatcttgaagggtgttgctgaaattaaacttgattgagtgaaaataaattcttagatacaagaacataaggtaatatttaaagactatattatgttattatacttttactattttagtaagttgatgatagtaaaattatttcactaatcatttctttatttttttcttgttagatatatggagcattagatttgaatttggatttggaacattttttttttttttgctgaaatggatttggaacatgttatactattagatttagcatgtccttactatttgtgtttgttttttgtgtttgtattgtgggttgatggatttggattttagaatatggaacttgtttttttttagatttggaatataaaattatggacctggttgtgctactgctacctactcttatgtgtagtttttttttttttttttttttgcatttaattttttaatgaaatattaaataatttttaacattaaaaaatgtgattgatttttttttttttgcctttaattttttgatgatatattaaataatttttaatattaaaaaaatttgaccaatacaaattaacctatccaatctgcactattgcggattggatttaaactgttatgcggattggatccaaaatttagaattcgcacttagtgcggattagatgttatttgaccaaaaatgtacgaattgaatcggatgaaaaactctatatataatatataataattaatattagggttttaaaattttttgaaatcttttgcaaagcatactgttgaccgagattttcggnnnnnnnnnnnnnnnnattataataaagagctgtaagaaagtgagatgaagattttttacgtggttgggg

SEQ ID NO: 49376 - DNA, 1291 bp, Cannabis sativa
ctagatatgaatgatatcactagtgttatatcttattggcaaaagtggcaggcaaagcttttggcttaattcaactccactacctagacctatgtgtagttgcatgttaaataaataaacaaaagattttatataattttggttgtttcttcaaataccaatttagattttggttaacaattacaaaagtttggcaatataagtgatggtggatatattttttcttcaaaatttgttgtggttgtggttgttgatttagactctttagcaattatgtttgattttgctaagagatattcttttttttagtgatttatgatcattgttaaaaaatataataagtatattatttaaatttttaagagtttttttgatccatatacatcggtcggtcaatgtaactgtacataaattaattgtagatgctttttaaatagataaataaggtatttagctagatgattgtctattatttgattctttaaaatgtataattatttagtctatataacattatttaattatcaattatatttgtcattatttataaaagagaaacaattacaacaatttatgtgatgtttggtataaagtttttattatttaattaaaagctttttaattgggagtggaggggatgagattaattagagagaatctccaattcttttttttttttttttttttgatcgagagagaatctccaattcgcacctaagaaaaatttgacaaaatctaaaaagtaaactaaaaatgagacacataaatataaatcccactttaaacgttacacaccaaaatatgtgtttggtttcacataacaaacacacctctaataatttcgagcactattttttttccttttctcctttcttctcttatgaatttagccacgccctcataagagaacaaaaatatccatataccatttttattctttacttttttgttaattaaatttgagttaagagtactttttttcctactaatttataaaacacaaaattatgttaagagttttaaaccgtataaaagttatattgtattaaataataaagaatactatattcagataaaattttgtattgtattaaatattacaactataaattttaataaaatgtgaatcgtattatttaataagtgatgaatgattaatattatagcttgtattataatatttacaaagggttcgagttgtggatccaaacacaacttgggaccctgatcctgagcccaaacttggacccaaccctaaagctctaacccaaactcggcccaagaccccaac

SEQ ID NO: 49377 - DNA, 1383 bp, Cannabis sativa
accaaatgacacacaaataagtgatgaaaatacttttgtttctttattgatattaaaaagataaagattacattgaaattggagttttatttagggcataaaacccaacaggaacttctactctccacgacctcagttgcctgaaactttgaaagtatttatcgtgtttattagatggatttttccatagaagtggtctccgactccaaagaggaccgacaaattttctttgtgctggataatttcatcgtttctcatgtatggacaaaaaaagaaaagggtcgaaacataattgtaccaaaaaaataaaatatgagaacataataatatattacaaaaatatgacatattttaaaccatagaaaattaaatatttttaaaaaatcataacctaaatgcattacaaaaatatgccataaaaatacaactttaaaactttgccgtataatttctacaaaaataaataaacaatgtaaacattctcctttaggaggctggatgtttattagggctttcccacatggcccatggtgaccattgtttttttggttgccttgcctcccatgtgaattagctatgctctctacttttttgttgttgctgctggcgtgagcaaatagtgcacgtggtactcggcgtaattgaagccatcaattacttcatttatcaacaaacaattattattattattattattgaaacaaaaagaggatgaagataaacatgaattatggatgctctttgttcggtatttcagttattcctaagactattattatagcattgaaaaaatgacaattctcatgatatttgtactttattttatttattttggtctttttcttcaaaacactcctacacagtggcggaactccatatatctatggagtggccatggccccccctaactttttagaaaaaaaaatatacataatatataaattaaattagaataactaaattttacttattagaaaaatgtgataattctcttattactaagcctcataataaatagtgaagttgaaattgaaaaagaagcccaaatccaatagcctatttaaattagttatttatttatagtaaaaaatgacaaaaaaaattattaatataatttatttttgaagaatacttttgtatgatttatatttatatgtgtttttatatatgtatccttatggtatccaatatcatattaatatgacactttacaagtggttagcggttttttatattatttattaaattaaaatatttaggactcaatattattttacatgccactttttatagtacttggcactataagatgctctttattacttcttattattttatatatgttgtataaagctaaggctaattagtaatttggctaattag

SEQ ID NO: 49378 - DNA, 2226 bp, Cannabis sativa
  modified_base (27)..(52): a, c, t, g, unknown or other
tatgatatataatccaattcaatatannnnnnnnnnnnnnnnnnnnnnnnnncgttccaaacgagcccttaaagatgttgcttttgtatgcactcccaatagttaatccattcaactatttaaaatatttcatcaatatattattttttttattttaccatcatttatgcttttttataaataaaatacgtaattatattaaagttaaaaatattaaatctcttaatcattacataataaattaaccggtagtatggcgaaaaaatcaaccataccagttatacattatcgacaaaaacctatttaaccacacatcatttatgttactctatatatcatgagattctttatacttttctttacattatttaaatattagaaaaattgttctatgtactattttttaattttaacttttttttttaaacatttacggttttaagttttttagtggtttttatgtgtgttgttatgtgaaattttattgcaatttaaattagtttgttagttgttatgtagattttctatatagatttttgtaaaaataataaaaaaaaattattaaagtgtaaaataaaaaaattccaataaaaatattatatttttaaacttttttattaattaaatattatgataataataataataataataatcaactaaaatattaattttttttaaagaaaagataaaagcatatgacataaaaaaaaatatataaaatagtttagcttgtagctacatttaactaagagcactatataaaatagcttaataggaaatcaaagaaattaataatagcacatgagcacatcataatatatatatactaattaaataattatatttatttttttgataaataatgatatattatatattttatttaatttcaaatatagaaaatggcttacttacacaactaaatataaaacataataatgatgttattttcttaacaaaagatatatatcggcttaattataaattaattcactaatatacaatcgaatagttcatgtaccatgataaggttttgaatatgttatatataatatttttattatttatttttcgaaatgggatatgttctacatattatatttgaagactcttatatatatataaataggtcatatgaacagtcaaaattaaaaccagactagatttgattatatactattatatacatactatatgctttgtgttggcctcttgtttttatttaatttttttgtttggtatattatatataatatataaatatatatattcttatacatgtacataattaaatctgcgcccacaaaacttaaaatacataatataataaagcatagatctccaaactctgtgatatgtatatattaaatgatgataaatgataataaatataaataaagtataattaattaaaatagaaaatgtatttgatatgttaatggatttttaactacgaaaaagcaatggtacacagtagtcatagcaatgtttattaattaattatggcatcaatatgtgatattaataattaataataaaattatatattaattagggcatcaatctgtgatattatagttaataataaaattatatattaattaatgtagcacgcattgtgctacagtacataatattattccaaaagcatgtacatatatatatttgatttattagtcttttttcatctgcaaagcaaattgattctgtatattaaaattaaaacaaaattattatataatgatatatgatgatcgagtttgtttctagacaatgctgaactgtactattcctggctttgtggttcatattaaatatatatattaagatctaactcatgaaatttcattatatatttatatatatactatatattataacatgtgtcattaagcagtttgtacgtactaatattgtactatatatgtattgattaattaatataatttcagtaaatggattaattgttggttgtcaaatatggtaaagatcatatattatatatatatatatatatgtgatcataaaatacttattaaaagttgaacttggaaaggctactgggattttgtcaaaatagctaggtttgtagctacagattatagtatatatttatttgttttggaaaccctagctaaaacataaaattacactgaatctccaaggtttgtttttccattaatcatctgtttaaactacttaatttcttttgtaaaagggaat

SEQ ID NO: 49379 - DNA, 896 bp, Cannabis sativa
ttaaataaatatttatttcttcaccaattgcacttaaatttttaataaataattaatgtaaaatgtacattaaaatatccttaaatgtagcttccaagataaaaatgttagtgcatgaaattgagtacaaatttatccttggaaaaaccataataagaggtagttggaccaaaaactcctcaatgaagaaaaaagaaaaagcatgatgtgatgaataaacaaaatttgatgctaaacaactatgatgaccccctcttcctttttactcatttatatatacactagtaattctcaatcatgaattatggtgtacccacctatatatttatctttaaattattaattacctcttcttatgcatatttattagactatatataattaatttaatatttttcattgggctatgtgtagcactagaagtactatactagtcatgtgtgtaaccagcaaagcaagccctaccctttaatattttatcctctaataagtaagaattatacatagcaaagtggccctagaaaagaatagccccaaaacctcactaaaataataacttaacaattatacatacaaacaatcaaagctgcaaggtggccctacaccttctttcctcaaattaaagtaaaaaaaataataataataactaattaaatttactgattttagtaattaaaaattttgcaaaatattccgttgccgggaatcgaacccgggtctcctgggtgaaagccagatatcctaaccgctggacgacaacggaacttgttgaaacgttcaatcgagaaataatcttatagatgttttatatataataaaagaaaattaaaagcaaaaagttccgttgccgggaatcgaacccgggtctcctgggtgaaagccagatatcctaaccg

SEQ ID NO: 49380 - DNA, 2020 bp, Cannabis sativa
ttaaattgattttgttttgttgtctgtatattattacaatcaaaataagataggaataaatattctaattatatataatcaaattataatttactaattaatttatttttcgaattagttgtcaaaatattcttacaattaatgtgacaaaaataataatagagtgtctcatttataaatatagggtctcggtccccaaactcctcactaattttttgaaaacagtaaattctatctaaatagagtgaagagagcttggaagtctaattacccacacaaactagtttcattttcttttgtagatccaaagctcgtatgggattgaaactcaaaaaatcaatgactagaggtatttctcattttcatacacgatcatatatgttttattatatatatatatatatatatatcatataacagctggtatcaaatctttgtcttgtttattttaagtttttaagtgtatatgcatataaatatatatatatatatataatttgtattttttactattcacggaagattagtaaaaaaattagattttaattgttttagtatgtattgttgttagaattgttatataaacttaatactactattttttatgcactaaaacaacaattatttttacatatatatacacacattgatattcatagtcacttatacatataaattatttctaaaatatatttatataatactcatttaatccataatttcatagtaaataattgattagaatgctctattatatatgtttatcatattttcaagttatataatcattgtataggagtatgtatgtatgcataaattttttacgttttcgatcgtaaaatataaaacttttagttttcaattttggtgtttattttgaataatttaaactttatcacattcatgttatggtatatattgaaatcgtgcaagaaaagatttgaaaaactatgaaaacttgattttttttttttggaaatacacgttcagacccgtagatgttttgtgaaattaaagcctgattttcacgtgtttttgatgtataaaatctgcatggatctcttaattattgcatttagattattttaaaattaaaaacatgtattttggtcgttgaaaatggtatttatgtccgggttttgttgtcaggtccgtgtgacccgcaaaccagggatccaagtcttcatgctggaggttgaagacaattttttcatataatttttatttattttgtattattaatttattttttctatttttgttaatttgatcaataaattttattttatatttttattgaaattaaaaatttatatgttatttagtataaaataaaattaaaaaaaattgtttattaactacatgattttatttaggtgtgtaataattgtgctaatgtgaataaatgttgtttaacgattaattaatttgtcattaattacatattatgaaaacttataggagggattcgattgaggatccacactttgcacggctctttgcaattgctggtgtagaacatgctaaatatcctagggtggatgttgaaatgattgttggggacgaaaaaatctaagaagtcgaggatcaaggcgaggtccgtgttgctacttctcttgatggtgaagatgaagatgatgatcacgatacaaacaacaacaaaacaatagataaaaaaacttacagaagagaaaaggaagcaattaggatagctaaggttgtggaactacatcttgctgctgacttcctcaacactaaaacgaaatggcggagtgttgggattaaactcacttaacctctcaagtcagtatgtccatctattttcttatcagatgaatctgaagaaggctgctgcaatttatgacagttggctttaataccaacttaaaggagacccaccaacaactatatataggggttcgtttattctaaaagtgagatctgaggggagagttctgatctctaatctccaatgctcatactttagattcagtttagagagagagagagagtccaagat

SEQ ID NO: 49381 - DNA, 2024 bp, Cannabis sativa
ccaccgagattgctatactcgagatttttttttctaattttcaagcctaactcgggagacacacacgtgcctacccaaattgaatcgctgagatagccatttttttgtagtcatttttttacatataatttttttcttcttttctttagaatttgttatttaatttttacttaaatattttaatttattgttggagatataaaaaaaataatttgctttatttttttagtgttggattaaaatcctatttgtaggtacatatgtaaaatttatatgctattataaagtgtgatacaaaataaagtgaccaattatattatgggtatttttgacctcacttttagccaacgataatgaatcctaattaaagggatgagaataattaaataacagaaagtaaagagcataaactaaagaaaagaccagatttgcagaagttcggccccttaaagttggtaatagtctacgaccctttttgttgtattgacatgtgagaaataatgaactactctctctcgaaagctcttacaaagatctctcagtagtttactcttagaacaagaatattttactcttgagtgtgtactctctgaatagtttcatgttcctgaatagtgagatgatcaaaccattatttatagggatgaagtatatgaaaatggtttccgttaatctataacaaattaaataggaaactaccttatttccataattacaattaataaattaagaaatttatgttgataacctttattctttatagatactaatcaattccaccaatgtagggattacatcgtgacatgcaagcttggaaataaagatgtgcatctctaaaattgctaactgacacatccttgtcaatgcatgcgagttacctatgtgatcaacctggtcggatggctacctataattttgtttggacatcctatcatttatgcttggctttaagcaccataacaatttacacgacctactaggagtagaatcatccacccaggttatgagatatgatacacgtgtcacgtagattgatgccacgtcatagtacagaaattaggctaatattttcctcctaaatccgcgtgaaatcttcttggtcgcacgtggacttattcagccaggaagatgtccggatgggtgatgcatgtttagttgtcaactttgatgcgatgtaacttgatcgaaggtcctttcagtgtctggggcattaaatagtgcttgaaagctatacctcgaatcacacatagccggttgagtgataccgcatgcgtgacgtctatacttttgcaatgagtactaacattcattttttggtggaaaccccaaatatttgaaatttaaatgaattaatttcccctttaagatgcccataaaagggaattaagccttattgaaactcttttagccattttcattcctagaaaacctagagccatgaaatttctcttttatttccaaatcttcaaagaaaattctacttgaaacttcattgttgataccttatgagtagatctataaggttttgaattgtggagtaagttgtttttcccttaactttatgcaatatttgtcaaatatgcacattatttttttgaattccttactgcaaaattatcgattcttgaactattcttgactgatcatagaatagaagaaattagagcttgtaactttgactaacattcgattaggccttctgattctctaattacgtatcatttttgacctaaaattgatcatattcacccattcctaagattttaaagatttctagtaatttctttgaggttttgaacttttgggttcgggaattccattttagaatcaaatccttcctttttgtctttaatcggcctagtcggcattttaaactcgtttttcaaccttccctctatccaactctcatctcttgtctcccatctccttttagatgaaccctggtgaattctagggaggcaaacaccatattgactaggatctactttagcttttgtacaaagaccctcctcggctccatgtaa

SEQ ID NO: 49382 - DNA, 1334 bp, Cannabis sativa
  modified_base (1301)..(1301): a, c, t, g, unknown or other
attggtactacctatatcaacaaggtacatcttgttttccggtaccctatcacaaaagaactccacaattaagcgtacttgaactcgggtaattttaggatgggttacatcctgggaagttttctcaagaagcgtgtaaatgaggacaaagcacgctagaaacactcgtgttgatttgtaaggctaggtcattagtccatgaagcagctagagtggcatacccatgtataagagccatgagtttgtgggagaaagcccaatcgaggcttgaagcggggacattacaaatggtatcagagccttgtggttgatgaggatgtcagatcccgaaaggagggtgattgtgacaattaaagttctgtgatccgcaaggggaaatactagaagctatgcaattccacatcatttgggaaggtcaagtgtgatgattctaagactgtgtaggtataagactacatagctaagcatgggcgttacaaattataacatcccgcttcaagcctccatttggcgttcccccacgaactaatgagtcttatacataagtaaaccactctggctgcttcctagactaacgactggccctacaaaccaacacgagtatttctagcgtgctctgtcctcactcgcatgtttcctgggaaaacttcccagaggtcactgaaattaccccaggtcaagcatgtttaactgtggagttctttcatgatgggctaccaaaaaatatgatgcaccttgatataggtagtaccaatcaatccatttaagccctccccaactatgtagtctcatacatacatagtttgaaaatcatcacactttactttcttcaagtgatgtgggattgcacagcttacccggtgcttccccttacggataacgggactactaattgtcacacaatcacccaccttacggggttcgacgtcctcgtcgaccacacatccagctgggttaaggctttgatacaattttttgtaacgatcttgcttcaagcctcccttggcccttacacctacagaataatggctcttctacacgagtatgtcactctggtttttcttggaatgatgacacaccctacaaaccaataagagtgttttcaacatgctttgttctcactcacacacttcctgggaaagcttaccaggaggtcacccatctcaattgtggtgttctttcgtgatggactactgttaggctatttttagcctatgtctcgagtttaatagataagaactttctcgattatttttgtcttttggagcgattttacgcttgattttccttgtttcagtttnccggggcattagagttcaaattcagtcaattga

SEQ ID NO: 49383 - DNA, 796 bp, Cannabis sativa
ctgtcacatttatgttgtgtgtaggttattacaaaggtaaatttctgacagaattaattgttttgtatgtttttaatgaacattaatggtagtattgacttctataactaattttcaccttgtgcactagatcacaaatacaaaaatttggctgaaaatagcttcatggtatattttgagcaagatttaactaattatatgcattatttattggagatggtttaacttagcaaattactaaaacgtaaataaaaaattaaaaaggaatataatacctagctatgcaaagtgaaaaatatgtgtttcttttaatcacaaacaacaacactacaagataaagttacttacaaaactttagttatagcttccactcacttgctatcttttttactcaaattcttagtattcaaagagttcaatttagcacgaacactattatcaatacaattaaaagtaaccttaagagtaggtagcttttgatcccaaagcatcttgtttcgagcataccaaatgtgataaatcgtggatttaatgacactcataagaacctttcttttaatttagaagcttttgtcttctgaatccactttaggacatcatgaagcttttttccaactagaaataatctaaagccaaatgttttgaacaaccatattgctataaatacaatcaaagaagagatgagaatggttctccattccacttccacacaataaaaacaaggatgttcaaagttgatcacaaaggactcttcaaagctagccgacttatgaacctatattttagaatgtaaaac

SEQ ID NO: 49384 - DNA, 1297 bp, Cannabis sativa
  modified_base (1249)..(1268): a, c, t, g, unknown or other
atgtactaattactttttctttggtgtgcttttaattatcaaaacaaacatagtacaaacatgcatacatacactttatttttgagttgatcaaaataataacatatttggtcatctattttctttctttcttatgcaaatttcactttcagtactttgtaacatttagaataataataaatattaagtactttgagttggtaataaaaaaaagtagggttttaatgtcttcattttttagtgtatgtcctcttcttctttttcttcttcttcttcatctaagattatccaatgttctgatttataattataagtggtccaatattattctgactagttctggattatatatgcttggttttacagaacggttctttgtatttgtactatcatagttggcaaaattaagggtgtttggtattggaatctaatataaatagtttcattaaaaaaattaaaaactaaaataaaataaaaaattgagttgatagaaaatgaaaatatacagtaatttttatttttatggtttttaaagtatatgtttgtaaacatatgattttttcttaaaaaaattattttatgagaaaattttagaaaaaaattataaaatataaaaaaacaacataaggtacctaattacccttttatggtaactggttatcctgttatggtaactagttactcctatgattacccttacctcatttttttatatttttaattattttttattttttcataaaataacctttttgaaataaaaacaatatttttacacaaaagtataaaaatcccaaaagtttataatttcctcaaatatatatgccatttgtggtatggtaataagtatagaagtaaaattacaatttactaattctcttgttactttctcacatatgtcttttctttgatatgaaatttctctatttctagtaattctctagtcactttctagtaaaaattgctttttagaaatagaggatcgattttttaaaagaaagaaagaaatatttgtagggcttatatagtagagaggtgttatttttggttacttttgcataaatatttgagtataatggcatagattttaagataaatattattttgaactatgtgttttgtaaaaattatcgactagactctctgctttgttaaatgacaatttagatcctgtgtttttttaaattgtacaaaataggctctgaatttaatatttagtgacaactttttagtcacaacataaattatnnnnnnnnnnnnnnnnnnnntagtcacaacaaaaagttatttgtgacta

SEQ ID NO: 49385 - DNA, 2651 bp, Cannabis sativa
  modified_base (2480)..(2485): a, c, t, g, unknown or other
attaatagattgtgtaaagataatatatttttaataaactctaccccaacaccaacaacgggacggttcgggtccgagtttgggtccgagtcaggatcctaggtccgagttcgggtttgagtcccgggtccgtgtttgggtttgagtcaagatcctgggtcccagtcctaatcccgatctcaggtccgagtctcggtcccgggctcgggtccgggttcgagttttggtccgagtcaggatcttgggtcccggtctcggtcccgggtccagctccaagtccaagtcccgtgtttgggtctaggtcccgggtccgggtcccagtctgggtccgggtctgggtttgggtcctgagtctcaggtctcgggtcccggtcccgagtcagggtttgagtcccggtcccgagtcagggtctgggtcccagtcccgagtcaagattcgggtcccggtcccgaatcaggcttcgggtcttagtcccggtcctggtctagggtccccaattcgatcctggtcttgggtcctaggtccagtcttgggccctaatccgggttcgaggccgggtttgggtcccgatcttggtcccgagtcctggttcgggtctgggtctgggtccgggtccaggttcgggtccaggctcgagttcgggttcgggtttgggtccgggtcccaagtcccgggtctaggtcccggtccgggtccagttccgggtcctggtctaggtcccggtccgggtctcggtcctgagtcccgggtctaggtctgggtccgagtccgggtcccgggtctcgggtccggtccaaacccgggtccaggtctcagattagggtccaagttcgagtcccggtcctgggtcttagtctaagtttgagtccgagtttgagtccaggtcccaagggatccgagtcttgaattaagttttttttaaaaaaaataaattaaaatcgggtcggatcagacctgatccagaaagaaattagatggggtagagcggatctgatccaggattctataagtatccgaatgtttcggattagaggtgatccatcgaattgaatctccagcccgctccaactaaatgaatatttttgacatgtctataaatctcaatgtttacatgttatgttatatgagtgataaaaaaaatcctaacaattgccgcaaaaggttctacttcctgcgtgtgctttatggttagatcttgcattgcaaataatatttaagatgtggtatgtagtgttatagatttcccattaacgtatgccagttacgacaccacgaacacgaagggtgattttatatcgagaggccaggaagagtgattcaaatagaagatcttgataaaatacaagcattattattcagcttcactttggtttgcaaacaattttaaaacaagtaaccacaacttaagctaaaatatgttgtgtttccacaacagaaagtattcattgttcataattttcatgacttaaaaattgatatatattcattgtatttgtaaagtaaatgtcagtgtgtaaaagatcgggtaggaaagaaaaataataatttagttataaaataatataaaatatataagaaaaaaagaagaagatgaagagaaaaagagaaactgaatgataatttttcagttgcttattctaatctaatgggataaactcttatttatacaaaaatatgactaaaagaacgagaaactaaatcaatgtaataaacgaaaatacaaccaagcattaatagtgatttggatatccataaataatatttcataatataccctttggatgtccataaaaactgcctcattaaaaaccttgctaaaaaacttagtcaaaagaaaatgagtgcagtgtaaactaactccccctcatttaggtattcgtgtgagatcttttaattgacaaattctaatcttgtgagctatcttctcaaatattgaagttggtaatgactttgtgaataagtctgcaagattgacacttgattgaatttgttgaacaccaatatgtattttcttgaaatgtataaagaagaatttggtgaaatgtgttttaattctatctccttcaatgcaccctccttttaattgagcgatgcaagtagtattatcttcatagagtactacttgttttgatacttctttattgagtgtaatccttatgtttttcgaatatgttatgtcaatgatctcactcccacacattctctacttacttcataaaatgcaagtatgttaacatgatttaaagttgcttcgttaaaaaccttgtgaggaaaatttagtgggacaaaacctgagctaagagaaaatgcaatatatatttcatattcataactatttgcaagttgccttgttaaaaaccttgccagaaaaactcaatgggacaaaacctgagctaaggaaaaagagtgcaatatgaatatatctcttcctcgtgcacatatgatccataattcttttagtgataatatatctcataannnnnntgttatcacttttaaaatatcaccgtatattatctatgatcatatgttttctataactctttgagagtgtatgtgtagacttctaaattatgaatgaggggttcaaggaacttcattaattatccaacttattgaatcattcatgtgtgtatacaactttattcat

SEQ ID NO: 49386 - DNA, 1449 bp, Cannabis sativa
  modified_base (1230)..(1237): a, c, t, g, unknown or other
aatctcaataattcagggggaatttttaacggcaaaaaaagttcaaggggcacaatttactacatatcaaagttcagggggaaaaattactaattaaccaatttttaaatatttgtgttgcaactaattagattttcagttaacttttttgcttttaaaattaaaattgtaaagtatttatgtacaaaaattatacattaaggatttatacagcaaagtatatatccttaactaaaaattaacgtggtaatatttttttaaaatgcgttttataagtacttttttaatttatacagtgagtcgctttatgcttctaatatatatactatttattagaaagataaaaaccaaagaaattaaattacatgactagtaatctagttgttaggtgcagctacaaattcaaatgaatgtacatattactataacttataagtcaatgttggaatctagacccaaaatatcagaatcttcacaaaaattttaaaattttcaattacaggtctttgaaagtgctctctctccaagaatttggagtaactagacaatgacctttcttaataagataaccataaatatttgtttttataatatattttctaagtctttaattagcccataatattgttggtactatttataaatagttaattaattataaatacattataattatgtgcatgattgttaagggtcctataaatcaattaaagtttggccaacctcttcatcagaagaataaacgagtaataaaaaacaaagatatataattttatagttttatttttattttttttaggtatgttttatagttttgtgacaagactctttaactttccacgagaataggagaatccacatacacttgtttcttggcctatgattcaaatttataaaataaaatgcttttttttttttagaagattcaagtttataagaaaaaaaatttatgttaatttttttttcttggcctattcacaatttcacaaggaaaaaaataaagaattatataacttccaagcttatatttatgactcaaaatttaaagaaaaaatataaaataagaagaagacacccgaccaatccatcaatttaattttattttctgggcaacctacaccattagttgttttaaaaaaatcttagctctattttttaataaaaaagactccatttaaattcaaaatttgtaataataataataaaagaaattattttatatattatttnnnnnnnnttttttaaaaaaaattatagtttaaattactctaatagtaataatcatttcggtaattttatacaaattgttatgtacattttaattgctatataaggtataaaagtaaaaaaaaaaaggataaataatattttggaccttctgttttacaaaagttaccaattagaccctgtgttttgttaaatgacaaaatggaccctgtattttttaaa

SEQ ID NO: 49387 - DNA, 889 bp, Cannabis sativa
  modified_base (376)..(389): a, c, t, g, unknown or other
ggtttggggtccgagatcggcgttgggtccagagccaggactagggtctagggctgggtccaggttggggtcgagtatgggtcagggccgggtctgggaccaggtttgagtacggggtcggattaacttcttattgatgaaaagattactgcaattcaaaagaaaacagagaaaaacaaaatacaacaagtatattttacacaaactcaactatatatgaacagttaaaaaaataaagttattatactcaaaaataaatatatatttaaagcttaaaatccattattataaattcacaatgaaacaaacattaattaaatcaaaatagtattaaacaaacattcattcagccttaagataataataataataatannnnnnnnnnnnnnaataataataataataattccaaagtttaatgggtaaatgagataaatattgtatttgatgtgatttaatctatcaacaaaaaagtgtgtgttccacattgtctatgtgtgagtaaattgtaaagtttatattatatttatagagcatttctaattatgcttaaattataatattattaagataatcaaatactaattaaaatagagagcataattcaagcaaaaataataaaaatagttcattattttatttatttttatctattttaactaaaatctggctaagaaatagaatatggttgtagatgcttagtaaatagtttaaagataactgttgatgctgttatttttcgtgatcgagcagtatttggttatagcatagtcgctcgagactctcaagggaaagatggctaagtagagtagcttagcaagtataggcactccgaatttaggtgaaataatcagtatcaaggaaacactaagctggattaaaactcaac

SEQ ID NO: 49388 - DNA, 1899 bp, Cannabis sativa
caaacagcttcgcggctttcttggtttaacaggatattattgaagatttgtagcttattatgcctcaattgcagcgcctctcactgagttgctcaagaaagaaaacttcatatggacagaggcagtgtgtgcagccttccagcaactaaaacaagtgatgacgattacaccagttttggcacttccagatttttccaagctgtttgtaattgaagccgatgcgtccaatgtgggtataggcgcagttctcatgcaagaggggcatccagtggcgttttttagcaaaaagttgggtccaaagttcagtggcacttcaacatatttgcgagaattgcgaattatcgtggaggccggtactaagtggcgccaataccttttgggccgccagtttctcatccgcacagaccacaaaagcttaaaagaactacttacccaagttatacagactcccgagcagcaacaattcctccgcaaattaattgggttccactttaccatcgaatataaaccgggaaagactaattcagcagtagatgccttgtctcgtcagcatgaagttccaaattcactattggcagcagctcaatcaacagccagttttgagtttttggaagagctccgtcaagagaatacaacctgcccagaacttcgtcacatacaggagcagctagcttcgggtattttgaaagattctccatatttagttcgtgatgggctcctgtactacgaacaccgccttcaactaagtttccattctaatctgaagcagaaattactcagcgagtttcatgagtccttgatgggaggacatacaggtccggaacacacttttctccgtttaagtgcaaattttatgtggccaggtatgcgaaaggaagtacagcagtttgttcgcaactgtattgtctgtcagactatcaaatactcccccacggcaccttatggtttgctccaaccattagaacttccggaacgtgtttgggaagatttatcgatggattttatcgttgggttaccaaaatctggcagtgtatccaacattctagtggtggttgacaggtttactaagtatgcgcattttggggctttaccgaatcaatacacagcgaccaaggtggcagaattattttccaacatggttatcaaactccacggactgcctcgttccatagtttccgaccgcggcccaatttttactagtgctttttggagaaaattatttgaattaatgggcacgcggttgaagatgagctcctcctatcatcctcaaaccgacggtcaaatggaggttacgaataggtacttggaaaagtatttgcgagcctccacaggtgacaatccgtgacaatggagtcgttttttgccatcgggatgacaccgttccaagcggtatacggtcgtacgccaccctctatttcgacttacactcgagggaccactagcattcacgccgttgaagaagatcttctttctcgggatgacattctgaaaaagcgcactacaaacttgcaggctgctcgcaatagaatgaaccaacaggctgataaacaccaccatgacatcaagtttcgtgttggtgatctagttttgataaaattacagccttatcggcagaatacagtggcaaaacgactccatcccaaactttgtaagagatactttggtccatttccgatcaaggctcaagtgggacaagttgcttacacggttgagtttcccgaaggcagtaagattcatcctacgttccatgtttcggtgttgaaaccgttttatggtcccaaacctcccccttgctatccgcttcctgcgattactgtcaataacaaaccagtgatgctacctcaagcaattgtggctgttcgaacctttcgcggagagaagcaaatattggttcaatgg

SEQ ID NO: 49389 - DNA, 1276 bp, Cannabis sativa
gagagggaaaacagagctccctgagaaggtcttccacaaactcccaatcaaccgtgtcatatgccttgctaaggtctattttcatgatgcatctggccgagatgttcttcctagtgtaccccttcaacaaatcctgaaaaatcatgatgttgtgagccaaagatctatgtttgatgaacgatccttgattattatccactatctccgaaagcacttctgaaagtctggcgcatatcatttttgagatggatttatagactgtattacaacaggctataggtctgtaatccttggcagacaaaggattgatcactttcggaatcaaggaaatcactgtctcatttaggtcctttaggagccgaccactagtgaaaaaatccaacatcgcacttgaaacatcatcaccaatgtcgttccaaaggttcttataaaacccagaaccaaatccatcaagaccagggctcttagttgtatgaatgctgaagagagccttcctgacatcacctttagtgaaaggcctaatcaacttcacctgttgatccaagttcaagcaattcccatactctatacacttcctatctatagagcttctagcagtgctcttactccccataaaattctcaaaatgtttgacaaagtgattaactacttcctcaaaatcatccacaaccaaatctcccttagtgaaagtagttatcctattttccaatcttcttttcctcataactgcatgaaaatagcttgagttctcatcactaaacttgatccagttgaccttgctttgctgactaagaacttgagctaatctctcctttgcaaccacataatccttttgtttctccttgactgattgttgaattaagctatcattcgggttcctagctacatcctcttgagcaatgcaatacatctcctttgctgacttataatcaagagcaacatcccccacttcgtgcctactgaacacctttagcccatgtttaactctatgaagcctctgcatcagactttcgaaaacattcccagtaactttcttgttccaacggtccatcactttctgtttataacctgtgtaggttggccaatggttgccaaacctgaagggtttaatccctacattattactcgccttgttctaaatcagacagaagcagtgatcggaagtaacttcccatttaaagcaagcttcagaatcaggaaaatcaatcaaccagttgttattcataaagaccctgtctattttagagtagattttgtccccaacatcatgcttgtt

SEQ ID NO: 49390 - DNA, 2040 bp, Cannabis sativa
attggattttgaggtctaattggattggatcggatgagaaaaaaaatattggattggattggatgcccacccctacacttaacagctagatacgtacaaaagttttagaattataatctaggtattattaccactaaaaattaaaattaaatatttatttgcaactgagagttaaacttaaatatttatgtcgcaatctactcaaaagagaaacaatgatttaaatttcaaattttaaggttctaaatctaaaagaaatgaatataattttttatttgccatgaaaataaggttatagtgtcaaatgaacatcgtcaaagcttaaacattcatactctattttttcaaaaaaataaaaataaaaaataagaaagatgaaggagagatgaaacaaaaaaaaaaaaaaggaggttggtttacatttttcttttgcaatttaattcatttcatttagaaaaacatcaaaatcaaaaagaaaaagatagaggaatgtaacaataaataaatatggaagaaggaaatggagaggacgtttgagggattataagctctaactttattattattattattattatgaataattaaatatccacataaaagtgagcaattcttttaccataaatccatataataatttttaagaaaatttataataattttaaaatattggaaacaatcttacaaacaatgctttttttttattaagagcaactccaaccataaatattataattatattagtttaacacaaaaacgatgtaaaattttttatcttgtaatttttcgtttattcctcgtttgtgtaactttgcggcccataatgtgactaaatgggcgttcgcccagagcttaacaagtattgtggatccgtccgccattcttgcagatctcctatgtaatgaccatgaggtctaattttctctttttatataatcactcgtattttcaaaaaaaaaaaacacaaaaacgatgtaattttaacattatattattttgggtaaatactattttggatcttgtgatttacaaaaattatcaattggaccatttgttttgttaaatgatgaaatgtactctatattttctaaaaattgtacaaatcagacactgaactgattttttgtcaaaataatactaaataataatccgatttagagatgttatgacaaaactgattatatttattatatatgttcgtgttagaaattgtcttaaatatattaaaaaataaaattgttgaaaattgagctcaaagttttatttttactgttttaaaaaatatagggtctattttgttatttaataaaacaaaaaagtcaattaataatatttgcaaaatacaaaatctaaaatagtatttactttattattttttcacttcaaccatcaatactaaaagttacacaaaaataaatttttaatcaaatataatatttttgtattattatattattaaaaatagtaaaaatatatatttgaaagctttaatattatataagaagaaatagtaactaataaataaaaaataagttttagtgtcaaattttcacaaattaaatattttagaaatatattgcagatggcctaactttcctcaaataaaataaagtgccaataattaacaagttgaccactaaagttagcttagtggtgagggagggatcggaaaaagagagaggtcatgagttcgaacttaggattttgaaactattaagctattaactgattgtaaaatacaattacgctacactcaaaaaaaaaaaaaaatagttgacagagggttggtaggtatgatagagaaaaaggagaaaaatatttttatttttattggtttatcttctacacaaatcgattgaagaagccatttagcaccacatgcaatatctaaatctctacatttgatttttttttaaaagggactacctttgatttttgtggttgtatttcatcaaatatcacccaaaccaaaccaaacacattccaccaaatttaattattttgttgctactagcaatgcgtgtatctatatgtatgggt

SEQ ID NO: 49391 - DNA, 1277 bp, Cannabis sativa
agtaagaggtacaccaggagtaggaggagatgaagcaacttgttacacaaggacccgtggcttaaagatgcctgctttgccacgggtaaccataggatgttgagagataggagcagcaggttgtgtcacgggtgatacagcttcaggagatgatggttgaaagggtgaaggtgcatgatcaggtggctgatgtgtagtagtgtaaggactagcagtagctgaactaggtgattcctgggcaaacaaatctgaagtatgaaatggtacagcagaaataggtgaaccatgatcaaaggagggtgttacctgatcttcttaggaagaaccctaggaaggtgatgctgcatgggactgagatggcatagtattgaatggtaaatcaatccatgagtgagggatagtgacattcacttctttttctggctgataattgttaaaaaaaccgtgttgacaaggaaactatttttcattaaaaatgatatatcttttgatatatatacgaccatgtgagctaagacacttgtaacttttatgaacatcactataccctaagttcacacacttagtggagtggtactgaaacttatgggtttggtaagttcgaagacagggaaaacaagctgaaccaaatacctttagcagcttataatcaggctgtcttgagtacagaatctcatagggagctttgtgattaagaacataggttggaggtctattgattaaatagacagcagtctgaaatgcatcagaccaatatttttgaggcattgttgcctgtgcaaggagggtaagtccggttttaacaatgtggcgatgttttcgttcggctcgaccattttgagctgaagtgttgaggcaagaatgattaaacaatatgccactctgtgcgaccagatttgaaaaagcctaatattccccacctgaatcacttctcagttttttttattttcctcccaaattgagtttctaccatagctttgaactaattaaatgcttgcaatgcatccgatttaaattttaagaaggtatagccaagtatacctgctatggtcatcgaggaagtgtatatagtatgtgaaattagtgtgtgatgttatgggggcaggcccccataaatcggtgtgcactaagtcaagtaaaccagtagatttagacaaataattctgaaaaaggcagtgcatgtgatttaccatattgacaagcatcacaaaagtgttgagtttcattcaaaggaaattttacatttgacattctaaggacttgatttaaaacattaa

SEQ ID NO: 49392 - DNA, 2254 bp, Cannabis sativa
taaaatgtatttttggtgcttaataattttttagtgtataattaattatcgggtttcatctaatttaaaaatattagttttagtgaatatggttaattaattaattgtgagacaccagatttattggtattggtggtatgatggtgatggtgataatgatagttgttatgcttatttttatacgaactagcataaagaaacaaaaaaaacacatgaggaggagcattgattataactttttttgagtttggaatattttttttgtgagagtgtatgttatagctgcaatgttattttggtgaaatcttataaaattttaaatagtttacggtatggagaacatgtttgaaattttttaaacacgtgtaataaactaaaatattaataacaaaatatgtttgatgttataactataactagaataaaatatttcggtttgtgttattgttcatggaaattgaaatagaaagttagcaataacactcatctacataatgagattagaactaaatatttaagttaatataaaaaattacattttttttttagatttgtcttttatagtctgttacaaatcttgttcataaccatattcttttgatctttgaatggttttcttattaagaacttacaacatttgcactaacatgtttttgtcacttatttttgctcacaaatcattatggttatctttctacttttaaaaatgagatggttgcagtgatctgatcacagattggcatcttttaattcctttaaataattttcttaaataagatagcgacgattcaaacacgaatattcattttttgattaaggttaactaatttttgaaaatggtattacactcgtcaaaagtggtcccaagttcgaatctccatccttaattgtcaaaaaagaaattttatactattacataccccacacttgcaacatcaaccaatagctatagatgtttaataaaagctaatttgtatccatttttgagtcaattcattccaatcttttatctcaacttttacagaactagtttgttctggcaaatggggtgtcaaagttcaatttgtctagttgaatattgtttttaaactgtacacactgcaccaagttcattgtcactcaagtcgaaagatatttctcttttctttaataaaaatcaccttataaaactgacaaagccaccaactttattgaagaatctttctctgatataataaacaaagaacaaaacagtttctgggttatgattctttgtgtgtgtgtgtgtgtgtcatgtgatggtttcaggggtatgccgctctctcgaagcttggaccgaaacaggaaatggcggaaaatggaagaagatgaaagtgtgtttgtgtacagagatggaaccatagatcaagcaacatataatctgtatcactttcctaagaacaacaccaccaacaacaacaacaacaatggaaatggagtcagtaatgagaacaagcccaagtctattggacttagaagcaagggaaataacagtcccaatagctgtgttgttccttggaaagatatagttccatgccaatagtaaaggttggagaaagtgtaagcaagaaaagaaaatgaaaaaatggaaaaaaagaaagaaaaaagaaaactttttgtttgattttttatagaagagaatctaaagaatcaataaaaatgttatttttacacatttggttgtggattgttttggaccttttggtggtggtactggtatatagtaatgggttttggaaacatgaatgaaatgaaagttttagtaggctagcattcttttcggtgttatatcgttatttgtgtaattaattatcgtgtcttatttaacttaagaaaataatttttaaaaaatattgttaactaatcgtaagacacctcttatagaaggtgtgagatactattagtgtctaatatcaatgctcatttttattttactttgaacttttacattggttataccatccatcaatctttttatatttttttttatattatttaaataatatgtttataatacacaaataataaaatattatatattacataaaatttatttatttttacactcacaagtaaataaaatatatcataaaaataataaaagaacattgctaagcactaaaacttagaattctcttaattacatttagttaagtactattttcaagatcatctccaatgcaaggtgtaaactttatagcaaatctagcttgaaaaatagcttaatatcatattt

SEQ ID NO: 49393 - DNA, 1786 bp, Cannabis sativa
tgaacgattacctgatttctgttaccagtgtggtataattggtcatgttttcgacaaatgtcaagtgtacatggagaaaattgatgacggtaaagaacccgatcttccttacggaccttggatggaaggttcatctctacccaaatcaccttatgaccgttatcggcaagacttctcaaaggcaggtccttggccatttgttactcgtcttgttagaaacacaattactcctatcatcaagcactcaaggcagcctcttgcactcgctcctaatgttatggatcccgaaaaaggaaaagcagttatgataccacagtcgactgattcggagtacacttctttaactccatcttttgccgcactctcctgtggtctaaacaacattcctactgttgcgaatcctggcaatgctacacttgttagtgagaaatgtatcacaacacatactcctggatcgtcctctgtgaagaaggttcccctgccacagtcttcacaaatgaattcaatgcctgaatcatctggtggtaaacttttctctagtgcagcaactgaccttacacccccaaaattctcatccacggctactataacacaccattagacggtggttttatctactgctacccctccagcctacttacatttaagtgatccccacttatctggttccacaatgatgactatgctaatacctactgcttccaacacatttgtttcttcaacaattacttcagttccggatcccgcctcagcaaaagtaattcacccaactgaagttgcacctaatgcaggaaataggatggcttctctttctccaaaagacaatttgtttcctcaagtagcaatgttcgccaagtgctcaagcgttgttgcacaagaaatgccccctttattgatcttaccaacatcactgaatcgtctccaaaccttgactctatctctgcttcttcaaacaactcactggtcgaggacaatgaaggagactctttgacaaaggctgtgtaatagcctcaccaatcacaatgattttgctcagttggaatgctcggggcttgagcaatctgagagcgttttgtcaacttcgtttgctcatttcacaaaaaaaaaaacctgatgtaatgtttattatggaaactaaattaagtataggttctatttctagatttaagaatgcttttcactttccaaatggcattgaagtgcctcgggtgggtttagggggtggtctgttgtttctttggaaagctgatattgatgtatctattattaattatggaataaacttcattgactgctatatcactgttgctgctggttttaattggcatttctctggtttctatggcgctccaaatgtatcacaaagagctttcacttgggaacttttgaaaaaattaaaagatttagctccacttatgccttggcttgtaatgggagatttcaatgaaattatttcccatgatgacaaacttggtggtgcaattcgtaatgaatctcaaattgatgcttttcgagacaccattgaccattgccaccttacagaattggagtttgaagaagagagattcacatggcataataataattcgagaggtgctaatgttaaagaacgtatggattatggtttcattaatggcaaatcgactgaagctatgacactcccggttctaaaacatttggatttctatgcctctgatcatagagctttgctggcagaaatatctcactcccatcaacggaaagttcaaccatttaaatcacgttttcggttcgagaaattgtggct

SEQ ID NO: 49394 - DNA, 1139 bp, Cannabis sativa
atagtccacagaaagatcactgtaaacctacaaaagattataaaaaaaaaaaaaaatgaaaattcatgagtactttactattactagtagctaaactgtctggtgtttggattatatttggaaccaacttgaagtgaaagttagaacatagagcaacactacacttacctttttactacggagactgcaacgagggccttcaactacaatgtcactcccttgactctgcaaagcatgtaaaacagtaagtaaagttgtttatgcatatagctagaaaacacatgtaaataaaatctacaaaattgtgttataacacatcttaataacctttagtcttaatttcagtttatcatagtcttcatcgttcataattggatttccggatacataagccattgaagcctccaaaaacctctgctcatcaccacctgatgaaaaatcagtagcaaaaagtttgagtgttgaacaaacttttattcaatgttaaagatatatgaagaaaaaaagagggcttttgtttatcatacttagcataacaacactgctgccttcccacattagttcttctttaagattatcaaattcttcatttgacattattgcttttccctcataatagaatgactgtaaaaaatatatattaaataatggtatcaaatctttaagtaaaaggaatatttaaagtattgtaacattgaaattttacttgtagagctagaagaaagtcttgttcaagttctcccagagacttcttctctttcttgtctatactacaataaggcaggatcttgctatcaacaaccccatcttcttcaaccttgcctggaacaagattattaattggtgtcattacaagtatttttcatagctacttaaccataactagacaccatcatgctaaaaaaaaggtagattttgggggttataaaggcttttaatcaagcactattgttctttcaaatcaagcactgttggagtatgtggcatctatgtattaataaacatggtctgatttctgacacactaaactaaatgccaaaattcctaatctaacattgagaatttaagagagttaagtgagtttcaaataactgtgtctatcacagttcaaaaccggcaatctttgcagctaattaagt

SEQ ID NO: 49395 - DNA, 1369 bp, Cannabis sativa
tcaagctgaacaaagtgtcaatgtccaagtccctttctggtcaacttttattaacacttcatctggtttttcccatgattagccacagcaaaataccaacattcaaactgataaaaatcctgaattgagaccacctggagcatcatcgtctatttctaagtctgcaactgtttctacagatcagaattttgagcatgatttcgatcatgatgaaattaatatcaacactgagcagtatgaagaacaattagcagaaaataatcaagttgcagaaactccatctggtgcagcagtggacagtcaacaaccacctcaaatcattcctactcatcctatgataacaaggtcaaaagctggaattttcaagcctaaaacctacttgagtaaggctcagtttaatgactattatgctgaacctatctctctcaaggaagctctcgaacatgaaggatggaatggtgccatgagtgatgaaaataaggcactgctgaaaaacaacacttggatattagttccaaggctgcctggaatgtatattatcgacaacaaatgggtttacagagtaaaattaaatgcagatggcagtttttaaaggttcaaagcgaggttggttgcaaaagggttcagtcaaaggcctggtgttgattatggtgaaacatttagtccagttgtgaaagcctgcacgattcgaattgttctaaccattgctgtagcaaaatcctgggaggttagacaactcgatataaacaacgctttttcgaatggtactctgaatgaagatgtttatatgaagcagccacctggttttgaagacaaagatcaccccgaatatgtgtttaagttgacaaagagtttatatgggctaaggcaggcaccgagagcttggttcgacaagctgaaacaaacattgttgagttggaattttgtcaattccaaggctgacttttcattgtttttctacaaaacagaaagtgaaattctgcttgttctcatctatgtagatgatataatcatcaccggcaacaattcagaaaaattaaagctcttcatcaacaagctgaatctggtttttgcattgaaggatcttgggtccttaaattactttctcggtattgaggtatacagggatgacacaaggatgtttttatcacaagccaaatacataacagagtttttaaagaagaacaacatgacacatctgaagccatgtcccactcctatgtcagttggtaagactttgtccattactgatggaaacttactcaaaaatccaacagaatacaggagcttaattggtggtttacagtacttaactcatacaagacctgatctcagctttgctgtaaacaaattgagtcagttcttgaaa

SEQ ID NO: 49396 - DNA, 1633 bp, Cannabis sativa
atttttttcctaacatacatgaaacatttggtctagtgaaaaaacatataccataaatataatctgtaaatctcactacgttttatacaggaacgagagcaaagtgtaacaacaatgataactttcaactacttgaggtagagctacttactatagcaatcctaatttctcctcaaaactcacttctcatccacactcccaagaactcacatctctcttccactccctcacattactttcaacatccagaacatctgctgaactaaagtttaatttgtaaaccaaaaatacttttgcaaatcaagtaatgtaaaattgcaatttaattagtgggtccttctgctaaggctgatccttctgctaagacattttattaggaatgtttgtgataaaactacccattcttttacaaaagttacaactccaaaacaaagattttcactgtaaaatcccactctgttacaattttgtacaacaccctttttattgctaaataccaaccaaagacacacatgacaacacttgaccacttcattaaatcatatattaaatacttaattaattatctaaaacttaaatgatgttgatgatgagcttttaacttccatttggatagagaataatacaaaaaaaaaaaaatcgaaaagtagttttaatggtgcatataataataagcacacaagcccattcttcctccaattgaaattagtgagttacaaaagaaactacctagaagaaactactataaaattcttaccttgaatcacttaaaagtaaaacaaaatggaagagggagatggtgaattgcaaaaggggctccaagtctgctagttcgcgcgcctgagagagagaaaggagatggagaagaagggtgcacggagggaacatggaagcaaatatatattaagtttaaaagcataaatgaatttgagcatactataaatttagtggctaaaagaacttcataaaaataaccaaaaaatgtatggaaatgaaaaaaaaaaatcatcaatggagtttttaatttgaattatattacttgaccaggaccagtatcatcaaggtccttcagcatggggcgatacttgagcaatatgagatggagatggagagaagcttccgttgagagctatgtcggagaagagaccttcaaaccaccaccgttatgtcggagcagagagcttcaaaccaccaccgtgagaaagaggacgatcgaaagggaaaggggttcgagtggccagttttgaagaggacgatcagaagggtagagaggctgattttagagaggacgattgagtggccagattcaaaagggttcaaggggtagtggtttcgctgtgtgtactcgaacaatttggggttatatgtgaacagtgtggtgatgattagggtatttattaaatttgcgtctgtttatatttcttatagtttcattttgcgtctgttttcaaccttcgcaaacagaataatccacaattaataacagacgcaaaaaaaaaaaaaaaacatgttttcaaaataattttggcttttttcgtcggtttttcttttttcgtcattttactaaatgacgctaattatatatttttagtgtcgtttttaaaaagacggatcaaataatttaggtactatt

SEQ ID NO: 49397 - DNA, 1077 bp, Cannabis sativa
aaataaacagtattgataaatagttacaaaagtcatttttgagtagaaaattaaaatacttatcttgtcaaaaataattgatggatcttgaacgcatgctacttcaaacaattaataacttaaatcatttaataattttacaactctaataaccaataactaatacacttaaataataaataactaataaattttaatagtagcaaaaatatctactttataaaattaatacaataaaatttagaaagtaactttaataggatatacaaataatatataacaattttaaataactaaaaaaaaatcaatttatagaaagaaaagtagaaaaatcaaatataataaaatattaaacacatatataaaaagatataatgttttaaaatgagtcatgtcacttctaatggtttttggtacctttgaaggcttttgcacctataatatggttggcccctaattatttagggtaatttagtttaaaatatcacgatttcatgaacttcaaaaatataataaaattttaaagttaataaattatacgcagttatgattttactatagagtcaaataatactgtttttcctgttgttaatgtcaatcaagaaagcttagttttttctaaggttgtttttggaagatttttatcaaacaagacagtcaacttctatgatttatataatagaaatggatcaagtggtaattttattatacatatatggtagggtttaggttcattgctttttacaaaattacacactaaatttttttttagatgttatggtctgagtaagggatagtgactttaagaaggttacgaagtagagtgctataattcacttgctactagccaaagagtattccctttggctagttctagcaattttagatgggttctggttgcttagttcttgttatttggtagttttgatcaatttgatgattttttaacaaaagttttattttggttttctgctatttttcaggtgtatttcaatgagctaagagcgttatttgaagatgttataactttattgtctaaatttccgagagcatttttgtcccatatggctcgctctg

SEQ ID NO: 49398 - DNA, 692 bp, Cannabis sativa
tgaatatacacatatcttagttatatcaatcgaagaaacatgacaaaaatatttcaaactaaacaaataagtttatgtacaaaaagatctcttcgagctgccaatgaaagcaatgctttatatttttctgtttatcaattaaatcgattttctttgctttttcttttttcgattgaaatttttatttataaataattaataaataaaaacttatgaacttttggatgatctaataatcctctgtatctctttattcaattcttctagtcccccaacattctctaattcctacagacaaaattaaacaattttctcaaaaatacaatttcaaattgaaaaataataataatgataataaaccaaaaagacgtaaaagttattaatttaggtagactcacatgtggtcctaaaaacaacccgtatgggactcctccaaatttgccggaatgatgaaactaaataaaaatgtatggaattagatgtagaagaaaaaaatatattattcagctaaaaaaacaaaaaaaaaaataataataatatctattatagttattacctcctatcaagaaaaattatcatatatagcatgaatgagttactgtttagttttaacatagaatctcgtttatcttatctcaaattctaaccataacaaaataaaaaaagagtgaattcattacttgatgggctgc

SEQ ID NO: 49399 - DNA, 1966 bp, Cannabis sativa
  modified_base (1868)..(1891): a, c, t, g, unknown or other
aaaggaaaccatgcttcagggcatattaaccagacaattctagaggcagagtcacgcaaaaaaataagactgatgctagagttcggaagcttcagtttgagaaggagaagcgtcaacttagtgattctagtaaccacgatgatgacatcgatgaggtgtaccctgtatcggacggtaatagtggaagtctctccacaactgatcttctaagaagactaaatgagaaaaaagagagagagataaaccagaaaaatctagactccgtgggaacaatctgagaaaccacatcaatgatcgcgctcgcagaagagaatcttaagtgacaagagtcaatgcttggaatgcaaggtcaaggagttgatgaagatcatggaaaagatttctagaaaacaaagtagcactgtgttagcttctgaggaagaagacacggagccctgtgtgaagaggatcataaaagtgccactgctagagtgcttcataataccacggatggagttgtatgacggacgaacggaccccaaggaccacttgtccaaatacaaccgcattatgcaagtcgccaaggccagtgacgatgcaaagtgtttatgtttttactaacattaagcaagtctgcagaggactagtggaagaggttgtctctgggatcaatccacaacttctgagacccacaagcaatgttcagaaagaagtttatagtagccaaagaatatgaactagaagcaagttatttgaccagtgccaagcaacaaccaagagaaagtctgaagaaattcattcaacgtgatggatgtggctgctaaaactaaagtttccgatgacatgaaaatggtggccttaacatcagggctggcaactcgatccttattgtggggagtctttagcgcaagagggcagacactttgattgaattcttgacaagggcctagggattcataaacttagaagaagcctacgcccaagcttccgaagtacttttagcaccttccaccgatgtaacaaatgcctaaaactttgcggatgactactccatccatttaccctctaccaattacttttactactccaacggtatatggaccaattacttccgtgaagccaactgcacaggctagtttttctgggtttagagcttcgtaaactggatacaatgttgctcccgaacaaacgaacaaaaaagcaaaagtagacaagctaacagacatcgacttcctcagggaagctctgtatcccatatggctttccaatccaattttggtcccaaagcctaatgggacatggagaatgtgtatagatttcacaaatttgaataaagcttgtcctaaggactattttctgcttccgcacattgatcaaatggttgatgcaacctcgggataccaacttctaaccttcatggatgcatactctagctacaatcaaattaagatgcacgtagctgaccaaaaacacacaagtttttcagactgacaagggaatctactattacaaggtcatgccatttaggatgaagaatgttagagctacttaccaacgaatggtgaataagatttttaaaaatgttctgggacataatatggaggtttatgtcaatgacatgctagtaaaataaaaaaaacctccaagagccaccacaaaaatctagaagaagcatttgccatcatctgagagtacgcaatgaagctgaacccaatgaaatgcacttttagagtttcttcagggaaattcttgggtttcatagttagttcttgaggcgtagaggcaaacccaaagaagatcaaagctcttctagacatgccctaacccagaaaacataaggatgttcaaaaattaactgggggaataacatgttggaaatattttaccannnnnnnnnnnnnnnnnnnnnnnngtttcattaacatcctaatgtgaatttctaaaacaatgaaattaaacacatatcaagtttaggaaaccttacatt

SEQ ID NO: 49400 - DNA, 2178 bp, Cannabis sativa
tatggatcaatttaaattcaatcagtctaatatgagacattataagatcaaatcttcagggttgatgattacatgttagcatttctaatggaaaatcaaataagtgatgtatatataaaataaaatttaccttatcaaaaatatacttcaatattagattaaattgtgatacaaatatttcacataacaaaaaatgatctaaatttaaatcataatatataatgtaaaatttgcatcatgcatgattattaaaatttatatatttatttttgtataattattattttatatttttaataaattattagattaacattaaataagatattaaattttacattaaaatttacaattatacattaaaatataataataatttttttacaaaaatatctcaaaagtattatttacactaaataaaaatcaatttttgtatctctctagtctaagagccttatatacatatgtataatgtaacatgtatatatagcctcttccacctttattaaaatatattcttaaactagaaaaatatcatgaatttttgagtcttcacttattcaactaatttgtataatgagggtggtatttgctactccacttaatgggggagtaatatgttaaagagggcatcttatggtaaccaacacactatatataacatgtcatacatttattgataaatcttatgtatttcaatctaaaataaatatgtgggaggtactatatatatgttatattataaagtgtttggacttaaaatataatagtgtaaattaatatgtttggttcagcttcttggagctcttttttagtctttaggagtgtggataattttttttttttttaatttaaaagttcttatggtaacttttctgagaagttcaaaatataaaaataaaacttttacttagttttaagtaaagggaaagtaaaaacttacataggaaaattgaaagagcggttgctgttgtaactctcatcagaacggtaagagaggtgactaatagaattgtttcgtcgagtgcccatatttcttcggttaatattggaattgatcttattataatctctactaccataataaagctcaacattattattattcgattcacatgactccatctccgtatgaagcgacctaaatatttgatcagcggcagtgatttgggaagatgatgcctccactacttgattatgattattattataagaactacgagtagtaggaaagaatggtggaagattcatgacttcatcaagcttattcaactctcccgatttgtacaacataagaaactggtctttggagaagctcgtattccccaagtgaagactaaacaacgattcatttgaggttgaactccactctgttgggttcgatggcttgctcgaaaaaatcgaagctggaatccgatttggatcgtacccattagcctttttagtagtagtagttgtagtagttggggttagagataatagagaagaatgcatgggtgacaagctttgagggctccataaaggaatattttggtggtgaggactaatatctggtgaaaatattgaggagtactcatcacaatacgagattctttgtttaggttgaagagagaattccaaatctttattattattattagtaactggtgatgaaagatcagaattgatgatctcatcatcaacatcatctttttcttgtttaccatcatcagataatggtgaataattagaagaagaagatgatcttgaattttgcctagagatgttaaattcttcttgtttattattattattaatattattgatctttggcacatcgaaatcaaaacgtaccttcacatttttactactttcctttccattttcattattcatgatctcaacaatattcattgttgtattgatgatgatgatgaactaaaaatgatggtaactactgcatataaacaaaacataacaacatattagaactcaaaattgcataaagtaagaatataaatacttattataaagaaaacttactctataattaatgaaaatctcagctttaattagtgcctctcctcctgctattaattgatgaaatgagttcataattacaaattaagctagggaggagaggctatagagagataatatcatatataatggttaataatgacgaatatcacaacaaag

SEQ ID NO: 49401 - DNA, 1661 bp, Cannabis sativa
  modified_base (1214)..(1215): a, c, t, g, unknown or other
aaaaaactgaaaacaatatactacaataaaatcacgatgaacaaaaaaaagtagagaaagcatacaaaacgtaccagataaaaaagcaaacaaagagaaggaaacagaggggattaatggtccgataccccaaaccaatcttctgcctagtgttgctcttgaatcgttttcaatgttccaaaaaacgaaacggggtttggggatggaggtggaggtgacgagatgcctatgttatagatagaattggatgtggttcagagtgggtgcgatgattataggcagtggggttgggtttggcccatctgggtttggaatgagatgtatgatttcacgcaatgtcggttaagaaagagaattttgcttttaatatttttattttgggtttggggaattttatcgaacactttatgggtgccaactgccaaagccaaggattgagacgagagagatttgctctacgctgtttgggtttgagaagataagactttgctaaaataaataaatgaggtccctttcgtttcggagggaggcaaaaagagtctccatcaatcttcattcttaaatcaaattaattaattgattaattaagcaaactactaatactatactatagtgctacttccaatttattattattattattatagactctagcttgcttggacacttccttcattttggctaataaataaatttataatattattttgagaaagaaaacaaattagaacaagatgtaatgaggttaccaatacaatactctctcttatcctcctaaattttatcccttcccatattcttaaatttagatattttattttagaataattagtaattttattattaaatttttagcaatattaattatgtctcataaaatatgcagtgtgttaaaaaaaaaaaattggaattttatatttataaaaatttggtctttttattaagttttatctcattattctattttaatattaacgtgtctttataaattagcaacgttaccagttaatttttcgacaactatcaaatcatactcctttaaaataaaaatgagaaagattcaataattttttttggtaaatcttaaaaaaaaaatagatcttaaagaaaattaaaaataagttataattttaaaactaattaagcgatttaaagatattatttatttattattaaaaaatctatttaaatataaaaaaatatattaaaaattnnatttttgtaaaaactaaattttaccagaaaaagtttgagtttatttttttctctaaaaattttaatttgtttaagagaacataacattttttttgttggaattttaataatttttggtttaattttttgaaatatgtatctataaataaaataagttttaaaaaaataggaataataagtaaactgaatattttttaatttaatattttatcaagttttaaataatttttattaattttttagaattaatatgacattataattcttaaaattaattttttttaataaaaggggataaaattttgtattggtcaaaatttatggggtaaatatactaatttttaacggtaaaatgaatagaatcttataaaagagacataattatataactattatattttaggagaaatttttaacaagtcgtatattttaggggacatgattag

SEQ ID NO: 49402 - DNA, 860 bp, Cannabis sativa
tatgtcactatttcgcacgacccataataataataatggccttccttttaatattattaattgtgctttacatacctacctacatctaattatttaggcaatttctctcctaaatttaattaattaactaatatattaagaagtaatgacaagttgcgcaccatcaacaattatttaagcttagctacaactacagtcactaagacttggtcaaggaatgaatattttgttgtacaaagacacagaaaatatgcatcgtataatataaaattcatcattatattatccattcgcattatataaaattcaattaaaaacaacagagtttcaaatcattaatttgaataacgctctttctctccctctcagcaaaaaactaaaaaaaaaaattgaaatattacgaagatggaaaaagtccccattgtgtttgactaacatatatataaatataaatacgtttacatcaagaagaaggggtagtgtcagaaaaaataaaaaaaataaagagaaatattatagaatgaaatgacaaaagaaagtgcataaattatgggtgaaagtgttgataagttagattttatgtgtattttagtcaaatgatactttggatgttcagaagcgccggcaccaaacggcacggactactggactatagtagcgtgtgtatgaattctctataattaattaatttactaataaaacaataaaaatatagttttatttcatccttacaaaaaaaaaaaatagctttatttcatgaaaacagttgataattttcttgatgatatttagaatttttgttcttgtgaattatgatttatgtattattttgttccttgaatttttcagtccatcaaaaa

SEQ ID NO: 49403 - DNA, 560 bp, Cannabis sativa
agatgaaatattaatctctaaccaatgtggaactctatatagacttatttgtactgtgggtccttaaattatatagattttggtaagttggtgcctaaattttattttttgacaaattaatctccaaaatatataaattttaacaagttagtccccaatcttaattttttgacaaatagatccccaaatttttattttcttgatcttgacaacaataagttcccatccctccccactcttaaataatagtatttttgttgatttttttagtttttattttttagtattgattttaaagatttttatattaatatatattgtcaattttttaaaaaataaacaggtattttttcaaatatgccaaaataagaatttattttttaaagcatatatattttttataaattacctaagtaaattttatttatttttaatttatgttcagtgaacccaaaaatttttgtcatcgtagatgcaaaatataaataattaataaaattaatatatacaattaaaaaaattataatactacatagttataaatatataataaaaatata

SEQ ID NO: 49404 - DNA, 731 bp, Cannabis sativa
caagtccccaaccttcttggtcaccttaaaacatttcttgttcacctcggccaaagttgtctccttttttggacttagtccttaacttgtttcagctcgaaactttccaaagatgcctggaaagcaaaagccctcaggaataaagatatccgaacttgaggttcatctgaaaagaaaaataacaagtcaaaaaaactagacaactgtaaccgaaaaaaatattcacaagaagtaaatttaccctggacaggtgctcctttagcaagtctctggtcaggacctccaccgacatctcgtctgctccttgcagctactcgatcacatcgggcataacccgatcacagtagcagtcagtcatgtatcgagccttctttgcctcaggggttatagaaattgtagtcttatcccaggatttctcaacttaattaagacgaagaaacagaggtggacgaccagaagaagagcttttctttgacttgatcaatacggggagtagactattattattaccaggaggccgaacttttataaattgttgtgttcttattacttatattattactatttatttagtaattgatcacttaattttaccactttaaagattccttgactaaaaacaaagtcataaaaatattatataaaatacaatttaataaaatactatacaataatattcataaatatcaattaatatgcaattgctaaacatctctaaactataataattt

SEQ ID NO: 49405 - DNA, 2516 bp, Cannabis sativa
  modified_base (1294)..(1298): a, c, t, g, unknown or other
ttttttttcttttttaatttagcaaatgtagttctataaaaatatgatttagagttttctatatcagaaaacttcctgaaatataattaaatatgtgtcatttatatttttctaagtgttttataaatcttaacaaaataattcttaaaatttttttcttcaaaattattaaaaaaactctaaaattaatatctatatagatacaaataaatatggattcttatatattttaatttaaattaaaatatataaaactcaataattaattatttttatatgcagacttatgctcttctatgattctcattttaaaggccaaggccaaacaaacatgtggtttccaacattattaatcatatttttttaaaatgaaaaataaaatacaatcatatatgcttattttcattttagatcgatgacaagctatttaatttaaatatatttagcccaaagtttggatttattatattatattagagccaactaaattaaaattgaccaatttaaagcttttacttataagtttcattattttggtaatgtttaaccggtttcaaactcttataatttgtgtgtaagatatatttatatataaatatatatgttgtggctaataattattaatcaatatatagtatggcattttcattttattttgagtgtgtgtagttatatatgtcactaatttattagattacaaaataacttttgagaaaaaaatataatattttttaaatcctattatatttaaaagtatatatttttcatatatatataaaaaagctatagtatatcgataataatgtcgagtataattgacatgtgctaacctataattaaaggagattattatatataatatatatataaatcaattagttatattaattaaaggtgatgatcaaaaaaataataaaggaatatattactctgaacaaaatattccaatggattattatcttataatactttaatattatataaatatatatattatcacgtgttgtttaattaacgatgcatataatagttataaaacaaattgcaataaaaataattatataactgtcatttatgataagtacaacaattacacaaatatcatccacataagattattaattaagattatatgaatcaaatcaacttttattatcatatatctttatatatacataaaatataattatttaatatatatttttttttttgattttacaaaatattttaataatgtaagaatattttgttaaatttaatgtaaaaatagttttataaatatatatataaatannnnnattatttattttaaattaatttaagagatttttttatttatacttttacaactaatttttgtatttatttgtaaaaatagaaacaatttttataaaagaaaaaaatatttttttttaaaaatacaatatatatgacaatttaactatcactacaaacaaaatcacttttagtgataactttttaatcacaacaaaataaatttgtgactaaatgtaacgtttagtcacaataaaaaagatacttgtgactaaacataatatttaaatgagtaatttgcggcaaaaccccctcaactatcaatttacttacaaaaaaccatccaacctcatattttggtaggaaaatcctccaaagtactattccgtttacatttttaaggtgttgtctgtccagccttgttaagtcctaattttgcccacgtggcaatgacaggtccctaaaaaattatcctatgtgtctatattttacaaaatagaaataaaaactttaagagtaatttgcggcaaaaccccccaactatcaatttacttgcaaaaaactatccaaaaaactttaaggttggatgattttttgcaagtaaattgatagttgggggaattttgccgtaaattactctaaaattttttatttttattttgtaaaatatggtcacgtaggataattttttagtgacatgtcattgccacgtgggcaaaattagaatttaacgaggctggacagacgataccttaaaaatgtaaacgaaacagtacttttgagggttttcccactaaaatataaagttggatggttttttataagtaaattgatagttgaatgggttttgctgcaaattactccatttaaatacaaattgtcactaataatatattatatacacgttagggacaaaaattcatatattaatatgtataaatatatttatttatgcatgtgcatggtgtaaaaagtttcaactaaacgacaataatagttaatacacttagaacgttgttggagtttcatttggtgtcgtttctttttaatttcaagtgcaccatttaatatatataatataatgtgtttaattagctgatgatattgacatgcatgatatattgatatataatcatcacaatcttatctctgtgcttgcttacatctttcaattaatttcactataataacttaaacttctttgtgtatacataaatataaaataaaattaagtagtatat

SEQ ID NO: 49406 - DNA, 1591 bp, Cannabis sativa
ttgtcatttaacaaaacacagggtctaatctgtaatttttgcaaaacacaaggtccaaaatagtatttaccctaataaataagtagaatagtgttaaaaacttcactgacctaatctaattctcattattcaattcaatttaatttacaatttataaaatttaggtatctatatttaatgatttatacaaattggattggcttatattaatatatataatttgtaatggatgttatttaatttattattattattattttttaaaaaaacaaatataaaacttttattaacttatcaaatcaacaaaaaaaataagactgtatctcaagagaaacatcactcttattgagcactcgatttagaaaaaaaaacaagatgctctagtaaaactatgaacaaccatattagcagagcgcttaataaaacaaaaaaatattacttaaagatgcaagaagtttacgacaattttctataataactctaaaagaagagcatatgtaataaatttcaaatagcttggactgctaccaagcagtctgactccaactccacttttcgtcatggttgagttttaatctagcttagcattttctttataccaattgcttcagccaaattcacaatatttttaccaacaaaactacctgacttaaccatcactaatttcccttaaatagtctcgagcgactatgccataaccaaacgcaagtcgatcacgaaaaatgatagcattaacagttaccttgattgtattttcctgcggcttaatccaaaattcaactccattaccaacttcaaaaactaaaaaagaagcctctgaacctctattttgtgctgacaactcatatatgagataagaacatcatccaccgtagcatacttttggttccaaatcaacttatttcgagccttccataactctcagcacaacacaacaacctccccacacttatccttattgcacttttacaaaatttgatcaaaccggcaacaaaaatcggcccactcgaaagcctccccaatgaaaagcctctgctagaattgagcggcaaatgaacaagaaataagcgtatggaaaatagttttcttacttttttaacaaatcacacataatttgaactgagactctcttactacttaattaaattaaggtagacaaacaattcaaagcaatctgtcatactaaattgagtcgacttaattagtattagtattttatatcaataaaagtaggttaatgttcgtttgaattttaagttaattacaaagttattcactttacccaaatatttgtaagatccactacattttcacataaaaaaatacaccaaacaaaaaaattacttcatataccccagaaaaatttaaacaatggccccttacagaaacacatcagaatgttagatttgttcttctgaaatcattaaaaatcgtagttggcatggcttaatgaagtacacagtacacttgtttttccatgccaaaaaaagaagagagaaaattaaattaattgaccaaattgttgttacaaacaataaccttttctaaactaatcccaccatatgcccataaagttgcattaattaaaata

SEQ ID NO: 49407 - DNA, 2591 bp, Cannabis sativa
  modified_base (2412)..(2414): a, c, t, g, unknown or other
ctaagactgacaatggcttggagttttgcaatgatgaatttaacaagtattgtgcaaagatgggaatcaattggcacataactgctaggttgacacccaacaaaatgtagttgtagagaggatgaatagtacattaatggacaaagtcagatgcctcttgatgcaagctggattatcgaaaggattttggggagaagatatactaacaactgcataccttgtcaacagatgcctatcaagtgctattgatctcaaaacaccaaaggaaatctggttaggtaacaaaaattttgaacctaacaaagttcaagcattccttggaactattaggcataagcaatggaggataaaccattgctaaaagagatgacacatatgaatagacttgcactatgacaataagcttttaaggagatttaggagaatattatttgattaaatatccttacaaactcattgaacacgtggacatataactagactcatctcaatctaagttagttacatctagattgcaattcaactgtcctaaccaacttaaccgacttattaaactaccaaggctactacaaatagttgccttctcaactcaaattagatcgtcgcatcctgagcaagaattgagcttcaacagagctagagagaagtaattcaagagagaaaataaaagagagtaagaggggggaaggtggggaacaattttgtaaagaaagattgaaagagaaagagtgagatgctgaaattgccagtcagattgtgacttggaatttccacaccattgttgtaatctaatattgattatagtgcaagagcataccaatttctatggcgggctcaacgaggatgtaactctatgatttagggtgaacctttggaaaatctctgtgtttgttctcttcaactttctgtattattgtgtatgttctttactatgattgttatgtttgtttcatgtttgaatttttaattccaccactaacaaccccagaattcctgacggttttacactgtcgggtaaaaaattcccgacgatctataaaatcatcgcttatacgaccgtcgaaaatactaggtagaataggcaatggtagaaaaatatcggggaaaagaatttttgacggtttaaaaccgtcggctatagtcgatactataggccacggtttaaaaccatcggctatagtatagctgacgattttaaactgtcgctacagtggattccccccaaagaaaatcatcgtcttcatcctcctcgaaaccactactcgcatatgtcgtagccactccaaaaccttcacaagcttcatcctcctctaccgtcattgtgctcgtcttcatcttcctcgaactttcttttacaagcttcggattgcgatcacttgacgatcctcgaaactttcttcggattgtaagcttcagaattcttttgcatacgcacacgcacagatcaagatcaacaaaccaaatcatggctaatagaaatttaaatgataaataagagaatgttgcttacctttgtgctgccatgagagagtggaggagagggacagagcgagagagagagtggaggagatggatggcgcagctcgtgatagcaaatggatggggcagctcgtggtagcaaaggagagaataactttgaaaaaatgagatctgatttttttttttgggaggggtttatatcttaagaggcggaaaatgaaatttaagatgcgataaattaaatttgagatccgtaacgcgttaaatttaaacataggaattgccggaggtttaaaaccgtcggcaattaccatttaaaaatacacgagattttttatggcacgtttaaaaatcgtcgcctatacctccagacagtttaaaatcgtcgataataccttattttttctgacagttttaaacactcgtttaatttttttagtgacggttctccaaaaaaaacgtttttaagactgtcgtgaatactcctttttgtagtagtcttctaacttatctataagaaaattgatcattcgaagtttgttcatatcagtttgtgtttaaagttttgaattcaagtgtgtgtatgtgcaatctattatgtcatgattataacttgtttgactgaatgcaaagatcaatgatgattttgatgatgtaatgtgtatggcgagttggtgtagggatttagtagacatcaacaatatatatttatatagggaaatttgattttctatacttacatatacctaatatttttccctaaactaatacttttctacattgaaaatatatgaccacttttccaaactccaaaaatacccctctcaaaaactcttttttttttcatttttttgggcttttaatgggtcgggtccgatggggcccgatgcccgtccgatgcccgccctatggggcatgtttttgggtttttgnnntcgggtccgatgggcccgatgcccgtccgatgggcctgatgccaaatttttggggtccgatgggtttttttgggtttttgaagtcgggggcccgatgggtccgataccccgtccgatggggtctgatgggcccatcggacccgaccttaaaaaccaaaaaaaaattgaaatttttgc

SEQ ID NO: 49408 - DNA, 1025 bp, Cannabis sativa
  modified_base (788)..(792): a, c, t, g, unknown or other
atttaatttaatatcttaatgtaagacgtacattaatatttacaaccaaaataactataacataaatagtaaattgattttttttaaagaaaatttgggcccaatctatctttgggccctgtgcaatggaacagcctgcacaccattagggcgggttgtgcctatattagactcttttggtatttatttttccattatataattatgttatactctctcaattgagttacacattttaaaataatatatacactataaatctcataaccataaccatatgttcaatatattattattgttgttcatctaattttaacacttatttttattcttactctcattcatacttctattaacttctcaataaaataaatattaatgaaatatatacattaattacgtactcttaatggaataaatattaatggaatatataaagttttaatacttacttttataggacttttttattaaagtttttagtgttttcttaaagataaacaaaaattttcattaatagataaatcggacttccttaggctttgttagtgatggcatatctatcaaaaccttgattttctcaagatttgcttcaatgcccttcgcgttgactatgaatcccagaaattttcctgaggaaactccaaaggaacactttttcgggttaagcttcatattacatttcaggcaggggatcgaacatgttttcttgcgagtttctccagtgtagggtattagacgcttcaggaagaggggtaagttaagccctaggttcattgggcaatttnnnnnactcgagaaggtcgggcaggtagcgtattagctagccgtaccaccagcattatcgactgtccataatgtatttcatattttaatgttgaggaaatatgtttcaaacccgacccatgcttgagttacgaagtcctagaactacagtcagacttatcctacaaagaacaaccagttcaaaatcttgataggaaggaaaaagttcttcagaacaagaccatagtcttggtcaaagt

SEQ ID NO: 49409 - DNA, 673 bp, Cannabis sativa
  modified_base (434)..(444): a, c, t, g, unknown or other
cattcatctgcaagaccttcgcttccgggaagcccaaaagcctccttcaccatctcagtcactttgctcgctcggccctccttcaccatctctgtcactttgctcgctccaaagagtccgaaattgaagaagtctgcaaggctcagtacgaggacttcattcttgctgttgatgatctccgatctcttctctctgaaatcatcactttcagattctaactccaagctccaaactgtcggagttcctcaactttcatcatttgatgccttcgtcgaagctcggaatactggcagaacgtgaatcttgctctcgatttagttgggacttgcgttcggctcatggagctttgttctagatcgaatcaccatctgtcgaatcactatcagtggaattctagggtttgtacgaagaagacgaagaagaaaagaaaaaannnnnnnnnnnaaaagaaaaaaaatattttaaaataatttatttattttttttattttttaaaattaaaataataatttagaccaataaaatttcgacacgtgtcaatttttaaaaagtaaacggctgagttataattaggactaacaggcaaataaaaagcatgaccttgaggactattgccgctatttttggaggttggggactaatctgcatcaaagtgacctttttggggactttt

SEQ ID NO: 49410 - DNA, 2067 bp, Cannabis sativa
  modified_base (52)..(73): a, c, t, g, unknown or other
tgcaacattaaatgttatttctaatctacattaataagtaaatctgattatnnnnnnnnnnnnnnnnnnnnnngcataaaacccaacagtatttatactagataatataattgttttttgcacagttattttaaaaatataattttttttttttttttttgaaagggaactttgttattacaagcaccacaaactacagatcaactttacacaaatcagctaaccacccaggaaaagaattacaaaagaattaagaatttttgttatccaggcatttcctagctaacatttagcaatctcattgttatttctctttataaaaagaatgtttgtacaagaagagaacctctcccgagtcttgatttggtgcataatagtacccatcgtgctaagttagttttccttctcctttacagcttccactaccattttacagtccaatcggatctcgaaagatctggtttcattattcggcagagccttcagcacttcaaggatagcccaagcctccataacagccaccgtacaatagctagggagaaaggtcataccagctgagatcagattcccacaccagtccctccaaacgaacccaattcccacaccaaccttcccaagttttaatgcagcattgccatgagtacacccttgggaggggccaactaccgaacctgttgggaagataaggcagaatgtgggttcgaatctccatacattttggtagtaggactcaggtatttactgaacacccactccagcagcttagttccattcatataaggcatgttactccaatgcctgttttgtttttcccacagagcccataagacttttatcacatcttcaaactcaaacttggagagtttattcctaaagtccacaagcagatcaaacatagagctatcgtcgcaattcccaatgatcaggtaaaaaggaaaaagtttccagaccactctaaccttttcacaggtccatagagcatgagtgagagtttcagcgtacctgccacaaaagtcacatttaggatcgatcttcataccccggtgcattaagtttgttttagccgagagccaattgtgacatagcttccatccaaaaagcttaacccgaggaggcagctgcagatgccaaatcattttccaccagttatgaatactttccatctctgagcacctcgtgggattaagattgatttctcgggccactctatattcgctctttaccacatattgacttgatcgctgtaaatggctaggccaaagtgtcttccatattagggtctgtgggagtgcccataatccaagggatatcatccttgtggaagtatttttggagaaaatccatgttccaatctccatcaacggtcatgaggctatgggtggttatattaggtcccaacccagaattttggtggagcatggcactagtgggccggggtagccatttatctctccaaacccgaatgtccctcccatttttgactttccatcgggccccttccttaataattttatgaccccacaaaatacccttcacacacaagaagcacccgtggggcagctggcattcatgaacgaagagttaggataataactactcttcaacactcgggccagcaaggagtgtaggttgtggataaggtgccaaccttatttggccaataacgcttggttaaattcagtcaagctatgtaagcccaaacccccttcctcctttggcctacataacttgtcccaagtgctccaatggagtttcttgttgtctttagtatctccccaccaaaaattggcagctaaggtatgaaggtttttgataagctttttaggaagcctaaaacaacccatggagtaactggggatgtcttgcaccacgaccttaaaagaatttctcgtcccgcttgagaaaacatagatgccttctagccctttagtttattccaaactttgtctttaatcacgtcaaacacttcttttttcctccgaccaacataactaggcagcctaagatatttggcatgatgaggcacaaaacgcacgcccaatctagttgcaagagtttgaccataaa

SEQ ID NO: 49411 - DNA, 1217 bp, Cannabis sativa
ggtatatttaaattatttttttaacaaaaaaataaaaatttaatgacttgagccaattaggaattaccacgtggcaatttacttaacacttaatagcccggtgcctacaaaagttttagaattataacttaggtattattactgctaaaaattaaacttaggtatttatttgcaactgggagttaaacttaagtatttatgcggcaaattactctaataaaaaatcaggattacacctcatggtcattataaataatgtttgtcgggatcgttgacacttcgaccgtaccattaaggtttttggtgaaagcccatcgagcaacattataagcatcaaaattacaaagtctagaaataaaagcaaaagtacaacccagaaaactacacgagagtctattacaattcaaaatatagttgtcaatacgccaaaaggaggaagttccgatcaaagctttgacaacaatctcagagtcactctcgatcaacaaaaattggtgcttccacaccttagccgtttgaagggcgagaagacaagcctccacttcaccaatcagggaatcagcataggtaaaactcttggaagcaattcacaaaatagatcttgcatggtctcaagccaacgccacatcacacattgacccatgccccactttaacgtcacagttgatcttaatccaatcatcaggaggaggagaccaatgtagagtagtcttagcaggagcatgcaagagtaacgaggccccataatcttcataacaatgagtgatagagtcaatataatgtttgatgttattcagattattgttgtgtaccttgtcattacgagcaagccaaatggtgtccaccacaatagaagcaaagagaaacacttcttcaacaaccacacccttcgaatgtagacctcaaatgaattgcactcagtcccacatgcgccctcctgaatcaagcaccgaaataagaccccaaggggaggccctccaaagatgggaggcaaagtcacagtatagaaaaatgtgcttcatcgatttctcgccaaccccacatataagacaactagcgtcactaacttgcaatctcttggccaacatagagcggatcgagagggccttggaaagaatacaccaccacatgactttgtgtagctccaatactttacagttccaaagtttattctacatgataggagctacctcacaaggcggggcctggtcaatcgc

SEQ ID NO: 49412 - DNA, 699 bp, Cannabis sativa
taactcgaagtgtgactgagaaaatataatgctgttggagatgttatctgaagactctcaaacactgtctttcaatatttatagtagccaatcccaaaccctttttatttagaaagttaaaaaacagttgttttttgatttggagggttgtctgtgaaaatcaatttttaaagacgttcacatggacatttgtgaccgttcgatgaatcacggggttcctagttggattttttgaacgttggagcgcactaagattcaaaattctgatacagtgtcacctcttttagtcctttttttctttttttcccttcacataaatcaacctcattttgctagtccacaagtttcatgttgtgaactagtatcaattttttctgcccattaagaaaaataatcattttgttcttctttggctggaagtgttagtaattgtgtgacctttaatggattttggctgcactctaaacgttcatgtgaggctagtatttttagaattttgatctgatttgtatttgtttttgtctctttttaatactaaactactaaagaaaatttgaactttgaaaatgagcatctcagaatcgttttaccataaagtaagagagtgctgacaatgcctacattaactagtctttaatgacaaaataataaaatgttttagtagtactgtatgtaagtgtatttgctattttttttttt

SEQ ID NO: 49413 - DNA, 1525 bp, Cannabis sativa
ttattatataaaacaataaaaattgtataaattatcataatctaatgttatagttaaatattctaataaaataataaaaataacataaaaggaaaggaaacaaaaagaatcgttcattattgtttattgagatttttggaaactaaattaaagaagagcttaagaaattatagataagtagttaagtaatgagatggtgatttttccctctaggtttttcttagaagaaaaaaagcgtcaagagaacctgaaagtttttctgtcctcccttgcatgaaggggtaaacgggtttttataggcttagattcagatctcggcatacatgtgacccatttagggtttttgtgcaaaataggccgactagtgggataaatacatggaatacatgagtttgaggcctactataagattttggctcgtggggcgaaagtatctgtacaaatggggcccacacggtctggacaggtgtaacgtgcgggcgctgctacagtagacaagagtgtcagataggtgtcactggacaaagaggatatactccctttagtggtgcgcaccatatcatgttctgagaggactgatttggtgggaccagacgtcagaaggcagccatgtcaacctacaagaggcttttaaaggcgcctcttggacttcctctctggatgtgtctcatcgattgtctgaaaggcttcgtttgtttcgtctcctggaatgttggacggtcttttgaaagtggaggggcctcgtcctcggacgtgaggcttttggagtttagatgggctcgggcccatcttcgatctagactaggctttttaatgtgggaaggcttgggcctaaacttatgcagactaattatattttgaaaatgtaacgtgttgtccatccagaaatatagataatagttatggtgatgtaaattctgcattgaccaatattatgccaaatttagctatagaaaaatgataattttccccaaattaagacaagaaacctaaaacagataatacaatacttagcttttgtagtgctccgtgatttaataaataaaatgaacaattttcaatgtccaattagttttttttttttcaggaagttcccagttacacattattttttatcatatacatcactttcacaaatttattgatattggcctacatggaaaccaccatggacagaagaactcgattattcatctcattttggtcagctaaaatagaacgtactagaatttaggtacttggaaaagcaagagagttcagtgaattattagtgaaaagagagaaagagaataaagtaataaaaatactctatattataattgaatgaaatgaagaattacaagtaattataaaatgagatacaagatagctaagctacaaaactgaagtcacaaaattataacaaactcttaactaacaactttctctacctatagacacttaatactcccctaaagatggagcataactattatgagtctcatcttgtctttgaggtattaaaattgagttagaaaaagatcct

SEQ ID NO: 49414 - DNA, 1539 bp, Cannabis sativa
gcacttagtgcggattggatgttgtttgaccaaaaaaatacggattggttcagatgaacacccctaatcactcctccaccaagtccttctcaacgatcttatgacactaagccccgagaccctacaaggggaaaggggcctactactcaaactgatggaagtagtatgagatactacttcgagatcgggggctacgagatccagtagggaaggaccaatgaaccatttcatactcaaaaatactttcaagataaaaagggtgaattgtgccgttactttgcctgtggccttgattgccagcaatatgagtacttccctcaagtacatggagaggagttgaacttgagcaaccagttcaattctcttcacacttgtgatccaaatgaagactactttgagggaagtagacactacaacactctgtatgatcactcccacagcggatcatcccaagatgatccagagttcatcttggagacatcaccagagctgcctccacgatctcgtggtcaggaggcaacaacaagtccaagtcgaccaaagcacatggtcaacttggaagacaaagagacctgcgtgacctcttaactaggagatagttggtggaagtatgagcttctagaggaggccctacctaggtaatagaagttacaattgggatgcaaaccaccacgtatggggtcaaccaggcagaatttaatactttagtggccttagtgaaagggatcacgacccctaaattgtcaaagttcaaacttgataaagagcggctcaccactttttgaaagaattaaagatctttctatcccttcaaagttcaagaacccttcctggcatcagtatgccgggaaagaagatcaactatctcacattcgctacttcaaagtacaggcccatctgcaaggtgtgagagatgatttcaggtgtagaatcttccctgccacacttacaggcctagctcaacagcggtaccataagctctcccctagatcgattgactcatggaaagatctagtggattcttttggtaactaattggccctttcccgacaacgccagatcaaacataatgatttggtggatgtcaagcagtaggaagatgagcccctcaaggactacatccaacagttcttacaggcagctgctatgactagaagtcttaacgaggatgcaagggtaatggcacttgcatctagactgaaggtgatgagtcctctgtagtctaaccttcatcttaaggctgtttacaccgtgaatgaattcctagataaagcagacaactttattaagttataagaagtcatcacccaagccaagggatctcaaagggtggcaagaagaagtcacgagactccctatccactgacgctaaggcacaaggcaatgggaaaagaggcagaaccaatggaggtaagagagctaacaatggtggtagccaggatactccccaagtgggaacaagccatagactaggggcaggcccttacgagagtgtgagcctcactttaccactccatcctcttggctcaaagagaagag

SEQ ID NO: 49415 - DNA, 3141 bp, Cannabis sativa
accatttctctcccttgatttcctataatacctggctgaatatcttcattcaatccccccaaaatagcatagttattaccttgattcactgcctcattcacggctggaattggtgctgtaaaatcgtcagcattgattgatgatgattctccactccgagctgccgcacctgccattgccactgccggagtccaacctttggttcgaagccaccgtgagccaacattcttgtggtttcctggaggtaaagccttcatgaattcaccatacggtttcgctagttgatcaatcggctgatgaaacaatttaggacaatatttgtctgaatgtcctattatgccacagataaaacaaaaggtaggagtcctctcatatttaaaatttatccaaaaccatgacccatcatcctttgtgatcttcaaacgtctgcgtaacggtttttcaatattaagagttattctcatcctaaaagataatccctccatactcaataaaattcttaggatccgactccaagtatttccccattgtattcccaacctttcggagagtggtttctgtcatgaatcctggttctacattatgtaattgaacccaaatatccaaagtattcaatggtaaggactttggatcaccaccaacattaagcctttcgattatcaattgcattcgataataagtccaaggacttccattgatcacgcgttggatgtcaacctcgtgataaaattggaataaaaaacgattagtatccaactgcttgacgaacatccccatctccggttgccataaagaagcgagtatgttctgcattttttcaaaatcgattactcgatttgaaaggaatttgccaaccaagcaccaccggtcatctattccttcctccccatcacccgctgaaaccagaacagcttctaagtcctcttcctcgatctggaaacgcagagtctcatcctccattgctccagcatttcgactagacgacgccatcctaactagcagagaacaagcccacgccaaccccactcaagaacagaacaaaaacctgacagactttcacaggaaataacccccagtaccaacaatcaaactcacaaaatcactcaacttatgacaaagaaactaaagaaaccatgtctattgacatgaacatatattgattacaagagtcttttgttagccatatgattattttttttttaaagaattaaatatttaaaacaacctcaaatataaaatttcacaaataaattaatatagttatagagtaattttatagtttactccaaaatagtatatatatcgtgcatttctttatcttttggcacgcataaactagttaacaaagccatattttgcttctcaatcttttcctttctactttttaatttctctctcatctctaatagtaggttcatttttttttggtttagtctcactattttttcatttttcatttttcatttgaatctcactctcatctttcatagttggtttattggtgttagtggaaaagttagggtttttcatttatgtcgagattgtgttgaatgtgttgttgtcgagatttttagtttaatttttgtgttgctacgacgattaccagaagcttaatttttctgtcgcctaagttttttgccctgctctttcttttatatgaaacaccacatttagatgaaacctgcttttaaactttcaaaagtgtttttttttaaccaagccaacttaatcttgcaaatcccaaaactctctcaagcatttcaccttttcaactcacttttgagcaaaaaaaaaaaagtaacaaatattgctgtaatatatttagggtcctcaacactacatattattattagtgtaatttaataacgagtttgatgtattttaatttaaatctaaatgtatgaaattctatatttattttgtttatttgcaccaactaacactataaggtttaatttgaacagtaaagtgagtatagtagagtgctcttttaatatgaaaaacaactaattatttgatagaggtggcaactttacatcaatatattgatattattatatgtgaaaatgatgctttgactacaattttgttgtgacgaggtcaattggctaaaccagttcaatttaagtattattaatcaaaagccaagattttggatttagttataatcaacaaattatatttggtattaatttatatatatttttaaaatattgaatattcaaactgtgttatctgatttatcattttaatgaatgattgaaaaaaatagatcggtgaaatttatatataatatatttttttacattgtaaattatagcaaaatagtcaaaattatttattagtgcccaagttggattttgaatttttgatgttgtaaattgtaataatcaagagtcccttccaacataaaccatgttttcagccactcccttactgccctccacaactcttttttgttttatttctcatgatttttgttcaattggagagagaaattagaaaaaagaaaaatgaaagttgataatatatataaatatattttatattaattgagactatatatatcataaaaagtgttattattatttttttaaactattataatttaaatttaaacttaatatacatatatctttatcttatatgtagttatataacataaaatatttattaaatattacaatttaaatttaaactcattgtacatatttaaaaattatctttccattatatattttttttaaaaaaaaaaatagaaaaagtgtgatattttttaaaaaataaaaagtagtacaatttgagttgaaaatagacacaagttggtattggaagaagttgtgcaatttgaggaaaagcttctcggttcaagacataaaagctgctagtacgaaagggatttttagagcttccaagctctataactctcagattattcagcagccgaacccagttccaagggctatttggtgtggactgaatgttccaaaacagagtttcatcttgtagcagacatcccactctaacctactcacaagagacaaactcaccatctttcacataccagtaactgatacttgttgtgcagtttgtggttatgatagtgaaaaccatcatcatttattcttcaactgcaggttc

SEQ ID NO: 49416 - DNA, 2444 bp, Cannabis sativa
ttattttgatatcttattagtattaacttattgtagcaatccaagaacgcggtattgccaattaccacaaaataaagatttttttttttgcaattacaaactattatctaagtagagccattgcttatcactgatttcataggttttatctacaaataaaacttggtagaatatttgtagccagaattttcaaaaaaacaaaagccaaaatttagcacaatcaatcactttctgatagaaccttggtgtgttctcacctttgtttgtataaaatgattctataatagcttagttatccaatcgaagtcttctattatgatttgtctttaaatttcatctttattttttccttaagatattctgactagattgcattaggggtggcaatttatgtttgcgggtcgtatttgtgtcgtatcaagacccatgtataacaggtacatgctcgacctgagcacgacccgtttaataatcgtgttaaaaaataaaacccgaacacgacctgtttataaacgggttgacacgacacaacccgtgtaacccgtttataagcatattttgtttaaacatgtcaattaataacatgcttatgaactattcagcacgtttataacccatttatgacacgttaaaatactaaaataattttaaataagtcaataacgggtcaatttcgtgttagccgtgttaacctgaacacgacccgtttattaaacgggttagatgagtcaacccgaacacgacccgaacccgctaactctcatcaagtttcgagtcgtgttatcgtgtctgcccctttttgtcggccctaaattgcactaccctttaacttgtgtgtgtgttttttttttgaatggaaattatgacattttattacattaaagactcaaccattacaatgtctagcaattctacaaggaaatcatgaaaatgaaaaacacgagctgacgaggaacaagcactttgtgcaataaaatgcgcaaccttattagcagaacgcttaacaaatcttaaattgacattacctaactcaacaaggagttgtttacaatcccaaaccagtaaaccaaatgcagatggcagcttctttacattgtcgatgccttgtacaaccaccaaacaatcagtttcaagcagaatactctaccatcccttaccttttatccaacttagggcctcctttataccaaaagtctcagctatttcaattgtaacatggccagggagactcttcgaacaattagcttcaaatatagccccatcaacattaaccttaatcatattagccacaggtttagtccaatgctctataatcaatccttggttgttatgaacaaggagagattccaactggttttgttgagcgcaataccattgattaaagtgagattttgctatgaagactacatttgctgccaattttgatctttgattccatagcacatcattacgagttagccaaatttgccaagctatcattaaaatttttgtagaagtataggcattaccactttgagttacatcctggaaccattttttgaaatccccatctgttgcagcaacagtgctgacagcagtcctatgccagcaggattgagcaaaaggacataaaactaaaacatggatgatggattcttcattaatttgacaaacaaggcataaaacattaacaaatacatgttttgtttgaagttgagacttagtgggcaaacatccaatgatagctctccactcgaagtgcaacaccttggcagacaccttaattttctagaacttcttccaaaactcattattttgtaaatcaacatcaacctcctgttgcaagaatctataagcactcttcactgagtaataacatgatgcatctctaatcaaattccaacaatcgattacatttgagttggtaagaggaatctccaaaatcagtccatggtctctggggttaaacaagtcttaaaaccacttcaacatcccaacagtgatgattaacttgtattagactagccactttattacctattaagcttgggtgtgtagagcatacaaacgactgttctaaatcaagtaaccatggatcagttgtgatcattgtgttttggccattaccaatttggattcgagcacctgctttgataatatcctttgtttcaagtatgcttttccatataaagctaggatttttcccaagtgcagctgtgagaaaggaaccattgggaaaatatcttgctttatatactttgcaaaccagagaggattcatcagttagcaacctccaagcttgttttcctaacaaatcaaaattgtaatttctaaaatccctaaagcccaatccaccagagatcttatgcttgcaaagtttcttccaactaacccagctaactcccttcttgctcttagaagactgccaccaaaagtcactcataatgctttcaaggctttgacat

SEQ ID NO: 49417 - DNA, 2090 bp, Cannabis sativa
gcatctattctattaagtcgggtattcgtttagtagctaccttagatgaaatggctgattcttacctcctctcaaataatcaccaaagtttgtggataaatttttggaatttaaatctgccaccaaatattaagatcttcgcttggagggtcatccaaaatgcacttcctattgcacctgctcttcataaaaggaaagttattgattctacaacatgctccttgtgcactcatgcttgcgaatccatagggcacattttattcacttgtcggtacgcaaagtcagtatggaagttttcaaagtgtaagattaactattagagagctcactatatgcaagatgaggaatatgtgattcatctatctttgttgtactcaaaaattaaatttaaaacactcatatgcataatgtgggctatttggacataacagaatagagtattaattttatggaggtactagacgagatgggtcatatgttgcctcttatgtaatcacatattttgatagctatattttgattagaagtcgaaggttaccaactattactggtgtggtgcttgctgcaacaatgcaacatacgagaccgactgaggaggttccttagaaaccacctgatctaaatgggttgaagctgaatgtggatgcaacgatgaacatggacacaaaattattagggattggtgcagttatacgagatcataatggacacgttatcgctgccttatccaaacctgtccaagaaagctttagatcagatgagatggaagcaaaggctcttttttatagcatcaattgggcgagcaactaaaaaattcctaaaactcacattgaaactggtgctttacgagtttcaaatgcattattaattacatctttagatttatcttcttttttagatttaaattcaaatgtacactatcttttaatctttttttttagagttattatctctcatgttaggagacatatgctaatcaagtagcacatgaattagcaaaatatactctaaaattagatgaagtcgtctgttggatgggtaaaatttcttattctattttctctattgttataaatgacttttaatttataataatagttgaatctttctcaaaaaaaaaagtacacttcaatactaattaaatttttcaaaaattaataggaaaaatgaaagttacatacaaaaaaattaagcgtggaatgtttacaatattaaggagagaaaacaatgaaatttataaatatattacttcttctactaattataagtataagaacagatttgtatataattcgttattgattcatcaatcttgatttcctctccttggataggagtttggcaaaattgagaagagcttcagcattagtaccttctccttcaacaatctcatacttacctgtttccaaatttaccctcgaaactggtttctctagtagctttgtcccgatatcaacaagtctttgtagattctcagtagttgctatatcaaccgatgactcattcccaaccaatgtatcatcctgatcaaaataatcaataataattaataaacatttataaaaaatcaatatctattaaaaaattcttaagtaaaaacatcatttttactttgagtatttttttctttttgctataatattagtatatattataattatagtaggtatattgttcattatcgaaaaatcataagtaatatgttactgaaaatgtaatttaaataatttattgcacgtatacctactttattttatatgcatgtaactaaatattttgaattttattttcgatgtcataaattatttaaaatttctcgaaagtgtacagattgccgctataattatagtttatactgacatcaaataaaaaaaattagaatacaatttcactaagtgccaaaaacagaaaatattttacaatgggaggaaaagtgatacctttaattaagaagctcccatatagaaaaattatatataattagataatagacaaacattctaataataataatattattaattgtatttgtacctgaatacgaaggtaatttttcttgtgatgttgagattggaagatagttgatacaa

SEQ ID NO: 49418 - DNA, 1687 bp, Cannabis sativa
tttttagtagcataagtatccaatgtttgtaaaactgtaattttgctttattttcgtcttgctctgttttaaatttattaaaagaagatttagaagtagatactaaatatttctgtctaaaccaaataatttagagtttgggttttatatgtgtcatgtttaagacgataacagaatctgtactaatgaaactaatgaaactgaaagaaaattacagttttataaatattgggtacttatgccactaaaaaaaattattgaatttatgacgcttacaaactcaaaattttaggtacttatgtcactatttagcgttaatttaaatatcaaacttccaaaactttttttcaaatttaaaatctaataacatttttgttcttctattttgattcgaatacagagtatggatacatgatgaaaataacagagaagagcgatgtttacagctatggagttgttgtgttagagattctaacaggaaaacaaccaattgatccaacaataccagaaggactacacattgtagattgggtcaaacaaagaagaggatccgaaatcgaagtacttgacccgagtgtccgagcccgacccgaacccgagattgaggagatgttgcagaccttaggtgtggctctactttgtgtgaaccctgggccggatgaccggcccacaatgaaagatgtggctgcaatggtgaaagagataaggcaagaaagagaagagtatgtgaaagttgatagtagtcataaacaacaaaacattgttaagaagattaagggttcttctagtttggttggtccatcatcaacaactatggctagtttctctagatcatcttcttctttgatgtactcttcttcttcttcttccattgccaagtgattattgttattatcatttgttattagtgaaaaaaacaaaaacaaaaaagttgttattgtttttttttgttggaataagtctaataattattataagtgcttaatccagattgatttttagttttttttttggaaagaaaatttcatttttaatggatcaaatcaagtgttaaatttcaatagctttatattatcaaataacaatcaatacctacaaaaaccatctaagatcaattatttaagtttagagcattgcatttacaatgaaaaaacatacaaatatttggatattgaatatttaagagcaatgcacctatcatccatacttctaaatattgtacacttttctatctacacaccaaaaacaagacaagaatataagcaattttgatgaacactactcttgtccatgtagagtggacatagacccctaacatattagtactgccatctttatccaaagtagtgccaacgtatatatggtagaaattacacaatatacatcacatatattttggggataaattgaaaaaatatcttttttttatccattaatcaagagtactctcatattatattttattaaaatataacaatctttttgagtgggttacccaatatatcctcactctctacttaagtctagcatataatttacattaactaaagatctaataagaccatcatttataaagttggtatattttaaaagatataaaaataaacgtaaaaattaaaacaaataaaataaagtggatatacaatataattttctcttctcatgtatttctgccttagtatgtata

SEQ ID NO: 49419 - DNA, 1636 bp, Cannabis sativa
cgtcagagaatgcacagaaagtaatagctcccaacgaagaacatacctcgaacctgatcattgatcttataattgctccagctacagagatgaaagaaataagccaaaggatgactgagcaagataagcacaatgaagagacgcgacatctcgtaaaagaaaagttcagcaagaacagtgcattacagaagagaggcgtcaacatgatcaggatgaaaatcatcaacatcatcaggacatcattaaatttatgcaaaagatgacagatgcgtgtaaaaaggtggacaaagtacaaactcagcacaatgttgggcaaacaagttatttaggaccaccaaaaatacagtaaaaaatgagaagccaaccaaaaatggtagcaaaagggaattaagtgttggaaatattattataagattgcaagtaattcacaaattttcattatttcataatcaaataaaataaggaaaacataaaacaagtttctaattgtttaccgagatttttagaaactaattaaacttaaagctaagaaattaaatagactaataaagatggagataaatctttttacgtggtttgagtgttaattaaccctaagccatgagtcacttgtatttggacgaatgaccttaatgtattataatagaattttacaagctcaagaactctaacttcttgctatagtgttttctcattttttggttttctaactccttagattctaaccctttgcatgaaggtataatatcattaatcaaattcaaagtatctttattttctggttgcgaccagaattagaagttatctttcgaaatagtaaccacttcaattagtgatcttcgggcatgtcccttggcgaagagaaatctaatttgttgtggttcagctcaataagtaaagcgagttattcaccccaatttcttcaactcgctgagttttacatgttattaaggggtttttcatctcctctttttcttttcccgctaaattcacttatcttgttagaattaatgggaattgtgtcaattatgttggtggcaacattactgaaatcatatgccatttcagaattagatttaagtcatttcaattttgaacgagcttcttcttttcgtatgtatataagggcttgcttttttaaactcaataattgacctgacaggtctaccttgtaagtcatcctatagctctccaccagctgcgattctaacttgcaaggcagttaattgaatactatcaatcaggtttctcgccttagctactgctgtgttaaagtgatgtaaaaatgctttcagtgatttaccgagttgttgcttcacattagacaacaaaaaaagccttgggttttctgcttctcgtagtctgaaattgtttttgaattaatttttgagatagttatcccaacgagattattgaatgtcgagtaaacttataaaaccaactttttgttgctcccgttaaggaagttgggaatagcatacatcgcaagcttaatccaatattgcttacttgcataatattattaaattttctcaaatgctccactgggtctgtggtcccgtcgtaaggagcgacatgagaatttttaaatccccttgggaagctgtaacgccctaatgctaaggcacgctacagt

SEQ ID NO: 49420 - DNA, 2147 bp, Cannabis sativa
gtattataaacgaggcacaaataaaccttgaaaaataatacttaagctaaaatatgaatagaggattaacaattcatatgagcaatcaaaagatattcagaatagttcctgagatgaattaagtagattagaatggctcgcaaaaaaaaaatggtagattaataactacttgtatatctctaagaaaataacagtggaaatgcattcaacccaaagtatcttaaattgagatatagatgtttggattgtgaaataaaatgcaataaacaaacatatttaaactcaaaaggcaagatacgaggcataaaaagtaatataaatagcaaagttggtcatccaacaatgaaaaggtttttacaaaatgccactaggggcaaccattatctcgaccaaatggccatatttctaaataaaatatctaaaatataaaccaagcctacatggttggagactttgatagttcctcttcttcttcttcctcatcgttatccacaacttcatctttcttggtctgctcgcaataagccagcatctccgcaccaccactctctaggaagctcaaatccatattgggatcggttaaccaagctctatagatagagcattttgtgactatattgcacctatctttggcgttggcctctacaccctcaagctttttattggcttcattgagttcttccttttggtgggcttcgcgatgatccttggcttccttttgagcaccttcaagctcagccttatggtttctcttttgttccttggcctctttcatcaatctggtgtgctcagactaggcatacttcacgttgttcgatggatctacgaagctcaaattccaactgtttgatcttttgaaggcctctctggtgtgccatgtcagatagcaaagaggcctacagtaaaattaaagtcaaaagaaagataggaacataaaataaaatacgacagtaagaaaggatctaaccgagagattgaggttcaagcttctctcaaataactccttaaagttgccattattgatcaaatcccaatcacctgattggaaggatttgaaatgacgccaacttgaggtggcatattgtgagcaaacctacgagccggtaattctcgcatctcgtggtaaaggacaggagggctccgaaaagaccatctcgggctctggatctgagaatttgacttggtgaacagatcgtaagacatgttcttcagtaccttcagtagctaggatcggggaatgaacttgatcctcagttggctcgataataatttgttgtgtggcacgctttctgtttgtcgtggtttttctcgatctcttcacaggttttgtattttctcccaatgaagcctcagttgcagcaattcttttctttcccttttttcccgaggcattaacaagactctcgaagtccatatctgcaagcaaaaaaagaaatgagttaacacttgttcaaaataaataataaaaaactggggaataaactcctacttaagagaatttaccataatcatcaaacgaggagaaagaactacaatatgtactaaactccctagagccagtaatcatatatatgtcataagggttaattagagacatatcccaatcaaagtctggatggctcgctctatccaagttagtaccatattgttcggcaattacaaagtaggagctattacaatttaattggacatgatattgaagataccaactgtcaaacctatgagttatgcagtctacacaaaaacgatcccaaatatagaagtatactggctatccttaaacttaactagcgaggtacgctcaaaactaagtacaggaggagaccatccgcaatcattacctcgggatgcttcctcttcagcttctcgagggggtgcattcttccagaaatggatgcgagcaacatagtctctatcttcctcgttagttagaattgggacttgctgccacttagaatacttttgattcttatagtcgaacgtagattgattgcttatgagaagattacaggtcttcatattggtcttgtaacgccctctccaacagggacgccacatgtgtgtgattttataaattcctacttaaatattatataattataccaaaagtgtgggtaattaaattttgataattaaagccaagcata

SEQ ID NO: 49421 - DNA, 594 bp, Cannabis sativa
aatgagttttatttatggcataaaacccaacactagtttaggttgttttagtgttgtatagcctattttggagttattagaagttagggttgtccggttttggttttagggtttgtgtcagaaattggttaaagtatttactggatttcgttatcatgacatagcacctgcgattatcgagcattgtttccattcaggttggcatgcacatatgatttctggactaaggcaagaaaagttttatgcactgctaagtttgtcagataagaaacgattataatcgttagtgcctcgattatgatcgagttaattatatgtatttgttatgcctcgattatgattgagggatagaaatggtcattatcgttatgagtaattactcgtttgaaatcgcaaatggtttcttacttatcgtttactttgggcaatgatagtgacatatgtagctcgtgaaataagagtggtaatggtgctttatgaggcactgagattgtctcgtcttgtagacgtttaattgattatgcattgttgaatatatgttgaatgatgagtatgtatgttataatttagatgtgattacttatattttacact

SEQ ID NO: 49422 - DNA, 886 bp, Cannabis sativa
tgtggatgaagaacaagtattggaaaagaattgaagccgaaaatgggaagaggcgcactttcagtactctttatatacagttctggaataaagatcgaacaagtttacaggagagggatttactgtacggactaaattggatggttctgattgtttttcattggcggtgatttatgctccaattatttttatttttatttataaaaattataatattaataataatctgaaattttggtatataaatagataataataagtcgctatcttgcatttagtttaatttaattgtgggtgcgatccaacggttgagattacttcgaatccagttttagcaagttgaattttgagggttgagattgaaagtctggtataaaatggctgcctctcgagttcttttctctacgttttaatttaatagtgaggaagattaaggatacaatttagaaccacatgggtcaggcgtgatgggcatttaattttttctgaaataaaaagcatagaaatcatctattttattacaaaagaaaaaaaaaaaaactctaatacttacatatttcacatattacaaaaaactctacactattttttacactatcaacaataaaatccagcctttgattcaatgtcaattacttagcacaattagtcctcaatatgatagaattcccaactgttgacaaaaaaaagagattccaatgccaaaacaataaaatttcttgtaattacatctccaatatctgtttgtattggcctcatgaatttttttaacagacttaagtaaattcttgtccattttcaccttatgggcatttaattaataattaatatataaatctaatagttaataagtatataatttacatattatgtacaatacaatcta

SEQ ID NO: 49423 - DNA, 1499 bp, Cannabis sativa
ctgtgaatcgagaactttccatcatcaaaacatttctccttcacaatgtgccacaaagcagccttcagtatcgtcccactaggctccaatcgacagtgcatctaacatggtaagatatgtatatccaaatcaaacaaacaacaatgcagtttgtaagttgaccatatctttaatttttgcattaaatcagtttgtaaaaaaacattaagattacctcttctaaactaccacaagtagttggcggtgctactgatggagcagttgcctttctgacacgcaatggtgatggagtaaagacattgacaacactcgatagttgtgctacgagatctggtggagaagagacattcgcacgacccgatgcctgtgctatgggatcggaggaaaggccagcatgggcatgttcattcgatgctcctccaacaccagaagcagatgcatgggcctacaatgctactatgctgggaactaaccggacaaatgagctcatccactttctcctatagttttttgtttctttactctgtctcaggaacacgtatctccaaatctgatgatacttggttcaacccatccatatttttccttttggtgtggtgtgttgaaatatttggtcttagtgatgctaaaacccatggctcgaacccggccaccatgctcatctatccctagtgccaaggtcaacacgtccttcttaccttccacttgcacaactccctcttccacttggttacaaaagtcatcctacaaacataacaaatagagttagaaataaattatgaaacataaaaatacaaatgaaattatactttaaacttacaatccattgaacaatttccatagttgggccctccacctcgccgttcgtgttcatgtgaagtcctttcaatatttcagatctataaaatttggtaatttggtggcctacctctttctccatttgttcttgaaccatccttacaccaccttgtttggtgcgatggttgtaaatatatttttccctactctgttgggccattttcctcctcacttcaaagtctggactcaatctcatagccacaaactctctccattgctgtaaatcaattatgctttcataaagttttggtggcttcttaagaagttggggagccacatctttgaatttaaaaataccatatgttaggggatttttccaaatcttccacctctctcaacctttggaaattgttaatttcctatgtgtcttcggtatattgaacgtggcctgacaaattaaccatcatagttataagtacgaattacaatcaatagtgaagaactcgaataataaaattaattttacctttatgtcatcctataatttgtttttaatatcctgactcacttaaggccacgatatgtctcgaagtggaacattcattcacacccaagttccaatttgggtaaccttttgttatcccaaattttgcactctgacgtggcatcacgagaatggcgacacgtggagtccacttgga

SEQ ID NO: 49424 - DNA, 1942 bp, Cannabis sativa
catccaatactccccaagatactgcccctgcaacaaatgcagcctccaaaaacaaacgccctcgaccacattgcaccaattgtcaaaaacctggtcactacagggaaaaatactacttccttatcggatttccacctagttatggcactcaaaaaccaagtgacaaccccacaacaaataccaagaaacctgaaactagtattcaaaccagaaaccccgaagcttcacaaatttccagcaatactgatgtgtctaatccacaacttacccctgcccaatgtcaacaactcatctctatgttgactcaacaactgcagcctactatagatgcctcaacatcaaatgacaatgttgccatcaacaatttctcagatatttctaatccttttttcttggatcattgacagtgatgctacacaccacgtttgctgttaccttgaatatttttcatccattcaatctaatactaaagtgtttctgtccaattacccaatggcaatagagctagcatacacaaaatcagtacagtcatcattaaccctcacatcactctcaagcatgtgttatttgtacctaatttttgctataatttactctctgtcagtgcactcacacacaacaataaagctttagtttcctccaatactaacaattgtttaatacaggaccattctcagatatcaaggattgggacagctaagcgtcttggcaatttgtactacctacaacaacacgattctgaggacaattctgctatacaaacttgtaatgtacatcataatcaaatccaatggcacactcgccttggacatccatctgtaaatattactaataaaatcaataaacatttacaagtttctgaaatttctacaccttttaattgtccaacatgtcatattgcaaagcataaaaagctgtcatttcaatcaaataacaacatatctcccactatttttgaccttgttcatatggacatatggggaccatattctgtcccctccatcgaaggttatagatattttttaaccatagtggatgaccattcaaggcacacttggttataccttttaaaagctaaatctaatgcccccttggccatccaaaatttcttttagcagatactgattcaatacaaaattaacattaaatcagtccgtactgataatgccaaggagctaacccttactactttctatgccaccaaaggtgttatcaattacaactcatgtgtaggccgtccacaacaaaacgatgttgttgaaaggaaacaccagcatatcctcaatgtggcccgtgctctttccttccaatcacacttacctttgcaatattggagttatatggtcaccactgctctttatctcctaaacagaaccccatctgtcttattaaaagacaaaactccctatgaactccttcaccacaaacaacctcagtataatcaccttcgtaacttcggttgcttagcatatgcatctgttgtcaattccgcaaataaattctcacctcgagccaaatcttatgtcttcattggctaccctcataatatgaaggcttacacccttcttgacattcaaacaaaccacatcttccattccagagatgtgattttttatgaaaatgtatacccctttaaaagttcaacacaaccacagaacatcgactagtttttttccaaaactgagactacaaatccacaaacaacaactgagatcagttcaactcaggatcaacaacacaagaactcttccaataacaacctggcttttgaaataacttgatcccaagaccacaattccaaagacactgcaccttcacctacaaatcttgagctcatacctcagtatcaacctatacctgatactacaatcagaacaagatcagggcgcataaagaaaactccaacatctctcaatgattaccaatgtgccacaaccagcac

SEQ ID NO: 49425 - DNA, 3161 bp, Cannabis sativa
ttttgagatggaaccccatgattatcaacatggtatcagagccatatcccttgcgggcaagtgatcatatccgcaagaagaagtgttcaacctagcaaggaatggaagttttggagtaaaaatttggacaataattatttaattgtgtcaaaccttgggttacatctttctaactcgtaaccttgtgttttgtttgatctaattatattttctactactataatctctactgtgaatgtttgttaatcaattttgtatctatctgtatttgttctcttttctttgtttgttaattcacattcaaccattgaatgtgaaaattgatttatccataaatataattgaaaattaaagagtctaaaagagaaaaaaaaaaactagattgatgatgactaatagtgttgcatccttcctttctctagagctttttttttttagttcttttgaaaactaaataaaatttaaccaacaaactagatctaccatgttatagttcgcatttaattacattaaaaaatgcactcatgactcacaatatttcggccataactcaaattagaacgattcaagattttttagaaaacagaactttatttttagctccaaatccaatcctaaactaaaagatatcaaaatctaccaacaagttatgacatataaaactgagttctttggcattgcaccaaaatctgttgaagacactctaaataactccaaacatacaattagccttcaataatcataataaaatcataatcatactaatgtttggagctgtcaaaaaaactcgataattcaattaattcttttctaaccctatatcatttcaaaaataccatttgccaaacagtgttaatgtttgaaccacaaatcataacaaattccaactatttgtttacactcatctctatctagttcaatcacacataattataattgaaaaagatcaaacaaagcagttaagctcatcttaaattcatgaacaattttgtccatgccatgcataaacttccaacaagtttaatgaaatccaaattgttgccttattaacattaattcaacaaaaattgtcatgcaactaatttcaatgaaaacaaaaacaatccgaaatttccatgccaaatcatatagtagcatcaaagaggacctgggaaatttccattgtccctttgctcattccatttttcaacctgccaaaaagatcaaaacagaaaatgttattttaatatttcattatctcatcatcaaaatgaataggattcttgacttaacacaaataagctatagtacttacccattcaccagggcatagagaacggtaatatctagcgaatttctcacattcgccagactcttcaccctttgctgccaagcacctacataaattgaagaaatgtaagtaatttaataaacacgaagaaaaaagtaaccgaaaaaggaaaatggggacgtggtacctgtggaattcaatgtaacgggtgaaacagtgtctagtttgatttgttgtagggaaccgaaaatcggcaggtgctgttttcagttcaatctgcaagaaaagaagaaaaagttgagttgaaatgagagatggtaggagtcgagtctagtaacaagtcactaattggttaagcttgtcatgccaattatgctattcggtgttcacaaccttcatattagaagatggtttggagagttttaagaataagatcagagaaattagtggagagattgcagcaactaacaattgagtttggtctttaagccattcaatgttcaccatcttcatattacaagatggtttgaagaaattgagctcgaatcaaagaaatagtctattcaaaagaaactctaacaattgaaacactcaaaagtagtgtcaatatagatatagaccaatcggctttgaatccattaaaagaaatgcattgaatagcaatgtagttctaagtgaaacttgattcttattcaacacaaatttggtttaacataaaaaaggaaaggcacaagctataatataagtgaacaaaaaaaaaaacacctaaagaattagaatttcaggagtacatcttttcattaatttggtaaaacaaacaccaaataaaaaagtgaagttaaatttaaattcaagaatgaaactagtagaccaagttctttgtcaattaaaatccgcatcaattgtgaaaacctaagggcaatcattcaatgacatatatatatatataattgtgtaatgataattacacccaaataatagtatcacaacaattccaattaaacagattaaatcaaaataactcatgaaatttaaaactgaatcaaacaaacaaataaacaataagaaacaaaacccaattgctcaaaccaaacacttcaccatttagattccaatatcgacctaaggcactaatctagggtttacaattcctctcttttaatcgaatattaatcagtgagccaaaaaaaaaaaaaaaacaaaatacacggttcgtcaaataaatcctctgatttaagagaaaaaaaaaaacagatttaccgctaatctaatccctaaacaacaaataactcgatttaaatacaaatagtcgcgacccagtataatataacatattatatatatgtgaaatagcatacacacaaacaaaatctgaatctccagaacgtacacaaggaaaaaagtttgtttttttttattcttttcgaaaaatccgatgtttttcttaagaatgagaaaaaaaaaatatttgaaaagcatttctgggaaaagagatatttatagagagggagcgagaagatttgttacctcgtccatggatggttgattggatcaaagaaaaggggaagattgggagttgtaattgcgaaagaggaagacgatggttaattatgacgaccaatataagcttaacccaataaataaatatttcaaattaaatattaaccaaaaaataaatgttgaatataaaagatttgctgtggactttccctactttctttgcaggccaatcaaacatttccacgtgtcattttggtgacccacagtttgctaattaatattattattatttgtgcacatactaataatttcaaaatatttgtatttatatatgtactagaagaaaattacgtgcaggcacgtatatttagttttatgttatgtgttctat

SEQ ID NO: 49426 - DNA, 764 bp, Cannabis sativa
gatcgtagtagcagaatcacatgggctttaatctctaacataggagacaaacctaaatatttaagtgagtaaaattgaaatcgattgaaaaaaatggggctgaattgagaacattttgtagggaaaaaggctcaggatccgtcgagatgtcgatgaagatcagaaatgtgagaactggagaagagatttagaaaatcccaattcgcagtcgcaccagcaaaaccctcgtccatgccttcgcttcttatagattttctttcgtaagaaaaaactgagaaataatgtaaaatgaagagagagaggtgcggagaagccgttctaggacttttgcatcattactaacggtagccaggtagcaagtcaatcttgttccatacgacgtcggtttgctgtttgtttcttatatataaattatattccagattttttttttttttttgttgagcttgcctaaaaaatttgaatacttaaaaagtttcagcaattttggaaaatggctttctctattcttcttgaagcatgtttggaatacctacttcggtacccgtgttgtggtgactcttctgtctcttatcttttgtctaagactatcattactgtaacgttctaatgctaaggcacgttacagtgatatttgctatttaactaatcaaagaattttcatgaaaatcgtgtcaaattaaaacttttaagattaattatgaaactttataaactttataagaatatttacaagtgtcaggatcccgttgataaacttttta

SEQ ID NO: 49427 - DNA, 1043 bp, Cannabis sativa
atgatagactttaaaaaagagggtaaaaataaaagagaatcatataaaaatggtatagagtgtaatttcctcccttaaatttgctaatattttagtagtttggaggattttactaacaatatttaagcttaaaaagttaattgcaaataaattgatagtttagagagtttaaaaaaagaaaaaaaactctaattcacaatatgtcacactagtattacctaatttaccttcacttcaatatggaatccaaaaagaagagagaataaatggaaatggaattttgttcttttacttttttttttttttttgatggaaaacgacaacaaataatatcaacttctagtcgatccacctgatcataccaccacattctccttttaaaacttctcttttctcgccaaagtctccttttaaaggtgtttttatgcatcgaagtttgaacttcatcattgcttcgaagtccgccatagccaaacgcctctctcagccacactttgtctcgtttctttcctaaaataatatcaaacaaggtccttccttatgacgtcatgcagtcggtgcttggcttccaacggtgttacctcggatggtctgatccgtatccggcttcctccgagagccacactggcagcggcaaagatctcgattcttcctcgaaatttaggcgacctgcggccggggaacgttctccggtcgaggcatttacgcgggcttatgcctccggtggaggtggttgccgccggagcagggtgggagaggtcttcggacgggggagagggggagaaggagaaggttggcgtgtgttcgtacacgattggcgatcagagagtgtcggatgtggaaacaagtggcggcgagtttgatcggaggaaggggttggaaatcgtggcagcggcggctgttacggtgctgcttggagttggaaatcgagtgttgtataagctcgcgttggttcctctgaaacagtaccctttttttctcgcccagctcgctactttcgggtacttcaacgtaaatgtaatactgtaaatttgtaaattatt

SEQ ID NO: 49428 - DNA, 1512 bp, Cannabis sativa
aaccaactgaactaatatctaataataagttgtaagtggttatgatcttcacatgctagggacattcacaagaacatgtgcactcactatgcacttacagacgcacacacaaagcactcaaattgtgcttcacacttgggaaatcttgaggctcttagacaattgtttattaatctggcaaatgtatataagtcaaatgagtttggtcaacaccccttacaaagcaattaattagccaaaatcggtttaaactaacccctaactaacagtgcacactagctatcattaccgaattactagtaaactaaaagctaacaattcttcacctttcacaaataattaaggtgtacaaatacaagaatggaaacacaattatatcgaaattgtcaacaaaatagacagttactaaacttggttgtagctagtgatttggtgagaatattatattttcttctattatatcttgcggaattgaactttgcattcattaattatgatgtctctaataaaatggagccttacatcaaatgcttagacatgtaacatttgatttctactcaagtggagaatactttggctatcacagtagattaggagctatctttggtcaactcctagctctcttgaaatttctttaagccatagtgtttctttgacagattcaatacatgaaatgtactcaacgtctacggtggatagagctataataaactgtaggtttgctttctaacttattgtacatccattaagttgaaaaacataactagattattgtaaccttctcaagtctaggtcaccagcataatctgaatccacataaccctttactcttgatctttcattgtctaatccataaatcagtccaacactgattgttgcctggagatatctcaccatccatttcattgccttcgagtgttctgtccctagttttcccatgtatcttctcactacaaagataccatagcacaaggctggcctgatacataccattatatacattagataatcagaattgttgtgcaattggtgttgagacaagtttagagtttgagaaaccaaccatgtctaatatcttggtaatgtagttgctattagtcaacttcaacgttcttctaaatctgtctatggtgatttcaatccccataattcttctagctttgctaagatatttcatttcaaattctttgctcaaaagcttctttaatttattgatcacttatggattcttactagcaatcaacatgtcatccttgtatagtaaaatgtagaaaattgtgcctgcattattgatgtatatatagctatcatatttcactactacaaaatttagagtcgattttttacaaacactaaaaaaaatcttgaaattcttttcgcctctaaaggggttgtgagcttttagatgggcttcaaacccataagaaacccttataaaaccctaacaaaaattcagctgccttagccacaaaaaaccctaaaaaccctaaagaaactctctctctctctctc

SEQ ID NO: 49429 - DNA, 1271 bp, Cannabis sativa
  modified_base (1234)..(1246): a, c, t, g, unknown or other
cccctctcctgtgttactctgttttcctggcacaacagcttgttcttcctcattcagatcttgttcagacaaaagctaatatttatttgccacttctgtattgctaacttgagctttctcctttattttgctcccattcacaactggctgaaactctccctctttagttacaggctatttcgaattgtcattaggcttcctattatctttcttaacaatccattcaggttgttttccttcttttttcctacattcagaagtttcatgtcccatgcctttacaatacttgcaaacaattggtttccactcatagtcgatggagacagagacaatatattcaaccctaattatttcgagttagagagtaaagaaaataccactttatggattactctaaaaagcttgatgttgcctaattatacaaatggcgtcaacaccaccaataacgacaagatcggtagtagtggtgatgttttatgggttccaagtaagatgtggtttgagtatcgaattctacttaagtataaaggtgatcatactaagtctaaacaagtgatttctgtcacggctatttgcgacaatgttaagatacaatatgtgaacgaaacgacgccgttggataataataagctggatttgagctcatgtaacgttggtggagatacaaaacttgcatggaatgtaacactactttgtggtattgtttttatgcttgtatttttgtgtttagcatgtttgttaattatttggagaataatttagctaattatttttgttattatggaaagacgttatttatttattattatttttttattataagttaatagttaatgcttaattcattagtagtttgtttacgtggaatgatctttgttatgtcttttgtaattaaattcaacaaatagtatatatactttctaattatatttaagttttgtgtaaagactaatttttttttgaatgaaacacataacaaaataataatggataagtttagtgcatcccctaaaaagtgtttcggtagattttttatctgtttcggcaaagttttttaattaatttcttttttccatatcatcgtgtatatgttataattatttataatcactcgtaattttttttttttaaaaatcaaatactttataatgccaaaaataaaattaccaatattattacatgagagagtaaatgtttaaaaatatataaataacactacaaaaaatcttacttnnnnnnnnnnnnnaacttgtgactaaaagtgaaaaaat

SEQ ID NO: 49430 - DNA, 1178 bp, Cannabis sativa
ctctcaattccatgtgcaatctcccaacacagccactgttcccagagttttaactgcatctgtagcttctaatcctgttgtctcaagtgttcacacagcctctgtgtcaccacctaatgtgccagaaaattctccttgtattcattgtaataagcctcaagtttctaactttgagttgtggcacaataggcttggccacccctctgaaaaaattgtcaaagctgtattgcaaacatgtaatataacaatcagcaataaagattctttgaatgtttgttctgcctgttgtttgggtaaaatacacaagcttcctttcccaaaatcatctcaaacagtctatagtgagcctttacaattaatagttgctgatttatgggggccagctaaagcaacttctgttaatggctacagatactacattcaatttatagatgcacactctaggtttacttggatttacatgttgaaaaataagtttgaagccttaaagacctttttgcaattcaaaactgaatttgagttacaattaggcacaaaaatcaaatgtcttcaaacagattggggaggggagtttagatcatttactgagcatctcaaacagtttggcattactcatagacacccttgtcctacaacacatgaacaaaatgggttagttgaacgtaagcatagacatgtagtggaaaatggccttactcttcttgctcaagcttcaatgccattaaagtattgggatgaagcttttcgaacatctgtttacttatccaatagactaccaacacctgttttacaaaacatatcacctattcaaaaactgtttggcatcatacccgattacaccactcttaaaacatttggttgcaaatgttttcccaacattagaccttataacaaacataaactccaatttaggtcttcaccatgtacttttcttgggtatagtcttaaccacaaaggttacaaatgtctcgatgtttctggcagggtatacatttcaagagatgtaatctttgatgaaatgtcatttccttacacctctcttcccaaacttgcaactgatacatatacttactctgaatttcttacatctgccaacatacctattgctcaaatgaccaactcccaacatacccctgttctttctaattcgactatgcctactgtggcaagtccatctg

SEQ ID NO: 49431 - DNA, 4157 bp, Cannabis sativa
  modified_base (167)..(175): a, c, t, g, unknown or other
  modified_base (3157)..(3159): a, c, t, g, unknown or other
  modified_base (3339)..(3349): a, c, t, g, unknown or other
tttatgccgcaaatatcccttttagatatgcatgtttagtttttatatatattttgttgtatggaatataatttttgttgtctatatagtatatcattttattaagatgatatttaatttctattttattatatataaattatttggtatgtatacatattttaatnnnnnnnnntataattttgttagcataatatatatattgagtattaatttaatattattataatttttttatagtatataattttatcactaccgtatattaattttcagtgatacgatatatcaaatgttattgtatatatttaatgatttaatatatttatttatttttgttacaatataattatatgtaattctaaaaaaatgtataacttaatttaattattatatattatttaaaaaaaataatatccagtaaatgtatttttataatttttattagttaatttattatgtttggtcattttcttaatttttttaaaaattaactaatttactaacttagtttccaaatttagagttattttgcatcttagttcatagtgatttttcatctcagcccaaaacaatggtaaacatggtaaccaaacctagcttgatcaaatataggaagcatagtttagcttgtgagtgggcattggtatttgtagatctaggacagtgattaaacaagattacattagattttttacaaagttgatgaaaaataaaacaaaaatgttaagtcttattgttataatttgttggcataataaaaatacacataaccaattttttatatgatttttgcatcaaatatgatcttgtaaatgcttaagacaattgttcgagagatgaaaaagatataaatgacaacttctctatttttcttttcctattttccatttcaacttgcgaaaattacataaaagaaaaaactaaaatatagaagaatattgttcaaagtatcgcaaattaaagataatggccaaaaacattcattgggatagcagccactaaacattctacaagtcacccacgatatgtttctttacaccatgagatgaagtttgaatcaaatagttttcaagatttgaaataaagcaacaacgttcgcacctctaataattgagagcttgccatttgaactaactgataagagagttaagaattgagcatgaatacaagaccatgatttaagacgagtacaaataaattaacaatagaaatttgtatagtttacctcgaaacccatcttgcggtacaactttgttatctctatacacatgcacataaacctattcaacacaaaatgttaatcaaatgaactcttctaatacagaaaaagatgaacaaaattcttgtttaaactttcatcttaccatctgaaatagctgattcaacagaaaatacagcatattacttgcaataccctggcgacgtgctaatttggcaacacacaaattttgcaatataaccatatctattttgggatgtacagtttatgttgcagaagagaggagctttcacgtcgttgtgcctggactgtgagggctctaagccacatggatagttcaatgtgctcatcagcgcctgatcctgagatgtgcatcatccaaggcacattagcatgggatactgctcctgttcgaaccggggtttgaaaccaaacttctcctcaggaggatagatggggaggcctatgccccataaaaactatctacctgagattgtcccttggcccgtaggtcctgacacaaggttagaattctagctcttccagagtggtatctcactcatggctcgagcccctcggaaggagaccccttgcgaacagcttgatgcactatctcccttcaaccctttgagcgaaatgcgacaaaaggaaggaagcggacccaaaactaaagttgataaggggatactttttttgtgaggggggcaaaaagtaaactaaatactaaactaaagatgtttttattagaatttgaaccattgacttctatagcatgtgtgaaataatctaattaacatatcaaagctattattatatttacatttatcacatttaattacaaatatatgtcgtaactaaactaaatacacatacatttttttttctcaatttttttaaggggaccactgcttcctctcgcatctatgtgggttcacccatgcccgttcctgagtgtctttattatttttttttataaggaaatagcaattatatcattgtcatcaacaaacttaccattttaggagaattaggcttttaacaaacttacgattttttggaagaagttagacaaactggtttcactttatatatatatttttttttgggtaggaaattaggcttacatggtacgatttgacttttatgtatatatgtatatatatttgattctttttaggaggttaaggtgagagttaaaatgtagggttaattttaacaaaaaaaataaaataaaacattaaattaagaattactgttaaatagttacttttaatatatatatatacaggtttaaatttattaacttttttatttaataaatatagtgcaactttattgaatgttgttatattcgaatttagatgtaattattctaaaaaaaaattagttggaattagtattcttttattgattccttattttagttctaattttaaattattttaatcaagaataacaaaattcatacataaagatttttttttaaaaaaacaaatgcataatgattttttttagtatagaaaataaaagccaaatacattaagggagaggcaaatctgccataacagcagcagtatccaaaggaggaactcctccttcccacacaaaaaatgcattgtcgagtaaggcaatctttgttataaagtgtgcaaccaaattcgtagactgtggttgcaagacaaagtcaatgatcccagcctccacagcatcctcacaaatcgcagctgttgacgctgaaaagtagtcaactttggccgtattgtttgataaacgatagcggtaaatagaaaaatatagaaaaaaaaaagtagagagaacaccacaattttatatatagttcaccctacatattgtgattgtaatgaccgctttagtaatttggattagtaaagacaattagcactaatttctgatattttttataattatttatgnnnttaattatttgtgggccccattgttagaaatgagtattagagttataatttctcaattctagagattttattaaactctaggggcattatttgatttatatgtgaattatgttatttttaatatttttgctcggcgagaacggaaaatgcgatggatgactagtttgatcacatgggtannnnnnnnnnnttatttcttagtgggaaatatattggagaaaataaaatatcggggttgtgctgggttataaattttgaccattttacccctaggtttgaaataagctagaattaatcattaagggtattttagtcttttgccaagtaagtggtttggtggctgcctaggaacttgacacctagcagctattattcaacaaggattaatgtagtagatcctttttcatttagagaaaatcaagagaaaaaccaaaattcaagagtaaacagtctcttcccttccctctatcttcgaaccagcctagaacaaggggaaactattgttgatttctggtgttttcagcaaggaattcaagggaaatcaagccaaggtaagccctagcatctctatctcttacttctcaaattttagggtttgattgagaatatgatttcgaaaattaggggctgttagggtttagtttttgtgtatttcgaattgtaaggtttatttgtgttagatttagcttctagtagctggttttggtgtgtgggattggatttatgcgattttgagctttgaacactaagctttagtctttaatggaatattgtgattccgtgtgtttttctgagaattattggttggaatatgttgcatatacactgtttaggtactctagaatgtttggtggcaattggatgagttttgagcaagttggagcttgtttggggaaacctagtgaaaattgggtaaccagtttgccaggacctgtaaaaccggttacccggttttggcaggatccctgaacaagccattttctcaattctcgtccatt

SEQ ID NO: 49432 - DNA, 1797 bp, Cannabis sativa
ttagtgtcaccaacaatcaaccaaggccctccgaatctctccccttccctcataatctcagtccaaaaggacttttttgcatggaagtacggggggccatacacacaggaaagaagccaaggatttgagggaggatctgagtacactaagccagaaatatggtgacgagaacatgatatacttgcaaaatcaaatccggatttccaggctaaaataatacccccagcagtaccaatagcaggcatagaaatatgaaaatagaaatgaagtttgttcaaaatacgtactagtggctttgcatccacttttagctcggacaagatgataaaatcaggagcgtacgaccgagccaaggacttcaattcgcgaaccgtagaggtctgtcccaaccctctacagttccaagccactgccactgctctcatggctcctgtgggaggagaaacatccctccctccacaaggggtacaagagtgaaccgacacctcatcatcttggttcggcccaaacaaatcccaaagaaagacacgcaccacatcaagaagatggaacaacacatccaaaagactagagcaaactgtcgccaagccctcaacaagcatccttttcatgaaaggagaattgctttcatatagcccaatgaccgacagggcaccaaaatccccgccaattttacgaatttcaatatggtcaagctcatcaaattttccaagtatttgaataaatatcttttgagcttggaaataaatggcgaaagctctcccctccatatcaaggcaattaacaaacattacccaaaaatgagccattaattgagccaacaacgtggcccaaccgaataggcccattgatcagacacacggccataggcgttgtaccactacaaccaaataaataacatttaagaaccaaccctatgggcataccacaattggaaataaactcacccaatggcccaaaaatatgaacaaaccacatcaactaaggcagcccacacacgccaaaactattcaagcctccaagccctaaagctagcccaatacaacccacaaacaaaggcccacaaagcaaagaagaaacctccacctcgggctccgcaccacataagccacacaacttacaaaaaatcaaacggtcaacatgtaaacaaggtacgtgaacagtgccctttacatgcacaccaacaagataacacaaactattaacaaaaatggcaatcccacctacacgcatggcttctgaaaagctggggaaacaaaaaggtgggcaatcccacctaatctctacaaattttaaccaatacataaaactctaacaaaaactaaatatatatgttttataaaaaagaaaaaactaagtatatattatatactttaaaatttaaaaacaactaaaatatgagagagacaagaattgaacctagcaccctcacattaatataaatcctttcttactaattgtcctaaagatattttgatgaaaattattgaactaatatgtgtatatattatatttttatttttatacatataattttcattttaatttgtagagctctttaaaattgtggggcgtagaacttaggccttgactgccccactctcctaaacaatcatctttgtcccaaaaagtcaaatcatctatataaatataaataacaggtgacaggtgataggtgacaggtgtccataagaaaagggttttcctcgttttagtttattcatgcatggcaagtgtatcagtaaaaatgacccgtgaagtgataaagtagagtattataaaagtattgctactata

SEQ ID NO: 49433 - DNA, 1380 bp, Cannabis sativa
  modified_base (200)..(207): a, c, t, g, unknown or other
gttttgaaatgaggacatttactatcatggtcctataatttggagccatttactaaaatttttcttaaaacaaataattattaaggaatattttctgaataagatatctatataatattaggttgatgttacgtgcaatagacgtataattagttttctttttaattaagttcaataaggtgatgttaagtgcaatacannnnnnnntaatttttttaattaagtaatgtttttttttttaaatttttgaaatgggatttaagattttaatctttaagaaatttttttagccattgttacattagtgtgtcatttgaatataattttatatatgtatttttttaatttataaagtttctttaattaaataacatatatgataatgcacatattataatttactatattcttaaatttaaataatttaatacacttgattacaaatcctcaatacacttgatcatgtatatactttaaattaaaatattatattatttactaagtatattattatatattgtaacattataatgtaatttaaaatattaataatattttaaatttaatttttttttgtataaaatatctattaattagttcttttattttaatttaaataaaattaaaaatattattaaaaatatctataatattttaaatttaaattaaaatttcttctttacataaaacatctatataatttttatttttaaatatataataatattataaaattaattaaaaaatattttgttaagtaatatgatattctattaaagttaacatagaaatctaaaaaacatgttaaactaagaattttgttatatagctataaatataattattgaatacattaatatacaaattaggttgttaggtaaaaaatcattttagcaagaaatgtagcgtttttgtcaattgattttttttttatttaagcggttatatattacacaatgcataacttgtgactcgaagccaagacttccaacacacactcaccctcctatagtcacttgagctagcctgaagtggtttgtgcgaagttttcataaagcatacatataaagcatttttttgtgagaaattttcatagagcatacataattgttgaaagtatctcatagattgaaaccatattttcttgtttttaaaatatcatacatatctatataaatgaatagttcttgaatgagttaatatgcaactaaattaataattgtggcattttgaaatattattacttttatacattttatgaaataagtgctaattattttgacatgatagtaaccacatagtattgaaatattagtattcaaaagatggtatttttgcaaatagtaactaaaagtttgtaggtgtgcgaaggcccaaata

SEQ ID NO: 49434 - DNA, 1299 bp, Cannabis sativa
tacattgtcttcctaatcctattacaattaggagaaagagaactaaaccttattttattcaaattttctaataaatgtttgacaagaaaacttatagtgaattccttaacaagaaaacaagtctatataatccaaagtcgaaccaaagcaactcaatcaaaccgatgattaataccatcatgactcgatcaatgtcattctccgccctcattttcctcctaatgttattgggccaaggcccaacccaaatccaagcccgaaagccccacataatcaatttccgatccccaaatctctacccagaaggaatcacgtgggacccatccgcccaacacttcatcctcggctccgcacgtgaccgaaccctagtttccgtctccgacgccggcgttgtcgaaaccctaattcacgatcccgatttaccggaaaacgtcaccatacttggcctcaccatcgacaccgtcaacaatcgccttctagcggccatccacgccgtcgaaccgcttcctcaattcgacgctctagccgcctacgaccttcgcacgcgccgccgagttttcctctctcttcttcccaacgacgaaggtgatctaaaacgcccgactgcgaacgccgtcgcggttgatttcaaaggcaacgcttacgtaacaaactcaatcggtaactatatatggaaagttaacgaccgaggagaagcttcaattttctcaaaatcgccgatcttcaatgcttatcccgtcgatcgagaatctccgttcagtttctgcggcttaaacggcatcgtttactcaagcaaaggttaccttttggtggttcagagcaatacagggaaaatgttcaaagtcaacgaggatagcggtaagggtaatttggtaattttgaacgaagatatgcctttggctgctgatggaatgactattcgacgaaaagacggtgtcgttttggtgaactcgcctaaaaaggtttggatgttgaaaagccaagacagttggggtgaaggagtggtatatgacgaaattgcccttgatgaagataggtttcccacttctttgactgttgggaatgatgggagggtatatgtggtatatggacatgtgttggaggcttttatgggaaattggggtaggggtagtttcggaatagaggaagtgatgtcagagaaggagaatagagaagatagtgtttggatatttgtgttacttgggttgggtttggcttatttcatgttttggagatttcaaatgggtcaactcatcaccaatgttgataagaagactaattgatagagtattgttatgg

SEQ ID NO: 49435 - DNA, 941 bp, Cannabis sativa
ttttttaatttttttaaaaatatgcttaaattaaattagatcaattacttttaaatatcaatcaacatctaatctacacaagtacgaatattcacactttgtgaattgaataagattcaatcgtgcaaattgaattggatagaccattttatcaacacccctagtcttttctctgaatatgataacaaaggacttgaaaaacatgctactccattgaaaattgtactatataagacaagggatttaaggaatctacatgaaaacattttggttcaattacataatcttatatacgttattcttcttatagattaaaaattcagcttcaagagaacagattagctcattgatagattctttttgagatccattgaagtgcttcacgatatctgacagagtaacctggcaataaacccgaattggtaaacataacaacgaaaacaatagtttgacaaaaaatagatatctagcattgaactcactccatccttaaagttcttaatccaatctagcacagaatcctcagttgcatccggtggtgtggaaattccttccgctggttcaacgactctctgtcgtttttttgatactggatcctcatcacagtctatgggcagatctgcaggtttcttgtggcagttggacatagtatccgagggagacaccccaatctcttgcattgtcaagcagaccttgatatgtgaataacttacctgtcattatacaaagcatatttgagtgattatatataattatatatgtattgtacttatggaaaaatgttcaaggttgtattgtaagcttacatcttctggtaattcattctttataggcttcaacttttcttttgagccaacctttaaaatggcactctgaatatctgacaacacttcgtgtgttagtccgatctcttggcaaaatctcatccaatccattgccaa

SEQ ID NO: 49436 - DNA, 747 bp, Cannabis sativa
aactaaaggctagctagaattttcttttaactttaatctttcttaaaaaaggatttcaaaagtatatatatacaagtgatttgcactcactttttcttaaaggtgtgtaatagtaccattccatatataatacatatccgttgctttttattttattttctcttttgcagatgcaaaattaaagaatgaaagataaattaaagaaccacttttcatttttcttttgccatgatccctgtgatcatatatacaagattgttctacacttcataaaactctctctcgttgatcacatgaaaggttaatttaatttctcgtgatgatcgattaagagtacttcatattaacgtcatttctgtattactattattagagacaaaactaatatagatacgaaaattatacacgtacgtatatatgatataatctaataatcgcagaccagtgaacaattaacatatgttataatggtatatttcatgctgtggaataggaatgaaaacatagaaatgagaatgagaattattggaataggattaggaatggaatagaatcaaatttaaaatacataaaaaaattgataacaaaattattgaattttttcccactatgcattagattggtctttcctttcatttcaaaaatagttattataccaaaatgatggaaagaccattccattggaatgacattccaacattttaatatgcaaccaaacagaaaaatagaatgaaaattgtttcattt

SEQ ID NO: 49437 - DNA, 1564 bp, Cannabis sativa
taaggtgggaagggtaattgctggactgcagtatgagcccgaccgtaagctttattttttccttttccttttctttttctctttctttttccaactctagttcaaagtatataggctaattcatgatgtggttcctggagctaagatttcttatctgttgccttgcgccattgtgactgaaaatttatattattgtttttatctgtcctaagtgtgatgctattctatgtccactgttgggttgggcatagatgtgtaaactcagccctgcagtttgcatttgtaggatttagatatcattttggacataaataaatatattgtgctgttcacacttgttgatgcccacccttccccatgttttgctcagatggaagcaaagatagtgcaaagtatcaaaatttgaagaattggagtggggcgattggctatggagcgggatcaggcagtcctctaagtccatcattcaatttttgtcttgaactcgctaaaagttcccaggttttgttctatattttttgactttattcgtagcattccctttttctcaactgtttgccttgtattgcttaccaatatagattttcatgaaaaatctatcctttgatgagctactttatacatatatatattttgtttgccttctaatacatggatagttaattgaaataaaatcaaatcttatgaattgtgaggaatatgaactagatgaacaaggcgtctcatgcctgaattttattcgcagtttattgcatcattctatcaacacgttgtagtccaaagacgggtatctcttttcctctctctcttgatgattcatggctcattgtacttttatcttaatttcaattttgtctttattatgtatgattgttttaaattttgtgtcattatcattcttccaccttaattgtcttgctttattattctaggatataacaagctctgaactgctttaactaaacaggtgaagaaccctcttgaagaaagtgaagttgttggaattacaaactatatagatttcggttttgaactgcagacaaggtattctattccttctgatatccttttcctttatttgtttggctttatatcatgccttcttttcctatttgaagcattgacggtgaagaaacatcaatgatgcacgattctacctttcaaattggtgcatcttggcaagccaataaaaacttcctgctgaaggtattattattctgttctgatgcttttgttcacgatgataacatgctcagctgacatcaaaaattacgtatgcagggaaaggtgggtcctctcagttcatctgggacatgtgcattcaaatcatggtggaaaccttctttcacattgagtatttcaggtacctcttgttggtaaaacctgtacataatgtaatcactcttgaatatttaaatctctacatgcttacagttactatagatctagatatactcgcgtacaaaattcacactacaagccaaaaaagtgtttctcttaaaggtgactttatattgtactggttgattagtaatggcttggaaattgctactatcaaggacta

SEQ ID NO: 49438 - DNA, 3762 bp, Cannabis sativa
gatatttgggtaatacccatcaagagcactgagcatacctatatatatgctatacaattaataataaacaatattatataaaaacttccctttctctatttccaactatgactcatgaggtatattaaaccaatagtaatacatatcttctttcacaaattcacaatgtcaccaaaatttttataaatgtataatacttatattaaatgattaagattttgttggagttttttaccatttttttattatgtttggaaagattattaatttacctttagtagtattagcagttaacttcaataatttaattatttttatttttattagatttttttttcttcttatatggaccattttttttagttagtataatttaaagatatttggaatatcaattttttttttaattattttaaaaatctttacctaactatctttaaatataaaaaattgtatatataatataccagtttaatttaattgtataatagtaggagttggattcaatttttttttttttattttaattcatgtatatagtacttcatagtatgtattttttatatgataaattttttttaatatagatttattgttttatttttttttttgttttaaatctctattctgtataataattctacaatttttaatttttctttcctataacatacatttgtaaatttatgattttttatttttatttttgtggaggtctctacataaatttatcatattttaaataaatatatatatttttgaaattatttaatattattttatttcttaattaatatttatatatagtttaaaaaaattaattaaaaaattatcctaattaagtctataatttatgattattaaaaaaatcttcaaatatattaagtaataaaaacaacaaattcaaatttgtatcctacgtactcaaaaaaaaaaaaattaataaaataaaaaataaataaccaatctaattataaaaagtaaaaattataaatattaaatcgataataagatatcaaatattactaatacatatttatatataaatgagaagtatgagagggtgacgtggcggtctaaaaatattttaacgtcaacaaactcccacttgtcaatgccctaaataaaaacccaacaaactccatactaggccatttgtcaatgcccaggttgactaatggcctagtacgttaggttctgcttattttattctaatacagtctcaaccgttcatagttttcacaataattgagagccatgaattgagaatagtcaaattcacaacttcatatttttattttttcgataaggtgatttactcagaaaattgagtctcctatttctgtagaacagcaacatctctgagaacttgtgaccaactttgctagaacatatatatgcactaagtgatgtcaaaatatcacttaggaatcaaaaaatacattctcaatgcccttttccactcactagtgtccaaatgtcaacctaggtgctgggatgtcaacctgggtgctgggatgtcaacttgggcactgggcctagaacaaccttcagtaaaatttccataactcactcaatattgattcgattgatgcggttaaacttgcattacgaagctatttcaatgctctatcaagtaatgtttcacatttaaaccatagttctgaagctatcgtctccaaatttcatcccaagggcattacgaatttaagctacaacttacccaaagtgggtcccgccgtcgcgacccgaacttcgaaaattgacgatcaacctcagaagttaattttcaccatcagatcatcatctacggtcaaaatagcctaaattaatttttccatattttttggattattttattcccatttaataggacctccttcacctataaaaggaaagctatactagctcatttttcaagttcagaaaagtagccataaggttagagtatctctctttagaaattagagcatccagacgtagccatttttctgtaatccatctcatgagaataaaaacttgaagtagatgtagatgtattactgtcgcaacacaatgagtgaactactataaattattgtgtctctttatttatacttaacatacatctcattctcatcaatatagcaagcgagtgtggcttagaagtatgtgtccaaatttttgagtcaacagtgtaatgtaaaagtttgaggtaaaatagaaaaagtaaggttttggtgatgtattttcaaggatagtgtagagaagctgatgagagtgctcttagatccttttcctaaggaaacccaccaaaatttagtcatcctagactcaacatccctacaaacaccaataggaattctaaagcaagatattgtatatgtagggatatcttgaataacaaccttaagaagaattttttcgccaactcaagaaatgtttttactattccaatcgttcatttgggctgcagaaatcctctctagacatattcaagatgctcttaaacagggtactattaaggggatcaaattgtcccgtgggggaccaactatttctcatatcttttctcacagacgatcttatcctggttggaaaagctactgtaggggaagctagaggtatgtggaattgtctagagaagttttgtgattggtcggggcagcgtgtcaacaaacttaaaacctctatcttctttagcaagaatacctctgagaacttgaaagtggaaattaaaaattccatggcaatcggtggccctgaaggcataaccaagtatcttggcctccccctgttccagtctaggcaaaaggatgtgaactttaatttatcttggaaaacctgactactaagctttaaggctggaaagcgaagacattatccaaggtaggtcgtggtaccctcatcaaattagtgggattggctatgcctatttatgccatgcaaaccacaaagctttctaaccgtctaatttctaggattgatggtttggtgcgtgatttttggtggagttttgaaaaaggtaatcatgggatccacttgaaggcttgggacaaattgtgcctccctaaatctcggagtggccttggattcagaaaaactaaagaaatgaatcaagccttcttggctaagtggggttagaagcttctaacaggatgtcagtcgctttgttgcaacattctaaaggcaaaatatctcaaggggatggatatcctcaagtgcaaagccaaagcaacggattcatggttttggaaaattgttataaaagctaatgatattcttaggaagggggcctgtaaagtaatcatcaatggcaaagacactaaaatttaggaggacccttgagtcactcatggccaagtgttctacccaaagttgactgataacccaccttctaagttcattatggtttatgaggttttgactgcttctggtgactaggacacccaaaatatgcaacatctctttgatcatgagaccatttttgccatcttgaaagggggcaaaccttcaggccatggaaatgatcattgggtttggactaaggagggaagtgctcagttcatgagtaagtcaacttacttaatccaagtgctgcaacgatcttcccattgtgaggttgccccttcactttggaacaaattatggaatagtaggatccctaaagggcacgaagctatgtggtggagcgttctttcaaattctcttccaacaagggcggtctacttcaaaagatttcatattactgacaacacctgtcctatttgtggagaagaggag

SEQ ID NO: 49439 - DNA, 1608 bp, Cannabis sativa
gtttaggaaaattagaaaagttggcatataggaacaattttaataactatacatttagggaaaaaataaaatggcattttaagcatagaatttcaaatttcccaattaaatgggatttcccatttaataaaacctgtccagacatgcacaacattcctattatataccattcattacctttagaaaattaaaatagtaagtaaccaaataaaaaagaaagtacacattattttgaacttttaattctttctcagtttttcttttttaaattcttaaattcatcaataccacactattagcaaaatattcctaaagactcggccataactaataaacttacttctttattcaacattctctcttttaaagtgatgtgtttacaaacactagtttaccccctctcaagcttgaccttctaaaagacatactctaagcatctttcttagtttctaaaatgtaaataatttaagaggcttcgtgaatatattagcaatttggtcttcacttctgcaataagtaagatcaattatgtcttccacagtgcactctcttaaataatggtacttcacatcaatgtgtttgcttttaccatgaagaacatgattttcaaaaagtttaactgctaagctaatatcacaataaattatccctcctacttaaagtgtaactcttcaagaatcttcctcagccaaataaattgacaagcactagttgttgctgctacaaactctacttcagttgttgataaagagacaattgtttgcttctttgaagaccatgaaactgcttctgaacctctcataaaatcatagccagatgtacttcttctatcatccaaatcctcttgcataatcattgtcagcaaaactaactaaatctactttttctcccttttggtagaagagcctgaaatcagttgtaccgcacaagtacaaaaaaattctctttgcagcaagaacatgtatctaacttggacattccatatacctactaataagactcacaccatgcattatatctgggcttgttgtcaagtacatcatacttctaactatttgcttataaagagtgttgtcaatcttctttccttttgaatctttgataagcttcaaaccaacctcagttggagtgcccacaagattgcaattcttcatttggaacatatctaaaatttcttggacatatttcttttgagaaataaaaataccatcattagtttgcaccacttctatgctaaaaaaatagtgaattagtccaagatcaatcattttaaaatcaagcatcatggattgcttaaattttttagtcatggcactaccattttcagtataaatcagatcatccacatataagcaatcaatgagcattttacctccatctctaaatttaaaaaagtgtgttcttatatggacatttatgaaaaccttcctttaaaaaataagcttcataccaagcccgtggagcttgtttcagtccataaagagtcttttttaatttatacactttatgctcatttccaatcttcacatagccaggggttgatcaataaatacctattcctctaggtctctataatacccggtaaaaatatacatatattttaaattt

SEQ ID NO: 49440 - DNA, 1156 bp, Cannabis sativa
atcccacttgaccttccctaggcaatgtgggattgtatagcttacccggtgttttcccttacggatcacgggactactgactgtcacaattaaaatagccaaattgtatcaaaaaccgtctctatacttacataaattaaataatgtattggaaagtacataattgctcttaaaattttaactcacacataattacctaaaagagtaaagatgtaacgagtgtttcctaccttttccttttattcaaacttaccataaggttttctctcataaaataatttcaacatgaattaaattaattattttatgacatcttaataatttttcacaatcataaataattttttttaatatatttaattaatttttcaacaaatacacttagccttaatcaagcatttcttagttaagatacataattaatttgaattcccacactagttccatttataaaatttattgaactctcaataaatttcctatgcactaaagtattactttttcataaataatttttttttattttattaatttgaggtttttacccggtagggttcatatttttgtttgggactaaacttttcaaaacggctaaaaaacgcaggatgttacgaactgccagtgatcacaacccaaaacccaaaacccaaagaaccatcaacctaatcgtgttggttttaacctctaatttaaaaatagagtcattgttgtaatatatataggttttagggttagggaaatggaagtttttgcaaaaaaaaatcattgaacgtaactgatcatagggaaaatgtgaagtgggttcaacaaaaattgtggttctattcgaatgagaaaaaaaaataatagtttcttctatattttttcatatccattcttttctcttttttttttcatataacaaagatattgtttgagaaatgtcatttcatagtatcctactcacattttatttttctaattgtaaaaaatgaagacatagaccatttttcttgtagtgcttgtatattgctctttaatggtgtttctctttgagagctttcccactccttgaataaggagtaggctctattggctagataatacatgtggtccccttgagacatgtgggtgaacttcaaatttgcaggccgaagattgcaagtgatagtggcat

SEQ ID NO: 49441 - DNA, 1240 bp, Cannabis sativa
tgatgattgattgtgtattacaaaattttctataaaaaataatttgattttcgttttgaaattattttatttgaaaagttggtgaaaaattaagtaatttaagattttaaggatctcaatttggactaaaattgagaaaaatatcaagttttgaaaattggaggatggttgttgcatacaaattagggtttggctgagatactcagccaaaacccttacatttgcacgcgcatcagatattttttgtttgaattcctcgtccacacctcgttcagatgaagcacgcatgcacgagaccctacaaaggaccaagttttcaaggtcagggtgtatgcaagagtcatttttctcaattaagaccgaggtttgtgcgtgcgggtcggggagactgcttgcagcctatgatcccaaaatttcaaatcttgatatttatggttcaaaaattaattttttggcaaaataaaaggaaaatttgtatgaatttttatgtagaatatatttttcaaatctaacatctagaaatatcatattaaaattaatttttattttattttattatttataaaagtttgttttagatattaaaaaggtttaaaaattttaaaattattttttccacataaattgatattatagtttgattaattattactttattataagatcagaaattagatattagttatattttaattaaaattgaaatgtaacaaatatctaattatcttcattgaaatttaattaataataaaatataataactaatctagatatttttcttcaaataacaattatataatatatttaacttttagatttattattttatttatttcaatgataagattagacaaataataatatctttaattttaaaaaattaggtattgcactattagtagatatttcaatataatattaaatgctttgttacgtcttcatgacttatagctaaaaagacctatgataattcgtgatgattgtaccaataaaagtaaaaatggtttaagaattgcttaagagcattagatggaacatatattaaagtaaatgtcttagcttcaaataggcctagatatcgaaccaggaagaacaaaattagtacaatgtatttggagtggtttaacaagatatgcaatttatttatgttttgcctgaatgtgagggttgtgttgttgattttacgagatgctatacacaggaacggaattaaagttccacacggtgcaatttttttctt

SEQ ID NO: 49442 - DNA, 630 bp, Cannabis sativa
  modified_base (566)..(597): a, c, t, g, unknown or other
tgaaaaggtgagcccgtgacaccgtgccatccttccaagaagtatccgtcacacaataaacctgaacagaattgcctattaaccttctaggcacatcagacggaacactatggccaatttctacttctgcatttacgaaaaccaaatactcagaataccttctcaatatggagcttctaaccacttcaatattaaccaatcctcctttgaacaagtattcgttcctagctttccaaatgccttcaaacaaacaacccgtataggatagaaatcgatccgtaagatctctaggaagtgtcgacaagatccgttccaaccgccccttaaccgaattaccactcccttccccaaaacaaatggggaaagggctgttaaaccataaggctcgcgcacaaggacaatcccagaagatatgaatagtagtctcgagatcgctgtcacacaaaggacacgattgctcccccacaaagcccagcctatctctagtaggcacacaacccgtaatcactctccaaatcataaccgaatgcctggcgtgaacattctgttagaatttattttaccannnnnnnnnnnnnnnnnnnnnnnnnnnnnnnnaacaccctaaatatgaactttctataacgataa

SEQ ID NO: 49443 - DNA, 563 bp, Cannabis sativa
atatttttaataattaaaatgtgggaatttggaaaaagaaaagaatcacataaatattataaaataatttacaacaatacacctcttaaaaaaatacaccaatacactttatttatttcgacatttaagaaaattttttaatttattttttattattaatatattaaattatcttaaataactctgtcataaaaataattaaaatttttttttttttcaatacaaaacatatatcaataaattcttttaagagacattattatacaaacgtttatattctcctatccatttgatgggaactagtgtgtttggtcaacaacgttggttcccgagaaaaataaggctcggccatatatatgttacccggcaaaaaaaccatgttataagggctaagctttatctaaatttcactattatatattttattgacaaatttatgtttttgttctatcttcatctttaaattttatttacttttttaagaagaacttttctaattggatttagtaatttacattgtttttgatccatctctcttttttattcttaaattcaatcactat

SEQ ID NO: 49444 - DNA, 906 bp, Cannabis sativa
gggttcgaagggtgtcgctcgacaggaacattttccaacagaagcacctcacaaaactctttgaatctctgctgcagtagtcttatcgaattagctaaattcggtttaactcctttgaagattagactgttcttgcattgccaaatgtgctccaatacacaagctccaaacagaattagtgcctcattcctggcctccaacaaccacagtaaccactcctcgaaattcagatttcccaggttactattgaggatgccccacaggcaggtgaaccataaacaacgggcaaagtggcagtccctaaaaagatgcacatcattctcaaacgcttcaccacaaagaccacagaccttgtcactttcaaggatatatcccagcctattcttgagcggtaaacagccacttaagattctccaaagcaaaattttctgtctattatggatttttaacttccaaagatccttccacactagcttttcttcctgaaacctgtagttttgcgcacaccagtacacgcttttgaccgagaaagttcctttgctactgccttgccaaaacagagtgtccctgcttccaacaaggggtcgaattcgaacaatggcttctgccacttcaggagtaaatcattgattaattaaatgctcattccagcgatgagtgccagggataaatagatctgaaactactgtgaaggcatgatcgacattattagagaatgcattacgaacctcttccgggctatacctcgacaccctggtccaaatgtcaatcttaccatctcccactaaaagcccagcacctttgatacacaagtctcgatttgcaagtatgcctcgccacactttcgaatcatcttgcttttcctgaacactccagaaatcttggaccttgcaatactttgcattc

SEQ ID NO: 49445 - DNA, 1270 bp, Cannabis sativa
tttccaatcatttcattttgattgttatgtgtcgtgtgccattactaatgtttcctttcacctcacttgcttttatggctctcccgttgattctcttaaacctcatacttggcaaatcctgaaaagaatcggtcgggataattctcgtgacccttggcttctcattggtgactttaatgctttcctcttctcccatgacaaaaaagggggtaatcctgacaggggcccttccttggattttaggcaattattggactcttttaatatgtccccgattgaccccgtggggccccctcttacctggaacaacaatgtggcccatcctaagaatatccaagagcggttggactgggggatcataaacaactcttggacaaatctttttcctgaatccgctcttaaccacttgggtttcttcgggtctgaccacagagcattggaactaatcacttctcctagcccgggaacggggcccagtacccatagcaagaggtttctttttgagaatgtgtggcttcaggacccgaactgggatagaatttttgatcaatcttgggctaacccctcaaccacggaggaagctatacctaaccttatcgccactcaatctttgtgcgctcaaaagctcaacacttggaaccatacaaaaaacttcaacttcaaaaagcaaatcagtaagctagagaaagagctcgaattagcccggtccgctcctatttgggacagccgcactatagagaccattaaagatctccaatctcggcttgatgctttactctacaaggaggaagcttactggaaacagcgttctcgtacccaatggctggctcagggagataagaacacgaagttcttccaccgatttgcctcccaaaggaaaaaaacgaataaaattcaccaactccatacggcaaatggtggcatggtctctgatgaggatggaattattcgagaaattgagtctcattttgatcagttatttacctcctcaaaccccaccgattcggatgtggatatagctttggaaggaattagctgctctctctctgactctgataaatccctcttaagcgagggtttttcccaggacgaaattgagaaagctttcttccaacttccccttgacaaagcccctggcccggacggtttcaattctcacttctacaaggccaactggcatgttgtcaagaaagacgtgcttgaagctgcctccagctttctcaatggaaatgcgaatgtggcccctctaaataacaccctcatcactctc

SEQ ID NO: 49446 - DNA, 1191 bp, Cannabis sativa
ttacaataagtctactgggattctgtttaacttttgggtgtactatcacaggtcacttatttattatattaatttgcatactcaatataaattgctttttaatcacgttttcatttattgtgtgccaaatctgttaattattgtactttttaactttcctcacttctcttttttattcatatgcattatgcatgctacataaaaaatgactacacacaatgtcatttcacaataaatttatatttaatttcaatttcataggttgccaaagttttcaggtggtctaattattgaaacttactccgaaaagatatatattggtgtgccttaattttttttttttttttatatatatgtatgtaaatagtaaattatatattttgaacactattttctacactttaactagaatgtataacttaactacaatgtatatatacaaaatagtcatggttctattcttagttaaactacaaaatcgtataattatataattttttttttatatatatgtatgtaaattatacatttttgaatgttattttcttagtttctaatatattgaattgttctatattttgatatatattttgaatgttattttcttagtttctaattttttatttttaatgttatcatttttgttttaattttatttaaatgatcactaaattagttttttctttaatttattattattaggattactattaatctaatagtctaaggttttaagtgtttgtgataaattataatttttaatattgttaaaactatttttgattgtgataaagaataaatactaagttaaatgaattatatatatatgcttcattaacttattacctaaattaatctattttcattacattcaaaactttatttaagttaaataaattgtatgcttcataaatttattgctcaattaaaagagttcattgttgagcacttcactttgattacttgtaatagagagattggaataatttcatgaaataacattcgttattagtaattaataataattgttggctacttctattgtagtatcacattttatttattttcttaattttgtcaaattttttctaagaaaaagtaaaaacaatttcctttctattattacttaattttaaataatagagtaaatataatttttttgagatcgatctatacgtacttttatattaa

SEQ ID NO: 49447 - DNA, 716 bp, Cannabis sativa
tcccacatgtattagtacaactctaatcccttaaacaatccaactacttccccctttctctctaaacttttggaaccataactacatttaaatgtacatatagtatattgaggttaatattattttcaaaagtttcacaataaactttctattttattaaatgataaattaaattttgtattttttaaaatggcacaaaatgtaccctaaattcaaattttttttacactgtatatatattttaacataattaacttggagacaatttctaacacaaaaaatatgcaagaatattctcaatattttcataatatatctaaattgggttatgagtaagttttattttgacaaaaaatcaactcaaggtactattttgtattattttttaaaaaatataaagtaaaatttattatttaacaaaacaaaaagtccaaacagtaacttttgtaaaacacgagatctaaaaagatattatcctacatatttctttcagcatagctcatgagcctttactttatttttataaaaataagctaatttaaatttgttcgaacactactttaggttgtgatgaaatagaaaataaattaatttttaattttttttatttagtcacattttaataaatattaaaatgcatgtcattcaaattaattgtatataattactattttagtgtaatgattattttagttctttaaaaaaattatcatttt

SEQ ID NO: 49448 - DNA, 1179 bp, Cannabis sativa
aaaaaaaaaaaaaagaatgtaataattttatgtggggggttttatttgcattttataaaataataaatatattttattattaaaaaaatgaacttaaataatttttaaaaattacttttaatatatttttaattttttttcacatcattttatattaatttcaatacttattttaattttattttcatatatatatattttttattttttcctaaaaaaattttatataatttttttgtcataatatttgaaatataatttatttttatttgataagtatattttttaagaatatgaattaaaagaaaaaaattaaaaaaaaattagtacaattaaagatataaattttatataaaataaaaattattaaagtaaggtgtctttaaaattttttggggtgtaattaaaatttttcttttacttttctattaaatattgttaatgcactaatattatttcacatagggtcataaaagttagaggatttgagtttgccttaaatgagtttagatcgtattttagttgactcgtctaacccatttaataaacggatcgtattcgagttgacatgactaacacaaaattgacatgttaatgacatatttaaaattaatttaatacttaaacatgtaataataggtcataaatgtgttacatatgttataatatattaatgggttgacatgtttaaataaaatatatttataaacgggttacacagtcgtttcgtgtcaatcctaaacgggtcgtgtttgagttttatttttaacacaattattgaatgggtcgtgttcgggtcgaacatatacttgaaatacatgagtcttgacacaacgtaaatacaactggcaagcacgaattgccacccctaatttcacaccactttattagtattaaattgaagagtaatgatacatgcatatacattcacacacaaacttgacacacacttatatactaagtaatttaaattaattatttttatttaagatgagtctcatctatcaaaagtaacttctcacataggtgtgtgtcatgtttatatgtgatttatagaaatgttttttttagataaatatcaacttcattaaataatttagtattctgaatacaaaagatgtaagagttcaccagaaatagaaatatcagatttgctacggtcagattgataccgagaat

SEQ ID NO: 49449 - DNA, 999 bp, Cannabis sativa
ccatttttgacatacaaagagggaaaatattgtggttaattgcaataggttttcccaacaagaggatgggattttgtcgaagaacgttggaggagagaccgagtcgttggagacgagtcaagttaaagagtgagttggatgttgacctagaaaagaagttgtttgaagggaggttgaatgagattgaagtgagtgaaccagagtagccatcttggtcgagactgacttcggtgagttgttcttgactcgtcagcgaaattgcacctgaaaccacaagggttagagatgtgcagagagaaacatatgttagggttagagttttttagtttttaaatggaaaaaataaaaataaaaaaatatatattatgaggttaaagatctgatgtataaataaagtagtaaactatacatacaactccttaaatttaggatatttacatgcttgaagttggttttttttaagttagagtaatatataaaaatattttgtggaatttctttcctaaatttaacaaaaataaaaaaaaaaaatctaaaattgtatatacagggttcaacttgtttttttctttgtaaagaaactctacaaaatatatttttttagtccaatagaaaattttagtattttcaatttgatttttctcattagagtcacttttttctatatactaggttgatgcttataattagttatttttaattaagtttaattaagtgatgttaagtgcaatacatgtatgtgttgtggatattttaccagaatctagatttactaacaagtatattgaatttaacaagtatattgaattaacacaagtatattgaattaacataagtatattgaattaacatcctaattttgaattaacatcctaattaatatgaattttttaaaataatgtgataaacacataagggtttaagaaaatcttacattgattgaagcggaatataatgactcctatctcaagcccttgattcttttttgtagcagagcat

SEQ ID NO: 49450 - DNA, 919 bp, Cannabis sativa
ttgtaataacatgtgtgatacagatatccaaagaattttggatgcttctggatttacaaaacatgatgttccatttaaatacttgggcattcctatatgtccaaagaagacttcaacaaaggaatgctctattctagctgaaaagatggttgccaagattcgaacatggggctctagaaatttatcttttgctggtagggttatgcttatcaattcggttctgatggaaatccatacatattgaagtcaaataatggtacttccaaaaagtattattaaggaaattgaagctatatgtaaaggctttttatggaatggcaagcaacatttgacaggggttgctgctgtagcttggagcaagatctgcctttccaaatcagttggtggtttggatttcaaatcagttgttgaatggaatattgcagctatgtttaaatatgtttgggcgggtgcaaagaaagaggaaaatctatgggttaaatgggttcattgtgtgtatgttaaaggagaagattagtggaattatagtgctaaaacaagtgacagttggtactggaagaaattggtcactttaaaagaaaaaatgaaggagttgtctgatacagggaaaagagaagctctctgcagcaaatacaaaatatcccaagggtatcaaaagttggttcctacatgtatgaaagagcattggactactgttgtttgcagcagattcaattgtcccaaacatagttttattccgtggttgtcaatgctgaagaaactcaagaccaaggacagaattaaaaagtttaaaccagaggttgatgcttggtatttgttatgcagcaatgatgaggtgaccattgaccacttgttctatgcttgtccgtttgcttaggagtgcttgaatttgaccaaaaattggctgcaatggaggatg

SEQ ID NO: 49451 - DNA, 1113 bp, Cannabis sativa
gatcttattatcttcttagctgcgaaaacacttgttctttattgtgccttagatggtctacattttggtaatttattgaggtgcatatgttgtgacttgtgggatgatagctcttcatattacttttattaccacttgtgtatatactactaatgtgggatcctaactgtatacagtgcatatctgatagggagagagtgtggacatttatgaaatttgtgttaattttcttgcagaagctgctggtgatcatagtattttcaacatttattttagccaatgatcaatattctgtctttattgcctgtgtagacaattgcccccttcgaagtttgaacttatttatgtgtgtatttgttgcaggtgccttgatagagctgctattgtatctgatgcggagaataatagcggcaacttctctgatccatggaggctttgcactgtaactcaggtggaggaactgaagattgtgatccgaatgttccccgtttgggctactggaatagtcttttccgctgtttatgcacaaatgtctacaatgtttgtggagcaaggcacaatgatggacacaaaaattggttcatttgtcattcctccagcctctctctccactttcgatgtcatcagtgttattttctgggttcctgtttacgacagaataattgtcccaattgcaagaaaatttaccggtaaggaaaggggcttctcagagttgcaaaggatgggaattggccttgctgtttcggttctgtgcatgtctgctgcagctgtgatagaaattaatcgactgaggctagccaaagaacttggcttagttgatgaagccgtaccagtgcctatttctatcttatggcaaataccccaatactttctgttgggtgcagccgagatattctttttcatcgggcaacttgagttcttctacgatcaatctcctgatgctatgcggagtttatgcagtgcattggctcttctaacaacttcacttgggaattatttgagtgcatttattctcactgttgtaacctacttcacaaccaaaggcgggaaaacgggttggatacctgacaatctgaatgagggtcatctcgattattatttctggcttttggc

SEQ ID NO: 49452 - DNA, 921 bp, Cannabis sativa
tatattactatacatacaaaataacatataatgcataaaactataactctcaaaatttaatgctaattaatattatatggtactaatatttcacatgtaacatacacataatacaaaataatatatatatgttacatattttatatacatataatatatatattttaacatataaactcatataatatatattttttccacataatatataatatatattgtgagaaaattataactaagggtacaaaatcaaataactaacaatgataaaaataacaaatcacgatcaatagttggagaagaacatggatgaacatagtataaaactagaaatgaaaacaaagcaagaaataataaaatcaacacagagatatatacatgttcaagtttggtagattgatgtgatatatgactctactccagttctagaaccaccaaatcctctttatttaattgagcaagaacaatgtacattacagtcgagatagattctctgatgagttctctcaaagtggtttcaactctcacactcttacctaagaatcttctttatctaaagatgattcttcatacaaaaatccaaatctaatctctctctcttctcgttacctttctctctctacctctcaatcttttctctttctctatctcgaaactcactttgatcgttgtctctaaaataagtgttggtggtatttataggcttaggatcaagatcctaaagtcggtgatggctgcaagaagcgaggttgttaagttagttaggcaataattaacttaatcaactctcttttgagcgaaatcttcacagcatgccgcttctggaaacgtgtatgagagctttcaaaaacacttcgcagaaggaacttctggataggatagagctagttggagtcaactatctggaactcctttttaggt

SEQ ID NO: 49453 - DNA, 2965 bp, Cannabis sativa
tttgatgttgtaactatcttattttagaaaaaatattttgacatctattttcaaatacaaagattaagaaagattttgcaataaaaagttgtaactagcgcttcttttaaaatatattatttatttatattatcagttttaattatgcatttgatttatattttaatacttagatcctatcactctgatttgattattcctaattaatctaacttagaatctaaatataaattaatattatatataatagtaatgatgtatatatatgtgtaatattttttttatatatagatacattaaaatattacttagaattattgttacaaatatttctaatatagtgaagtatacagtacttatgaaatgatttatatatatatacttctgcgtcaattttaacaatttaattatatgaagaaaaaaatgttcttctttttctttatttttaaaaaatattcttgttaatttttttttttttgacgtaatgttttcgatcataaatcataaataaagttgtatatgtatacatagctaaggactaaaagatcaattacaaaaacagttgagaaagctgttagaacagctagaatctaacaattttaacttactaattgacatgactaattgatataatacacactgtaaaactctcccttaagatggagtgtagatatttgtcacacccaacttgaacattagagtttggaattaaatgggcaatgaagctttggtgatcatgatgtctgtgatggtatgttgaaatggaacatgtgagagtttgaagcggttattgttgacttgttcttgaaatttttctcaaataatatgacaattaatgtcaacatgctttgttcgttcttgaaagacagcattctcagagatgtggatcacaacttgaatgtcccaatagcgtgtggcaggttgatagtgttggatgccaaagttagctagtaagttgagaggccaaagaaattcacaactggtgttagccattctcttatactcagcttctacatatgatttggaaatagtaattcacttttttaatttccatgagatatttttccaggaatgtgcaaaaaccagtaatggatcttcttgtataagggcaagtaccccaattagtatgacgaaatgcatgtaattgaaggaattgtgatgttaatgcttcatttggtggtggtgaagatgaatggaacaataatatccttggcttggagtacctttgagataaaggatgcatagagtagtttttatgtgaggttttcaagggtcacataagtattgagtgagcatattgatcgcatatgagataacaggcctggtaatgatcaagtagatgagcttgtcaattaagcttttataagaagtaggatccaagataggaggaccggtatctttgcaaggcaactagtttaattgagaatctgcaatatataaggcctttgggagagaaaattcccagatttgggatctcccagtctctatactaaaaaaattgtaaatgacctaaatctttgaacttcatatgagaatttagataagctttaaaagcattcattaaagcattcactacaaagtccttgttggtagcgatgacaatgccatctacatagactagtactgcatagaaagcattgtagtagtccttaaaataaagattgatcaaaagcaaattgatagaaagaaagcaaggttaagttaggttttacaaaccactgtcgagtggcattttttaagccataaaggctttgtttagctttcatacaatattgggataaagctccccctcatgtgtataacccttatgaatggtcatatagattacttcttctactaagtcacgaaaagcattgttaatgtctaatttatgtaatgaccattttaatggccactagtgcaaataatagttttagggtgttgaattttgtaacaaatacaaatatctcaacataatttatgccaagttgttgagcatactgtttttctacaaaatgtgccttctatggatcaatgtcaccattggactagtattttattctgtagacacaattttgttaccaatgatatgatggccaagaggtaaggaagcaatgatccgtgttttaattcttttgagagctaaaaattcatcatccatagctcgaggccattataaaagttttgtagcttgaatatatgtaacaccctactaacctaggcagactacaataattattaaatgtcatgtattgtccattgctagccaaaggatttattaaaagatttgattaattaaaacttttaaataaacataaactttaatatataactataaatatataaagaatttacatattctgagatatcgttttttttttcaaatacaacaacatattacatatacaaaaggtgtgacccagtgactaacaaaatttgagcatttgtcgtcccgaacaccagaatactctaggcctaaccaatcatattattgactcaaaaatctggatgagacttctaagtcacacatgctcattagattggcaagaatgaaaaagtggttaagtaattgtaataaagacaacaaatttacaatagttcactccctgtatcgtgacagtaatggagttatgtctacttcaagtttttatttctcatgagatggtaatttcaaaaaaacgacttgcgtcagaagctttaatttttaaaccttgtgggtagttttctaaatatgaaaatgagcttatggagctcttcttttataggtgaaagaggcccacaaaaatagaaaaaatacaaattggatgtttttttaccgttgatgatgatctaacggtgaaaattagctctttatggtgatggctatttttaagagcccggtgggtcctctgcgggtaacccatagcttattttttgtaactcccttggggtgaattttgatgatgatagcttcagaattacgattaaagtgtgagacatgacttga

SEQ ID NO: 49454 - DNA, 2201 bp, Cannabis sativa
ataattaaaataaataattaaatataaggaaatgaatcataaaatataattcataaaattttaagttagtgatgcttattgagtctctatttttgttaagtatatttataatgttgaaaattaggaggtaaacatggatcgtcgttggatcaataatccagataggctgtcattagaatatgctgctggtattactgaattcatagatattgcaaagcaatttgttgattctaaagggaatgtgctatgtccttgttgtcgatgcgtaaacaagcaatcacaatctatgcgggtgatcaagctgcacttgattactcatggttttctatgtacttacactaaatggtaccaccatggtgagcaactagaggaagtacaaaataaagagttatttgatagtgaggaagttgataatgaaaatgacaatttagctagaggtctacatgatgctattggtggtgagtactttgacattggtccaactagtgatttcactaatactaaattccaacataatgggggtgacaagtatgatgcattattcgagtctcttcagaagcctttatatgaaaattgtaaaaacttttctgtcttaagtgctgttgtaaagttgatgaatgtgaaggtgcttaacaaattgactgataaagcattcgatgaccttctaaagtgtttgaaagatatattacctgatggcaatcatttcccggatgactattaccagacaaggaagcttctttgtgaagtaggattagggtatgagcaaattgatgtttgccaatatgattgtgcattattctatggtgagcatgcaaatgccttgttctgtcctatatgcaatactagtcgttatgttcgaaacaaaatcccacataaacgattaagatggtttccaataaaagatagacttaagcgattatttagttctaagcatacttctaaggatatgcgttggcataaagaggtacgcaaagaagaagatggaatattgcgtcatcctgctgatggtttggcttggaagcattttgatgaagtatatcctgagtttgcagcagattcaaggagtgtacgaatgggtttggcatccgatggatttaaccctttttcaaatatgacatcaacctatagtttgtggccagtaatattaattccatataacatgcccccttgggttagcacaaatggaacaaactatctcatgtcattattaataccaggtccaaaatcacctggaaaagattatgatgtgttcttaaagccgctcattgaagagcttaaagaactatgggagggtgtcgaggcgtatgattcatatgagaaatgttcatttagacttcaagttgcagtcttgtggacaattagtgattttccagcttacgcgtatttgtcggggtggagcactgcaggtaaattagcatgccctgtgtgtttaggagatacacgatatagaagaataactgacaaacaatgtttttcatgggacatcgttgttatctgaatataaaccattcttggcgaaagagtaaagaatatgatggatctactgaattacgtggcccccctagagattttacgggtgatgacattttacggcagctggatgaggttcctattcgcacatctggtaaggcaccaagtaattcctctggaaaacgtaagcgtggagagaatgagttaaattggtgtaaaaagagtgtattgtttgagttgccatattggtcaaaactcttactacgtcacaatcttgatgtgatgcacatagagaaaaatgtttgcgataacattattggtacacttttagatattgaaggtaaatctaaagacaatttgaaagctcgtaaagacttagaaatcttgaagatccgtgaagagctttggctaaagaagtcatcttctaacaagtttgaaaaacctcatgccagctatactttgacgaaagaagaatgtaaggaattttgccaattcattcaaactgttagattgccagatggatatgcctcaaatataagtcgatgtgtaacagataacgacaaattagctggaatgaaaactcatgattgtcatgttttacttcataagatattaccagttgcattacttccttttctaacgaagactattcgtggtactttgattgaattatgtcaattctttcaaaaaatttgtgcaaaaactatacgaacttgtgacattgaagaatt

SEQ ID NO: 49455 - DNA, 926 bp, Cannabis sativa
aaataagttgtttaaactaatatttttagtataataaattattctaaattctaaaaaaattattattgtaaatgtgcatgtttaattgcactatctatattttcttaaaaataatttgttaatgtaacttatgctcaaaatataattacattataaatatttatttaattaagtaaattaaattagttcaaattgtatgtatataattttttttaagaactcttcaattgtactaaattattattttttattagaaaactatttaaaacagaaccaaatataataattaaaaaagtgtgttggtaatatttattataatttaagtatatttactaaaataaaaaaaaaggctataaattcataaagaaaaatatataccctttattatttatcctactttataataattaatattgtttattatactggtttagattctgatttatggacagctttttggaagattaatgttcaaccgaaagtcttacattttggttggcgtgctctatttggaaccttggctacaaaagtccaactcaactccaaacatgttcctattaatcagcaatgtataatctgcaatgctacagcagagtctattcagcatgtcctggtagattgttcctttgccaggtcctgttggcatcggtcttctgtcaacactatcacagcttttcaacagccatttcatgagtggttcaaacagattatgaagatcaacaatcctactcaagttgaagaagctataatggtggcatgggcaatttagaatgcaagaaacaagctactttggaaccagaaaagtacattagctttagatgtggttctgtcagcaagatccactactacgaaaagtataattcacgtcggttttataaaccgacgtatataccgtagtcacaaatagttttttattagcgtcattt

SEQ ID NO: 49456 - DNA, 1027 bp, Cannabis sativa
aatatacttactttaatttattttattaaaaataatgataattacaaatgtatatatacatataatatagtaatagcttgtgacaaatttttatcagataattgattgatatgttaaaccatgcatctccaatgtatatatactttaaaaaatttgttatataaatttgaaacaaattttactcatgtgtcaaatttgattcaaatactactcatgtgtcaaatttgattcaaatactattaaagcaatgaaaaaataattgagaaaaactatatgttaccacttgattactatatatattatttattaataagtttctactcgcaatattttaggggtgtgcataaatcatccaatctaataataaccgaccgattcaattacaaccaatctccaaacaataaaaatccaattgtgatcggatcagattggatgttatttttgaatatctaattggatcggatcaaatgttgaatgaggtgtttaaaaatccagtacatccaacatccaatcgaactaattagtattttcatttagtttggatgagtaattagattttatattattatacttaaaatatatacgcatatataaaattaacattaaaatttactttccaatccaatacatactggacctaaaatattagatggatccgatccgataaaaaaaaatactaggtctaaaatattaaataaacgtaaattaaaccaataaatatatatgaaataaatccaacagataatgatcgaatccaacatctaatggatcatatgactaaaattaattagattggatcgtatggtaaaatctaacatataattaaatcgaatctaaataaacttaaaaatattaaatgtgatgcaataaatacccctaacagccttactaatttccataatcataatactaataataaaaaatatattgaattatatatatttttagcaatttaatattatacatttttctttttgaagtgaatggatgttgatatacaattgtcaaggagtcaactaactagtct

SEQ ID NO: 49457 - DNA, 864 bp, Cannabis sativa
tatagtactactaataagttgaaatttccgatgaggcatcgttttggtgaacatctaaacccaatttagggacttgacatcttccttggtcagagagagatgtgcatctcgccgggtagcaacagggatctgatataaaattgcatctaccaccagttttgatgcatctttctataggcacacattttcgattctcaccccatatccaatcaccttcacatgccagtccttcacagcaaatcttctcttgtgcccaatgacagtattcatcaagtatcctacatcgcgttgcgcccaaattcggatcaatatccggttttagtcgaccaaagcatcccataaccatcacacccaccactactaatgtcgtcgtcacaataaacttcttcattcttactctacaattcgattttttttttctcttgtgatataatggccattggccaatggtgactacgtcctatttataggagaaaggaaactcataataagtcataatttaatagttcagttagattaggtgagacacgttatattgattgaacacgagtttcttgttatatgcatataattgtgtggtgcacctatgaatgtccttacaaattataagcttgtggggatcaatagcagagtttgtcgttttttagatggcttatttctgtttcacacaactgtagtatattccactttccacctcatcaccaagaacacagcaaacatcaagaaaagaaagattcattgtttgctacccaccatttgttccatagctcaattagggtagtagctaaatcgaaatacctctaaccattaatctttttgagcttcaatttcacacgagtttgtgatctagctaaaaaaaaaaaa

SEQ ID NO: 49458 - DNA, 1557 bp, Cannabis sativa
tgaattgaattgtactaataaaacaataataatattacacttcaaaaaaaagtattatacaccagaagtattttttagcatttttttaaaataaattaaccaaaattaatcgatataaatcaatacattaaacttgcatgctttgactcttttattttcatggattcatgtgcatcatgcatggatgaattaatagagaatttatttaaacagatgttatcctcaattttttttaaaaaataattataattttttagacttcatcataacattttttttcaatgaatttatcattgaccaaaaaagcacagtactaaacttgatctgactgcaaattgatccactgatcttcacagatctaaacaaaataaaaattatttttcactctttttggcactatttctaaacaattaattcactaaaatttatattgtttaataaaattatactaaacataaacatatattaaattactaaaattatatcataagattatagcttaatagctactatttagaatgggttaatataattagcaaaggaatagtaatgtaaaatattactttatttattttgagggtagaaccttgaaatattattaccttagtatatataactacttttgaaaaaggtaattttgatgcttggaattaaattattctcttccattatattagtttgaatagcatttttaaattaataaataaatttaaataccattaatattatgatttattataaaaaaaatattacgatatatatttaatttgggagattattggtttttttaattgagttatttttattatgttataagcaataagatatataaatgtgcattatacgtaaattttacgcagatattggtatatataaataatatagtgataaaatatatagaaatgttcattttaattaataaaaaatataaaaaaatttaatatttactaattaataatatatttctttgaaaattagctagtttatttttatgtataattaacattaaatatatataataaaaaaatatttttattttaattttttaaaataatatatgagattcaggtgttaaatcattttataatataataagtataaattaaaatataataaatatattattatctagataatatatctatattaagtgtatggtaaataaatgtgtcacatattaagtgtatggttgtaacctacatgttgtaatttggagaggagttacaatttgttgtcacttgtaactcttgtgttgatcacacattattagtgtaataaaagaattattacgcaatttgatttaaggaattcaaaactatgatgttatagttgttacaaaatagattaatactttcatttattggagagaaatgagatggtgtgtttaaattctaagtgtgagactataaaagaagtctttggtgctagctcatttaggatgagaaattttctatcaaaaaagtacattgctagaaaaccctaaggcttgataattctcaaagctatttccatcagagttctcttaattagtacttggaatcagaataatcaatgaga

SEQ ID NO: 49459 - DNA, 4926 bp, Cannabis sativa
tcttcctctttcttgttctgcatttctgttctttcattcatggcaaggagatttaatatggtatcagagcagtttccacctcttgtggcaaacatggcgactgtgggaaataactctgctgctgctggaaacaatactactggtacaggaatcaatggagctcaaactcccagcagaaatcacacgaatcaagatccggtgttcttcaatcacagcatttcaatccgactgaacgatcacaacttctttctctggaaacaacagatcttggctgcaataaagggaaatcggttgatgaaatacattacagaaccaccgccaccataatttctcaatgaagaaggtgctgcaacaatgagaatcaatccgatttatgctaattgggaggttcaagatcagctcctggtgtcatggttactgtcatcaatgacataaatcttgttaacaagaatggttggatgcaacacttcgcaccagatctgggaagcattggagaagcacttcaccttgaaggtctcatcgaaagttcttgagtttcgaaccaagcttcaaaacttgaagaaaggttctttgagtttgaatgattatctgctaaaagttaaacatactgttgatcttttagcttcagttggagaagtattgagtgattgagatcatgtggctgctattttcaaaggtttacctagtgagtatgatacctttgtcatctcctccaacacaagaattgaaaattacactgttggtgaaatagaagctcttcctcttgcttctgaatcgaggattgaaaaatcgagcaaggatgttgatttcagtgctaatctcactacttctgaacttgatccagtagctgaagctaatattgcctttagaagatttagacaggagcagcagtatgcaggcaaaggaaatcaaaatttcaccaatgctaatggccaatttcagttcaacaggaacaacacatgtgcaaacgagtttgctcctaatcagaattatggaggcagaggtggattttccattagcagaggtggcagatctggagtgagctcaaataataggccacaatgtcaattgtgcctaaggtttggacacactgtgcaagcctatttttatcgctttgacaaagctttctcaggtccatctctcagctcatccagtagcagctctcaactgtctaatcagcctcatacacaagccaatttgacaacatccaacaccagcaatgataccaactggtatcccgactctggagccactaatcattgcactccacaggctcaaaacttggcaaactgctttgactatgatggtcaagatcagatgtatgttggtgatggttcatgtttttctataaaacacattggtcaatcctttatttttctaaattgtcatctcaacctcttgcactaaataacttgctgcatgttcctgaaattacaaagaatctaattagtgtctcaaaatttgctcatgacaataatgttttctttgaatttcatgatgatatgtgtcttgttaaggacaaattgactcattctaccttgctgatggggaggcacaagaatggcctgtattcttttgagccatctcagttcacacttgggccttcaaattctgaacaaactcagtcacaccagccatccttatccaataacagctgccaatctgcttcaaaaagcacatttgttgtcactttaaataacactaaagcctctgtttctagctgtattaagtgcaatgctgatgttgaaaatgattttaccttgtggcataataggctagggcatccatctgaaaaggttgtacaaaaagtcttgcaaacttgtaatatttctctcagcaataaaatttctcagttttcaatttgctcagcctgttgccttggtaaaatccacaaatttcccttcccaaaggcctccaatactgttgtatccgaaccactacagctagtggtttcagatttatggggaccctcacatactacttccttcaatggctataagtattacattcattttgttgatgttttctctcggttcacttggttatacttgctgaaaaacaagtctgatgcctttaaggtttttctaaattttaaagccgaggctgaacttcaaataggaaaacctcttaaaacattacaaaccgattgggggtgagttaagatccttttccacctatcttgctgagaatggaatacatcatagacatccttgtcccactacacatcaacaaaatggtcttgttgaacgcaagcatagacacattgttgagaatggccttgccttgttggctcaagcatctttacctctcaaattttgggatgaagcatttagaaccacagtctacattcataacagcttgcccacacctgtgttgaacaataaatgtcctcttgaaaccttgttcaacatcaaacccgattactcatcctttaaaacctttggttgtaaatgcttcccaaatataaggccatataacaaacacaaacttgagtttagatcctcaccttgcacttttcttggttatagccttaatcataagggctataaatgtcttgataaaaatgggaggctctacatctcaagggatgttgtttttgaggaatttgtctttccttatgaagagtcaactgtccaaaccagtagcacttatgttccaactgtccaaccttcagttgtgtctgctattataccaagttgttctcatcctaagacacattataccatgacagattcgctgtcaaataatgtagcaggaattgaccaacatgttttatttgacaatcctcaatcatctgatatttctcaacctattacatctgtttttgtacctaacagttggcccacaagccaacaagctgtttttgatgtaggtcaatccttaatgcaaagtgctgaaacacaagatgaaccaccagaacatgaggcatctgctgaaacagtgcagtaaacagcagtagcacagaaacatcagtcgacacctgctcctgttgctgattctactcctgtcacagaagttgatttacagcagccacaccaaactatgcaggctaccacaccagatattgctagttgtgcacccaatcctaaacaacaaaataaacacagcatgaagaccagatctaaatccagaattcacaagccaaaaacctttatggacactaaagttcctaccacactgcaagaggcattgcaaaacattcaatggaacaatgccatggctaatgaagttctggctctaacccgaaataagacatatactctagttaagttgcctgctggaagaaaggctattggttgtaaatgggtctacagaatcaaggaaaatccagatggtacagttgaaaaactcaaagctaggttggttgctaaaggtttccatcaacaaccagggtttgacttcacagagacatttagtccggtggtgaaaccagtgacaattatagctgtcttgactcttgctttgtccaagggttggactataagacaacttgatgtcaacaaggcttttctcaatggagaattacaagagggggtatacatggtacaaccacctggttttgaagttcctagccaaactgatctagtttgcaagcttaataaggccctttatggactcaaacaagctcctagagcttggtttgacaagctgcaacacagtttggtatctcttggttttgtatcctccaattcagatcactccctgtttacactacacactcctacattcaccaccttggtgcttgtatatgttgatgatatcattgttacaggaagtgatcccattgcaatcactgatctcattgccactctcaattctcagtttgctcttaaagatatgggtcctttgcattactttctgggagtcgaggttcaacatactgatcagggtttgcatctttgtcaggctaagtacgctcgggatcttctggtcaaggctcaaatggctaatgcaaagccttctccaacacctatgatcagtaccattcgtttatcagctcaccagggggaaccattggcagatgttcaacactatcgttccatagtaggtgctctgcaatacctcactatcactcgacccgaactctcctttagtgtgaataaagtctgccaatttatgcagaagcccttaaccacacattggatggctgttaaacgaattctcaggtacattagtggcactataaactttggtcttcacttgaaaagacctagctcatatgatttggttgcattctgtgatgccgattgggcttcagaccctgatgacagacgttccaccactggttttgccatcttctttggctcaaacttgatcacttggaaaagtaaaaagcaaccaacagtctctcggtcaagcacagaagcagagtatcgaagtgtggccaatgtaactgctgaattaacatggctgcactacctattttccgagcttaaaattcagcagcctcaacctcctacaatttggtgtgacaatttgagtacagtaatgttgactcaaaatccggttcttcatgcaaggactaaacatattgaacttgacttatactttgttcgggaaaaggtgctcaacctgttggtgcaaatcaacattgaaggtgcaaatcaacattgaaggtgctcaacctgttggtgcaaatcaacatgtccttgcctatgatcaattagctgataaattaactaaggctatttcgactgaaaggttctctgtgttcagaaacaaactcaacattgaagatgcttcaattctgagtttgaggggaggtgttagagctaattgacagctcagctttgttttctgttttgctgatagttagttatgcaattaatctagttcagtgtacagctataattctgttatgattgttgttgtaattggttgttagttaattgttactctgccgtgcttgtataaatactgttacat

SEQ ID NO: 49460 - DNA, 531 bp, Cannabis sativa
tttatgtattgtagtgagagtaaaaagccaaaggtagttaacaagtttatttcaaccacactttaatgcaaacacgtccatcggtccatgtgatattatttgtctttactgtgtatgaacatgaaacatagctgtagctactggttatatagttcaatggttcttctgaattttgattagactttagtttgatgagttgttgaatgttaatttatatgtacaataaagctagttattagtaaaatttatcactagttatggaaaatcatataaagctagcacacttatagaaattttacattatatagttatatacaggtgcgatctacatataaccgaagtggagtagtcgtccacctaaaaaaaatatatatacaatttaattagttatgatatatatttgtaataattaaaaataatatttttgaacataatattaaatttggtgtaatgattaagcatatcttgttagagaacaagaattctaatctcattaaatgtatttttctcctttttaaatttacttttttg

SEQ ID NO: 49461 - DNA, 824 bp, Cannabis sativa
gatggtgagacagaggtgctgcgaaatggaaataggtctggagacattcctattttggagagtaataacatgaaccataggattttgaatgttttgaccgttgaagtggataaaagaaatgttgggcttaatgataatgggccgtctattataaaggatgggctgacttgtcaacataagggtgggctgtctattcaacaaaagggtaaaggaataagtccatttgatcaaaatcccactttttctaattctgtccgtgggcctcctcttttttctaatgttagtgggtcgtctgggccccagttggtgggatcacgtgaattaattaattccactaatcttttggaggggccggctattgagggagatgtttctatagctattgggcccaactcctcccctcataatgttgttgggctcgtgggaggtaggtcttctttgcctagagcttcaattggactcgagcaacaatctaatgaagacatagctttggcccaattttttaaagctcaggaaagcttgctgcatgatctcaaacactttggcaacctcgatttatatgaaattcggaaaataggaggagacattggggtcccggcttcctctgaagttaatgagagaacgacaccttttaagaaacggaagttcgaagcatctgcctctctatgctctaggcctcataaagttccacgcaagtaccctgatgttgttcgtgattttccctgggactctacgccaaaagctaaagactctgaccttgtgagtgaggacccttctgaggacagctctagttccccgagttgttctggaattttgaagaatcc

SEQ ID NO: 49462 - DNA, 1298 bp, Cannabis sativa
  modified_base (1029)..(1036): a, c, t, g, unknown or other
aattataaggaaaataacggttctttaacagtctactaagaggagagcgtgaatttttcaagaatctccaactttatttggctagcaatgcttgattaaaatgcacaaaagaacgaaaactcatactgccatctgatttggttttgcaaagcaacttctaattgtgcagtgtattttcgagtcagtctcattgaaacctcaccaaaagttagacattatagattaaaaaaaaaaacctaaatttattaagttaaatataagtaaaagtttatacatgaacaaaattaaaaaatgcaactactctttatttatttattaaaatggtatagattaatttaactataatatatacaatagttttacttctgcacacatgcaaccccgtgattagagatgaaaatttatatcgcggggatggataatcgcagacccgcccttaatggggtggggattgccggcttggtagttaatgaggcgatagtgggaaacaatttcaatacctgaagccagatggggccggtgttagagattttattacaatagaaataaatcaagacattacaactctattgcaagataatacaaagaccaataaataaattaaaaaaatatcacgaaacatatactacactatatatatgtatttatatgtatattgatatatatatatataagaaatgtagaataataagaatatgtatagaaatactcactctcaaccttgagtgtagattagtggggatcactaagactcgaacaaggtatcacactttaatccaaaagcttatttctcctgtctctaagcactaaggtaactctctaagaaatagctttgaaaattatcaagccttttaggattccttgcaaattgctttgttgatagaaacttgattcatctcattatgagcaccttatacctctttatatagtgtttaggatattaccatttgaaattcaagctcataacccccatggatgttatggactcaaatgtaacaaatacgcacaccataactcctatagcattannnnnnnnaaattaagatgtgtaatacctttttacacgcttaatattagtgatagttgtggaggttactcatagtaacaagtaactcccccatatgttataaaatagtggcaactaatatatattgtcatatgttacatattattagtttattacccatatttagtctatatattatacttattataaataatataacaatccctcacaagattaaatattatctctttagtaacaaatttgtaacttttgtaatatttatttaatcaat

SEQ ID NO: 49463 - DNA, 1609 bp, Cannabis sativa
gtatgaacctatacataattaaaaggtaatttataaaaatcatccaatattcaatagaaattgtgtaattaatccaagtgaaattaaaattagagacctcttgtcaatatttaagggcgcaaatttgccctgcattgacgaatcccacgttcttgtaaaggaaatttccacttgttcctcattttctacaattacactcaaactcgtcccctttatcctgtgcatatataatgcaaaatataattgagttgagttatatgtgacacaattagtgcagtggagatgagtttaaaataatatatgcactgatagtattcagtcttaatattaatacaatatcacaattgagtattaagtttcacatatatataatatgagactctctaataaaaagaggtaaaatttatcaaggaactctgactctctatacttttataaaaaagaagtaaaaggtaaagaaaatggtaaataattagaaatataaattaaggctaagtctgtgattactattctctatcattatcaaacacgcaaaagaaaaggtgcaattttttgtgaggtaaaaaatggctgcactgaagtaattaaactgttactaatttatgtgagtaagaagagtatagatggttatggaccctatggttaagagggtaattaaaaatagagataacatacacatcaaatattccagttgtgataccagtggttggtgagttccagaccatgtcccagtacctatacaaatacacgtaaataaatcaataaaaaaatataactaagtaaaatataaataagagaatgaaatgaacatatacattttgaaaatagcaaataatattgttaataaatttgacacattttaatgttataccctctattggattcttcattacgaacttcaagcaagttgtctatgccattatatcgtattccagtaacgattccatctgggtttgacaatgtaatttgtactatcccattatccatcatcacctgcacttagtcaacaaaatcataattaattaagagacataatataataaatactaactaatatgagatatatgattaattagcttgaaaatgaattacgtacatggtcatcttcaatgtacaacttcactccaagaggtgacatgtcttattagtgttcttaataatttgtctacagctaaagagtaaagactcgtatgttaatttttaatttaaacttttaattcctcaaaattcttgaatctctagcttttagtactacgtacttctacccctgcaaactgcttcaccacatgaataatgacattatgaatttaaataaacacatacatatatatagatatttatgtattagtgaatttcttgaagataaagcaattcttctttttttaaaaaaattatccctttcctctttatgatcatctctttgcttagtcgccaccattgtttgttgggttggatatatcgtgcaagagtcgctaaattgattagccaaaacacaattatatacatatatatatatatatggctgttatcctatacacatgaatttgataagctttggaaaattccatgtaatataaatatatacatagttatttatttgtacataaat

SEQ ID NO: 49464 - DNA, 1337 bp, Cannabis sativa
gatattgggggttttattaggggcaaacaatgaaatttccccaatagtaatgtacaccattttgataaaaaaaagagtagttaaattattagctggaaagaaaatatcaatatggagttctacacttatgatatgttgagtgatttgttttatctcatgctcacaatttttctatcatttcaaatcttcaacctattgtctctatgcaccaaaactcaacaacaacttccactagggccaagacccttgcccataattggcaaccttttcgaacttggtcacaatccccataaatcatttgcaaggttgtctaatattcatggcccaatcataagtttgaagctcggccaaatcaccacagttgtggtttcttcatcataaatggccaaaaaatcctccaaactcatgacaacctcttctctaacagaactatccaagactcattatgagcctacaatcacaacaagcacagtgtgtcattaagtccggtctctcctaattggagaaaccttagaaaaatatgccataacaacttgtccaccgtatcaattaaaaaacaattatcacgagcttctggataaacccccttgacctctaagctttaactctcccttttgaacatcaattagtgctttctcggttaccaagaagggtcttcctaagatgataggaacattattgtcttcttccatgttgatgactataaaatcagcaggaaatataaaatttttcacctgaacaaggacatcttcgattatttctcttggatgggctaaagaaggattagctagctctagtgttatagttgttggttttgcctccccaagttgtagcctcttaaatactgagaaaggcataaggttgatgctagccccatatcacacaatgcatggatattcttaagccttccaatagttcatggtatggtaaaactcccaggatctttcagcttagaagggagtttcttctgaagtattgcattacactcctctgttagagctactatctcaaattcctccatcttccttttctttgatagaatctgcttcatgaatttgacgtagcttggcatttgttccaaggcctccgtaaaaggaatgttgatatgtaatttttaaatacttcaaggaatttgctaaactgcttatccaaaattcgtactcccttgattgcttctcaattgcttcctaaaaataattgaagtccacttcttttatagccaataaggaataaaaaagatagaaaaagataacccacgctaaagaatcctaatctaccttgaattagatgggcgggtcgcgtcatgtacttcttatgtcgcggcccgtgttgcaaat

SEQ ID NO: 49465 - DNA, 1180 bp, Cannabis sativa
  modified_base (37)..(40): a, c, t, g, unknown or other
  modified_base (755)..(762): a, c, t, g, unknown or other
  modified_base (1131)..(1143): a, c, t, g, unknown or other
actaaaatactagaaaaatacaaacacatattataannnntaaaatattaataaaaagatagctaatatacaaatacttagaaaatacttagagcaatatgaatttgtatttacttaacttttcaactgaatttttatttatgctttaatttttatttataattttagatttttaataaaagttaaaaaaattgtgttaattaaaggtgaaaaaaaatcataggaagcccttatggagtcggttatttcataataatctacgtcatagggttcctataacgacaattatttcatacccctttatcgtcgcctaaaacagcgtcggtagtaaattaaaaaaattgacgttgaacgaccttaaaaattgcatctaataagccctattttctagtagtgtattacatggaaaacgatacgtatatagtacaaaaatcttacttttaatcacaatagaacttgtgattaaaggtgaaaaatttattactaattataattatcatttttatgttgtgactaaaaggtccgtagctaaaggtattagtcacaagaatcacaatatttgttgtgactaaatatatttttagtcacaataattattgtgactaaaacaaatttagtgacaagttattttcaaatacttagttttagtcacaagcagggtgggccctaggtataggcgggcgaggcttgcgcctagggccagtcattttaggggcccaagtaaaaaaatacttttttaaaaatatatatatatnnnnnnnnaatttttaaaaatactatttatcattatagtaagagtccatttttttttttttttgcctataacccatttcaactcagggtcagccctggtcacaagtatcttatgttgtgactaaaaatcatatttagccacaaaaaaattatgttgtgactaaaaaattattactaaaagtagtttttttttttgctagtgacaacttgtatttaaatattatttttagtcacaagtaacttttttttgtgactaaatataattttagttacaataaaaattatatttagtcaaaaaaaatttatgttatgattaaaatattatcactaaaagtaatttttttttaagaaattaccccatataatattttttttaannnnnnnnnnnnntttcaaatttacgatttgggtttctaaagtggttgca

SEQ ID NO: 49466 - DNA, 924 bp, Cannabis sativa
acatgagatagacactgatgcctaatagcaatgctcctggtctaggagaccacggaatggcgtcagaggggttgatgcctccttcgagatacggagatcactataagaaattgtactattaccggcacatttttgcgccagcaaaaatacactaaatgcgtcgacaaatctttaccagcgcataattacgttgacaaaaaaagccagcgatacttggtcagtaaaagtgtttttaccgatacaaaggtgaattgcgccggtgagaatagcttgtgcatgtgataatttgtgctataaaaacttatgcgccgagacaaacgacgactctaatccgcgctttcatagcttataaaatctttgccagcgcacaaagcttcgcgactttttccttgattggcgcaaaaggttttgccaacgcacatattgccccgacaaaacctttgacgccaatgttaaatttggcgcgagtgattcaagggtaagttttacaggcacaataatgcgctggcaaaataatttttttaaaattaataatttaattataataattataattaaattaattataaatgtaaaactatatttgaaagatacataattaaaaaaaaaaaacaaatagtattacattgataattaaaaaaaaaaatatattgatcgaactaatatacaaaaatattcgtttagtactaaaattagtaagtaataaaaaattgtaaaattaatagtaaataaataaaatattaaaaaatgttctaaaaaaaagtgaagttctaactgtggtataaaatatttaatgttataaagacgggcaatgtcatcgtcgttgttgtatagagtctcgggaggatgcgatgacaatccagcaccaggagcagtgtggaatgatagaagatccatcaaaggcaagttaaaactcggcacaac

SEQ ID NO: 49467 - DNA, 819 bp, Cannabis sativa
cccaattcattcatgctcccactcatgtgcactgggaagcttgcaaacgccttcttcggtacttgataggcactatttctgatgggattcttctcaaacccgtgtctcggatgtctctttctgcatattctgatgcagactgggctagctgcgttgatgaccgaagatctactgggggatatgctatttttcttggctccaatttggtgtcttggtcagccaaaaagcagcaagtcgtggctcgatcttccaccgaatcagagtttcgtgccttagccaacactgctgcagaaattaagtggcttcggtctcttctcagtgagctgaaagtcactctccttgatgctcctgtgatctgggttgacaaccagggggctgcatccttggctgctaatcccatctttcacgcacggtgtaaacacattgaaattgatcaacactttgtgcgtgatcagctgctgaataaggaaatcgatgttcgatatgtgcctactcatgatcaagttgctgacatcttcacaaaatgtcttcccaaggaacgtttcaaatatctcaaagccaaacttaaagtggtcactaccccttttcgtttgaggggggatgataaccaaagcctgagttagttaaaattgttcaagataattctgttttctgttattttcaattcccacgtgttttctttaactaattcagttgtactgattctttgtaacaaacagctctatttgagctataaatatcaatacaaattcctctaccagactaagcttttctctaagcttctctggcttttacacaactctgttctaaagctttcat

SEQ ID NO: 49468 - DNA, 1034 bp, Cannabis sativa
attataatatatacatatatgtgtgtcgtttgtgcatataaaaatacatataattgcatattatattttgagtaaaatgaaatatgcacgcatgtgtacaagaaaacgacaaaattagtaaaggggtatctctcctaaaaaaaaaagaagccgcacatatatgtgaagagcattttacgcatcagtagtatttagtattttctagacgtgtcgctttataattagttaactatactttataaaattattatattaaattatatggaattcaatacttaattgcacttaacatataaaaaaatattaagtactaatagtgtcttttaatatttatcacatgagaattgttgaaaagtacgataaaattaagtatataatataaaagattattatatatcacaaaccaatcataaaacagcaaatataaaagatgttaaacaaacaatactccacatatatatggcccatttttgtactactaattgattggatcttaatagttcatagatatccaccatgtttggtttatgattatttttccatcttccacggggctgcacatgcctactcataacttcactacacacagtaccactttctgaagttactatatctgtaactaaatcttatatatgatgatgatgataagaaatatattattttttgctaagaacaaaaaaaatatatatatcatttaagggtcaacaaaattcaaaagagcagcagcagagtgtttttgtttggtcgcttctgttgtgtgcgcagatgaaataataatcaggcattaatgtcttcaacatcaccatctttttctcatctcgatgcatgcatttttttctcctcccatatgtctacaaataaagagaattattaaaaggtattatttgttctctagtattttactcagtgtcatattcttattgatataattaaatattaatttttaaaaaatatcgttaaccaatcataaaatattacttataaaaagtattaagtactactgatactttataataatactcacaaataaagta

SEQ ID NO: 49469 - DNA, 1085 bp, Cannabis sativa
gtaggtttctttctaggtttttctataatatttctctaataaataaaacttattttatttaattaaatcagatcctaatgttcagcctataatgcccataaaagacaaaagaaagggtttctaacaaaatgaccattttacctttaagtataattcaaatatttaaaaccttttaagggtagtttagtcatttaccactcccaacaaatccccgatatttccaatacctaacaatggtaccccactattgatattctaaatcatacaaaacgtgactctctaatggcccacgtcgctttccactactaccgaacataatcattagaatacaagaaatttacatatatagcataattatggtaaaattaaataaatttttacaaatatgcaaatcataattaataattaaatcttataaataaaccttaattatttgataatctaacatatcaacataggtgatctttacaattatcccctcattaaaaggatttcgtcctcgaaatctacatgaatagctttggatattgagttctcatgtcagactcaagttcccaagtggcctcttccactttactgttcctccagagtactttaaccaacactatggttttgcttcaaaggagtttttcctttctattcataattttccttggctactcatcataagacaaatccggttgtaactccaacgcttcataacccaagacatgcattgtatctgacatgtatttcctcaatattgagacatgaaatacgttatgcacagctgacaatgctggaggcaaggctaactgataagaaacttgtccaacctttttcaagtatttcaaattgtcaaataaaccttggacttaacttgcctttctttccaaagcacctaatacctttcattggtgacacacgcaggaaagcatgatctcttggctgaaatgtaatgtcgcgacgcttgggatccgcataacttttctatctactctgcgaagcaagcattcgagctttaatcttatctattgcctcatttgtcttctagactaactcagggcttagatactttcgttctcctgtttcatcccaataaaatg

SEQ ID NO: 49470 - DNA, 718 bp, Cannabis sativa
taacctttgttggccactgctatcatttggtgcctccatgtgtaccatatttctgggaacccatgtaagaacaccaccacttttggacctgaatttcgtattaattaaccaaaaaattattagtgatcataaacattggaagaccattttagacactataaaattacttaccacatccaatttcggctacatggagctttagtccttttacttccacatgcttatgctcaatgttttccatgtgtatctgtgtaaagtttccagagcagagaaagaaataatgtgttttcttttgttgcttttatgaattgattgttatttttctttgtgaatggtgaggtggggtgcctttaatagtgtctgggtggtcgaatatagtcaaccgaaaatatataacacacaatcttgatagtatcaaattttgacttttagtgaattgtctcttaacaataatgctaaacaaacactaatttaaaatgttgtaagttcgtctcaattggaggaattcattatctaagaactctgaaatacagtcaaattattaagccaaaaaccatgacataagcggttgaagaatagaatcaaagcaggtaaatgtgccttttaagaaagtttagcaaatataacaaaataaatatacaaaatgatttaaatatatggtgtttaaatttattataatataattaatacggtaacacaataaataaataaataaata

SEQ ID NO: 49471 - DNA, 1092 bp, Cannabis sativa
gctataaagctgtgagtaacttccctgttcattcttatgtaattcttttttgtagattaccatttgtgaaagtggtaccatcaaacattgacctcctaaccaataccatactgtagtaacttcctattattctaaatatcttgctgggaatcatatgctttttcctgtaaatttgctggtaataaacaacactactaacattcctgtttcttatatctctttttctctcactcactgcatacaacgatatccatgcacttttttaatgaatgtggaccattatcagatatagatagtgggcgcattttaaatgatttaatcacgttataagtgctcataagttcttggcattatgttctgtcacataggaagggaaatggaactataagtgcagctggtgggactggatggggtggaggtggtggtggaagaatatctctggattgttacagcatacaagaagatgttaaagttgcagtgcatggtttgtaacaattacacatttatatctggtagctgtgacttcgatcactcagctgctaattatttggttattatctgagtctctgcttgtttattaatggttacatgctaacaacctggaaaaaattgcacaagtatcaaaaaacttattggtggctacaatacttgtatagttgtttcttaactacgatatttgatgtgtcaaatacgggttactttaaatctttacagcgacttgctatacaacttagtaaagctcttaagatttttttttttttgaatgcaagctcttaaggttataacacatggaaattgtgcacatgttttttaaggaccaaaaatcaggatttgtttctgtgtagtcaaaccatttccacaggctgtgtgccctgccacatctatcttctatgttccatatctaaatcttttgattttttttttcatcaggcaaatatatccagttcttaactattaataaattttacatatcctttctggtctagttttggcatgtcttttttttttttttgtaaaaatttaacagcactgcttctttggtttttgcttgatttgctttttgttggcccaggtggtttgagtattggttgc

SEQ ID NO: 49472 - DNA, 817 bp, Cannabis sativa
cttgtaaacatcatccttctcagtgcaactctcaaagtcgctgcgtagtcgaccaatgctgatggatggattcccattaaagtattctactatgaaacggtctaacgttgccttctcttcaacctcagcctcagtaggtccacgtaacatattaagcccagtcaccagggcaaacttagcttgggtgaatcagcatctcttccttgctatgtaagaatgcacttcgtcatccttatgtgatttgatcttatgcatgaacaactgattgataagtgcaccaaaaaatgctaatggctctctctcaaaaaatttcttgaaataggattcctccttcaccctttcaagtaactccatttccacaatttagcttttactttggggtaataccaactaccaccccaccaagtcacacgaccagtgtaatgtttagacactggaagtaaaaggcgtggaacattggaagactgcaaaaaaacaccaaaaaatggcagtaaaaaaaatcaagcaaaagcatcggaccactatcgggcactacatcagatatatcggccctaacaaaaaatataatgaatagtgcaatcgggccctacatcgggcctatcgggtccctatcggactcaatactaaaattatgaaaaagtaacaaacatttaaaattcaaacaggcatcgaacaatacatcagaccctacattggacatatcgtgccccaacaaaaaaataaaatgaatattgcaatcgaatcccacatcaggcccattgggccactattatacttaatcctaaaattatgacaaagaaacaaaaattttaaaaaa

SEQ ID NO: 49473 - DNA, 972 bp, Cannabis sativa
atgttgtgtagtaacaataagcaaaccactctcttgcccaatacacgagtgggccaacccactaacaaccacatcttttggtttgggcccgcgttgagagctgccccctttctcaataacccgttcaataatagcattgggattattcatcaacccaccaggccccacttccttggagttcaatgaactaggtccactattatctagtaccttcagcccacaaccagtatcactaccacatatcccattttgctgaaaattagccttcggcccaggcggcccagcacccctcccaatggacaaagtgtccattacaatagtacctttcttaatccctgttggcttttccatatttgtagcatcatttaaacccaataggtgttcccctttatatcccacagtcaacgacttcaaaataggcaaagaagcatgtgactttccacctaatttcaaattatcgaaagacttattacccatttcagctctaccttgaccaaacccatgcccagagaaatcacgatccatcagtgtcaaaccttgtctcgggccacgatccacatagttcttcgcagaagctctgacaccggctaaccgaggcacaggcgccgacccagcacacatattatcgactacaagaaactcagtcccagaagccatcaccctcttaatcgaagcactagtaaatacatcatgatacctcgaagccgtggacagccacggtccgaacagaggatatagagttccgtcaagattagccaccgtggacggagaagacaaggaacatcccctcctttgatgacccaagcaaccacaaaagtaacaaaaaatcccaactttctcatatttaaaccggagccagcgtttgactccagagtcaagatcaaagaaacagcccgaagttaacaggttctctatatttaactcaacaagaactctgaggaagagttgccacgaacacggtttgtcttcctc

SEQ ID NO: 49474 - DNA, 2564 bp, Cannabis sativa
  modified_base (2167)..(2168): a, c, t, g, unknown or other
aagatggaaaaaaagataaaaaaatctcacaaaaagataatatataaaatagagaaaattgtgcaagaaaataaagctaaaacttcaaccctaagttcgactatgttctgattagattttggaaaaagccaaaacataaaagttctagatctttctttttatctttccataacatcttgaatcatccaattccaagcaatatcaagagagttatgaccaaaatactatcaggagaataggttttttttcttcagcgaattttattttattttatcattttttggctataaaagaagtggacttcaatagttttgggggaagcaattcagaaggaaataaacagagaatacaaatacgaatttcagagatcaattgcaatactggaggcattcttcagaggattttcagcattcttttcttctctattttcttctattttcttaagttaatatgtgtgattttgcttccataaacatgagtagctaaacacttaattagggtctagatggagattctttgacattgttttatggtattaatatgatttattttcctccagtttctatgtattctatttcattcgtgcttaattacttttaattacctaatcatagtgtgaagaacgcaaggtgggaatcatgggaaatacaaagttcgatttggaaaagtttacagggaagaaagatttcggtttatggagagtgaagatgagagctttactcatacaatagggcattcaagatgcattgcttggagctgagaagatcaaggacaaaatagagaaagaaaaagcagagattcttgacaaagcacacaatgttatcatcttagcctcagagataaagtcttgagagaagttttgaaggaatcttcagctgctggattgtggacaaagctggaaagtctatacatgacaagatcactctcaaataggttattcttgaaacaaaaattgtatgctttaagatgcttcctggaaaatctattgaagatcatttggatgacttcaacaagataattcttgatctaaagaatgttgacataaagattgaggatgaggaccaggctataatagttctgaattctcttccaatggagtcttatgaacactttgagacactatgatgtatggaagaaaatctttgacattggaggaaggttcaaagtgccttgatgtcaaaggagctaaaaagaaagtcagaaggaagaaaactttggtgaagtgttggtgtttgtatgaggaagaacagacagaagaggaaacaaggcaatggggaactctcatggacaatcaagaggtaagtttaattctagtgctcaatataagacaaaatgctatatctgtcataaaactaaccatctcaaaaaagaatgtcctgaactaaagaaacaagatttcaagaagcatggcaatgttgacatagcttcagaaggcagtgacttcgatggatataaaagtgcaggtgtaatggttgcctctaaagactactctggtgttgattgggttatagactcaggatgctcctttcacatttgtccaaacaaggatcaattcttggagtacaagagagttgatagaggattcgtaagacttcagaacaatagagcatgtgagatcattggaattgggtctgtaaggctgcaattaacaagagtcaatacacatgaattgcagaatgttagacatattcccaacataaagagaaatttaatttctgtaactatgttggacaaggagggatgctcagtcaaggtggaatcaagggttttaatggtgcaaaaaggtcagtggtattgatgttatgatcaatggggtctatgttcttcaaggaaattccaccagcaatttggcatctgtggcctcaaaaagcatgatcaattcaactatactatggcatagaaggcttggtcatgtgagtctcaaagggcttgggattcttgacgaacaagggttacttggaaagaatatggtgccagatttggaattctctgaacaatgtgcccttggaaatccaacaaagatcaaatttggcattggaatacacactaccaaagtaacactggattatgtgcactcagatgtttggggaccatctagaatcatttcaaggagatgaactagatattcagaacatgtgaaataatagaaggatcaattccaaccatnnccgcatgtgaccaggcaaaaacgtctaggtttgctcttagaaattttatcaattctgattttactttgagcaacaaaccttttttgatttttagttttctagttgggatatctgcatcgatctcgatctcttctaattattctacaagtccaacattgttgcttgggtccccaaatcgaggatccacatcttcatccccgccttgggaagttccctacttggaaatgttttttcccttgtctgtgctctggctgaaggatacttccttcttagccttggccactgcaaggttataacattcccgagtagattgttggtttcctcttggacatcctaccccattctttgttggaaactttaggcacgagtgaaatattgatgtgacagcctttaagt

SEQ ID NO: 49475 - DNA, 1315 bp, Cannabis sativa
tttaggacaggtccgatgttggtcggatgctaacccgatacatgcccgatgcaatgtattgtttggagattgaagatgcagggccattgttagcccgatgtacattgtaaatttttatattttgatagtgtttgtatatccgatagaggatgatggggtcgatggtgggtccgatatttataaatttttattgttttagaatgtttgtttgtccgatggaggaggatggggcccgatttttatacattatttgttgtttaaaacaaaattattattggtccgacagaggacgaaaggggtccgattgttattgcattttttttttttttattttttgatagaataccagtaggtctgatagaagacgatggtgggcccaataggtggtctgattgttattatatttttttatctttgttgatctgatatccctcaacatcggacgattgagttcgatgttggtccgatatccctctgatgtttgtccgatgctttgctacagaatgtttaacttgcattttcttgtattttttttccacagttcaagaccttcaagccttatacttccagtttcagtgcattacacaggctgcgtcacttggcatggtgacattttttacaatccaaggattaaatcaaaatatgtggaactccaattatgggaaatggtgaaggaatcaaatttcaaacgatgtcagcttttgacatcataatgtttaatttaggtaacacatcagttgccaatacctccagatttgtttttggaatgaaagtcccaacctcgctacgagtattcttaacaatacttggtgttggactagaatcgatacacacattattcttggttataaatccaatctctaccatctcctaaacaccattatacataatgaacacaaaaacagttgaacatgtcatccacaaacataaaaaaacactagtaacaaaaaaaaaaaaaaaacagacaagataaataattcacaaaattgagtaatatcggccatatatagaatctaatcggacccatatcaaccccaatcggtcctccaaatagaattcatgaacatgagtaattttagaatccaatcagacaactactagacttatatctaacccaatcgagtcttcaaacagaccttaaagctgaacaactatcagatacactatctgctatattggatccacatcgggtcctccacattgacctcaaaattgaactacaatcggacacccctattgaacatattgttggattttgtaccctaaataaaacccatttcaatataatcagatttactaattaataaaaaataga

SEQ ID NO: 49476 - DNA, 1497 bp, Cannabis sativa
ttcttaagacaaaatttcgtcaaaagtttttaagaatttaggtttgatccagatttttacaactttaaaaattgatggtaaaaatacttaagcttggcaaacttgtgagtctattaattcatccccactttgttaggataagtaacgagacacttgtatgtttctgatttagtcacaacttttttattttgtaatttttcataaaatctaaatctaatgactaaaataaatcaaaaactttaaactaaaattaattaaattgttaaagttaaaacaaaaacaaaaaaaaatgtacaatttaaaaattagaaaacatttattcataaactatttctctcgacactcaattcctccatacccaaaaccctaaatcgcatcctacctaaacccctaaatgttgaagacaacaccagtttaagtactaaaatccaatcaattttgtccatattgactctaattgattctcattcctaagctaaattcctaaaacttgaagagacgacagtagaagtgcttaaaaattagttggacaatggaggacaacgatggtggaggtacaattatttttctcttctccttgatttataatattttatttataatctgagtgaatcgaaatggtttttactcttttttatttctttctatttgactgaaaatggttattaaatttttactctctttttttctttctcattcactgaagatggttttcttgttggagttttatatttaaatcgggttgaacgtattgtgttaggtgtacacatttatttgacctgctgagattattggggtaggataaagttgttatttaaactatttttctattttttgtagggtataggctttaactagcatgtgagaatcattgcacatggttttaagctttatgacatccactttattgtaaatttttgtagtttttttgctgacaagtttgaactttagtgtaaatatgcattgtgagggttcttggtgcaataaaaatagtttgaaatagtatgtggatggaactgtgattgactttgacaagtgtcatactgatttgttcaacatgatggaactagaaggaatgcttttgcaggttcaatggtgccatgcttctattcatttttggtttaagcccaaagacaaacaactaaattatgtaaaatgactgcatgattagattatagattagtaggacaattatcattaattattgatattttatgatcatgcgtgattatatttgtagtgggtcttatttttttagaaaatcaacattagagttataatttatcaattctagagattttattaaactctatgtgtattatttatgctaaatgtgaaatttataatttttataatttttgctcggtaacaatggaaaatacgatagttgatcgttagggtcatatgggttaaccttcgagttaggggaacaatcgtacattttatgttagaatatcaggattaggcgggcagttggattggatccacgggttgttg

SEQ ID NO: 49477 - DNA, 1768 bp, Cannabis sativa
  modified_base (1734)..(1736): a, c, t, g, unknown or other
cttcgtggatttactgctttaggtgaaagagttaattattgagcacttcgccttgattacatacaatagggagattgggataattgactgcttcagcgttatctatgagattaatagtttgtttagaaactaaaaattacattctttaataggaattaggaatgattgttgagggtggcgaataacctttaactagtttctcatactatagtctcactttaaatttgttcttttctttaatttttattattgcaatttttattctaatcatcataaccacagtttttctaattcttgttactaatttgtgaataattaaataactatagtcctcgtgggatcgacccttacttacgattattctaaaataaatggaagtattagaattaaaaaaatagtaaatttgttgtggcttacgacacgcatcaatatattattttctagataaataaataaattatatatattaaaataaattatattagaaaaataattagcaataaaaatataattttatcttataaataaatgtaaaagagaagctaattgaaatactacatatatttcttttacaattaaaaatatgaaaatatactttcattttttctatgtgcaaatatatgcacatttttcttttgagccttataaattaacaatgagaagaatcttctgttcttgtaccaaagcctaatggctcatggcacacatgcatcaattttacaaatttaaataaagcatgtccggaggacagctttcctttacaaagcattgaccaacttgttgatgctactgcatgtaggtcatgaactccttagtttcatggatgcatactcggaatacaatcaagtcccaatgtatgagcctgaccagagcatacctccttcattattgatcaaggtttgtactgttataaggtaatgccttttggtttgataaccgtaagagcaacaaatcaaagattagttcagatgatgtttgcagattttataggtaagataatggaagtgtatgttgacaatatgctcataaaatcttaacgcatagaagaccatgtcgctcacctagattccatgtttagaatcctgagacattataaaatgcaacttaatcctttgaagtgtgtttttagattaggattaggaaaaattctcggctttattgttaaccaaagaggaattgaggctcatccaacaacattaaaggcattggtggagatgcaatctcccataaaaccaaaagaggtccaaagcctaacaggtaaagtcactgtactaaatcgttttatatctcgttcctctgacaaatgtaaagaatttttttagattctaaaaggtaataaaatgtttcagtggattgataaatgcaaagaggcttttcaagcactaaaagcgcacttgggacagcccctgatactatccaagccgatgcctggagaagttttatcgatctacctgccagtgtttgaatattcaattagctcagtgtaaatctacgaacaccaaggtaggcagcatccggtgtactatgtgagcaaacgcctattggatgctgaaactcgttatcgttttatggagcaactagcatttgcctttgtggttgcttctcgaaagttgcgatcatattttcaagcacacaatattgaagtactaacaaactatcctttgtgacaagtattagcaaaactagaagtgtaatatcccagaaaataaataatatttaaatggacatattttnnnaaatatgtaattacttggaaaatgaagtagga

SEQ ID NO: 49478 - DNA, 1404 bp, Cannabis sativa
aatctatatattatattattataaataatataacaagatgaagactgagtaatggctatttatagaacaaaaaaatgaaaaaaaaatttggaaaaaatgtggtcagatgatggaggaaggcagttgagaaagatggacgaaataatctttttttcggataaaaaatagttttgattgtgtgagaaattttcaaataaaaagctaagatgaaaactgaaatgaaactggaaaaaaaatgatagaaaatgagggaaaatagatagtgtgtgaagttgatataataacagcattcatgtgtaagagatattagtttaaataacctaatataaaaggtgaaaatataggagtagccatgtaaaagtataaggataatatttttgagcttttgtatattttatgtaaattagagttagccaatgctcactaactaaagaaaatataaagaaaaagaaaaaaaaaatatattttttaagttttaataagtaaaaaatagtaaaaaaaaattaagtagaaagcttataaatataaattgtcaaagtataaatattaaaaaaattaatatttggtgtaaaactcaatagagatgaacaagtcatattttctcaaagttcaactaagacagttcgaacaatggaaaacaacatttgtatacatcttgacaaattcagaaaatggagatgacaagaaatgtgaactaatttggaatagagatgcatttatcaaagtagaccaaagtggtcttttttaagactgcctacaatccattaataattttagtagtcaaaagaaaaaaaaaaaaaacaatttgatcactattatcacaaagaataaatgagattaatgatttaatcccccaattatgatctttatagaattttgttctctgaatatttttttgatgcaaaaaatttcttgaactatgaaaatcgttgcaaatatttaatgtagttacattttgttaatttatttaaataattgttgatataacactgatcatctttaatagaaggtttaaaatttatgctaaatttgatacaaaaatgagtttgtggtatatttgattcactatttacaatacaagataagatataaaataagaaaaaaaaagattatttatattgatggtaatttaatattttattgagaatatacaaaaattattatttttattattttattatttaaataatggtaatatgataaataataaagaatgtcaagtttgttaaaaatcaataaatcataataattggtgacattattaaataaaaaaatagtatttattgtgggctaaatttggcacaatactatgactccgtttggagagctttttaaaaagctaaaatcatttttggaaaaagttatgagttaatatgtgtttggtaaaatttaaaaaatagcttt

SEQ ID NO: 49479 - DNA, 1055 bp, Cannabis sativa
catggaatatagattcatgtgtctcttttgaacatcgagtacaaatatcactacacatgacatgtcgtgtggctagagtagagttagttggcagccatccataaactaatttccacacaaagtgtttaagtttgggtggtattttgagtctccatagcttcctccaccactccacaagacaatgatcatcagattggtttcgttctcttctcaattcacttgccatttgatagccactcttaactgtatattccccattttttgtgtaatgccacataattttgtcttttgtcccccaacccaagtttggaattgtgagaatcatttctgcatcatccttgttaaacacagttcgaaagaattcctcatcccattgtccattccccaatttaagatcatcaacaagaagttgagaaggaagtggtggctgatcataaatcttaaaagtcacaggtcggggaagccaaggatcttgtaataccctcacttgatccccatctccaattctccatctataccattttaagatgagtttcttcccccacactaagctacgccacacaaaggacgcatgatttccacactgagcctccataacggacttattcaaaaaataagaagccttcaacacacggctacacagggcagtaggaaagcgtatgcaacgccaaatttgttttgcgagcaacgcttgattaaacattcccaaatctcaaaaccccaaccccattttatcttttggtttgcataagtggtcccatttacacaaataaattttcttttctttctctgatgacccccaccaaaatcttgctgccattctatgaaaactagaaatggtccccttcgttagccaaaaacaactcatggtatatgtcaggattgcttgaacaatagccttgataagtacttcctttcctgccatcaagaacattgaagctttataacctttcagcttggcctacactttattctttatcatctcattcagctcctttttgtttctccctgcaaaggatgggagacccaagtattttccatgactgtcaacctct

SEQ ID NO: 49480 - DNA, 1216 bp, Cannabis sativa
aataaaacatcattttccctcaaatataatacatatgcaacatgtcaaataatttcagaaagaagaaagaaattagagaacttgtcaaatattgacccaaatttcgataaaaataaataaataaatatagacccaaattagtcaaaaaggataatgcaatacatcagcagcactgtacttatcagatagaattaaaccaacaatttatttccaagttatgatgtcaacagattataaaaataatactacaacaaattactaactcaaatttttaccaacaacacaattttttcttgcaatatgatatatgatgtattttttttttttttgagaaaaatacatatgatgtatttatatttatattttttctggtcaaccaaattatataacttgtggagtactcttggactgatcatataaaaattctttgtaatcgccttccttcttcccaatttcactcacaaaattctttcattcaaagttatttagtcctcctaactcttaagtagccatgcccatgaatttctttcatgcttccttcattatttttacatctatctatagctataaataccccaagccactctaaatatacacaatatcataaatataagtgaaaagaaaaagcttataatatatataatatctattatttctttatatatatttattataagccatggcaagactagtggtgagggatgtcgttttggttgcaacagctcttgttttaagcgtcgttttgatgatgtttcctgtcgtacaagggcggcgtctgtgtggtggtggccctcctctagctatggtggactcaactacaactgctcactactttgtgcagaacgttattgatctttgggggatcaaatctagtggtccaagttcttctggaggaggccattagagtttacaacacttgttcagcttattatattattacctttaaatatttttagtgtttatgattataatttttgttgcgataataaaaacatgttcccataattggtagtttttttttccttaatacataaataagagtttgtgttacaagggtcttggatttcaaatctagtttaatacacaaattaatcgttaccagttcattaatcgttacctcaaactcagtcaacaaatgtaatagaatatgaagtggttgaagtccatatttaggtatccttataggtctctttttttgttggttactatggtttcc

SEQ ID NO: 49481 - DNA, 930 bp, Cannabis sativa
ttctatcactcattgatttaaatatttagcaacttaaaaatattataaccgcgcgaagcgcggattagttgcctagttatatgataaacaaaccaacatgttacaattttttactctatttattatagtcatataggttaagaaataatagtatgaaaatttcaaacttaaactcaaacttaatttcttaataactagatataaagtcacaagtttatttgtacaacactaatggttagagtaatagtacttactatttaaacaaaagttgggattctatgccattagtatatatactacaatacaatatattctggtgtgagttctcttattggttgtttggtatattaatttaagatccttttacttaaattatagcaacttaataattagcataagcattgcaagagtacgtgataataaaactaacacttagccatattaatgaaaaacaaatttgcatcactaacaattctcaattcacatatgaaaattgtaggattttcttgtgctctttccaagaatgcccctacaccaactcaagaattgattaaaacgacaaggacaaaattgtccttgaaaagcaatacacggatttaaacaaaacgacacagaaacttggtcgttcccttcctacacgataaatcgtttagacaacgatttgtcgttcttcctcgaacaaaaccaatccaagagagctaaccctagctcagaacttgttacagaacctttgagagtttcacaaactctctctctttctctctggttctcaaaccctagaaccagagatatttttcgatcaactagatcgatctacccagaatccatccccaagaaacaccacaaacacacacacacacacacaaagatcaacaaatacaaacagtaaagagagaaaatagagagcaaacacagtgtttatagaggttc

SEQ ID NO: 49482 - DNA, 957 bp, Cannabis sativa
aattggtgtgatctaccccctgtcaacacacagccaacgtcagtcgactgtggagtcacaagcggccaagccctaccctttgcaggtttgtaaggccatgcaagcatcacgggtagcaaaaccctgccctttgcaggtctagccggccatggttgagcaatgggcggccagaccctacccaatgtaggtctggccggccaagaacagcagccagatgtaggcatggctagcccaagctagctctcgtaccaaggaatggccggccagggtctgtagttcaacacgggattggttgaccttcaccatacactctcccaaggtatggccagccagcccctatctctctagaatatgcattctccctttggagggacaatcggtcaagtccccacaagtccccacagtaccccacagtaacggatcctaacggatccttctatccttctgtgcaagcacagttggaccaactcagggacatgatccaaggcatagctggctcgaagccttcagatcttgaaattgatcggttaagggtgtaacaccctaactaacttaggcatgttagcgtgatttttaacatattgtacagctcattgctaatcaacgaagttatcaaaaattaagattaattaaaaattttcttatttaattgaaaacataaagtaacatacttataaaaatttcgagatcctgtttacaaaatacatttacaaaagtttaatattcatatacaaaagtttgtcgcctagcgacgatacagcaaaagccttgatgtcccaaagatggtacgctccaggcctaactgccccaacatgtacaatcttcatctgcttgccctcatggttacccagccttagccttgcccttacctacacatggaaataacactgcgagtcgacagactctgtaagaaaagcataacataaaacatgataatattaatcaggctcttataca

SEQ ID NO: 49483 - DNA, 1361 bp, Cannabis sativa
taagtatctgtgtataggagtccattctcctaatttcctcgttctaatatttccttcaattacgaaattcttatcacacgtacatatattcatgcatgtattatcaacaaccccttattaataattaaatcaaattattggagctagctagtcaccaatgtaattattatcttatattatatttatataactcttcgtaaaagatttgcatcagctgagttgattatctcaactgttgagttagacatttgattggtattttgtggttttttggtggtgtttaaactgagaaaatatttattctatatggatgtcaaataattaaatttaactattgtagctagctatagtcatcaatgtaaattttcaattttcaattttgattagatagatgtgaagatcaattttgagaactgtgaccatatggtggagccagtgagcaacacatttcactactacaaaaatcatttttaattttaattagataatataacccctctttacgtaattaatttaatttttttttatattataataaataattacttaaaaatataaaatttaatatataataaaattataaatatattatcttatttcatattattattaataattttaagtttgaactaaatgcataattttattaattattatttagattatttattaagaagtttaaaatttattatatgtagtatattaaattgttttgttaaaagaaattgtttttataaaaataaataaatagggtggtgtagaataaaaattacggtgttccctataatgtattattttcatatctcgattattcaaaactattgttattactatgtctcacttgttgtctcattgtatctcacttatttttattaccgtatcccacctgttgtcatcattgtatctcatctcttatcgttaccatagtttacttgtagtcgtcactattgtattttccaaatttatatcttaatcttaatttcttctcgaattttaaacaattttttaatatttttaagatattggagaaaatttattagtttgttctgttattattaattaatatgtttaaaaaaaaaaaagtgattattattttttaaatatcttaattaaaaaaaaaagaaaaaaatatatataaaaaaaatgtgatatttaattagttatgagaaatactaaaaggcaaccctccttggtatcataccattgttggtgtaattaagtagcaggttctatataactttaaaaaaataagatttagagaatattgttaaccaattgtagggtgtcactgtcacctatgaaaggtgttgggcaattaaaatattatttcaagcatcacgtacaagtaatttatttttttt

SEQ ID NO: 49484 - DNA, 1596 bp, Cannabis sativa
aaaaaaaaaaaaaagataaagctattccttcaaatgttaatcttgtacctctaaaaaatagaagtacataaaacagtgttcgttctatgtcattttacctccgaagcaaaggaaagggccagattttcgacaactcttcagcagtctcatctttttcaggttttccctgtaaaagtaataagataaaaatcacaataaagtcatgaaatggctttatagaaaacagattggtattaacgagttgaatacctcaaaaagaatgtgagatgacacaaccccatcccattcaggattttttgtatctaaaaggacaaggactatatcaaatctgctcaataagggaccagagagtgcagtatttacagatagagctaacaaaaaggacacataaagatatcattagaagaaagaagtttgaacacaactatcaaatgactgacacatcaaaaaatcgtattcattaaaaatattacattagaaagtgccgaggttatctataatgggggaaaattcatatttagtaatcatacaaaattaataattccaataaacatatgtacataatcagagtaatacattgatcaggatcatactgtccctttggatttgttgcgccaaaaacaatggtccttgtacttagagttgtcacaagaccagcctggaaaaaacgggaaaatgaagaaggagaataaaggaaagtattgggacaagtattagaatgagctaagatggacatggtaagagaatcacacaaaatacaacaagaaaataataaaagctcaacttcagtaattaataaaaatgaaatgtaacttatgaactggtatgtcaagagcatgtaaagcctatcaaattgagaaatgtaattattgtagtgaagatcacaaagctagacatcagtaagttgtttaacttgaaacaaattgtgctgtaatgttgttgatcagttcatacaaaaaatttgtatgataaactatgaaacttaattggaaacgattcaacttcagaaaatgagcagagactgaatatgtaattagtaatttggcagtaatttacaggaatcttctatcttagcaaacaaaataacccatcatgccaatgttcaaaacattgaactgaaaaaaccctggatatataggagacactatcatatatatcagaaatcctcttttacttcccctccattcggacaaatgagactttcattaacttttgtttatgattataactaagatggaacacaatcataggttgcagtttcagttaaagtacaattaattatctacttcaaacttaaattcctaaaaacaagtactcgtagatcatcaaagaatgttaccttggcaacacttatagtttgctgttccattgcttcatgtatggttgctctatcatgttctctcatgctgttgaagaaagtgatatcaaacttgatattttcacacgaacaaaataactgatgaaatttatgaaaagattaaaataagaaaatgatatattctctgctctataatgatttgaaaatatcatttagattgactgagaatccaaacaatttcctgttctgtgacaggtgaaaatactcaaaaaggtttt

SEQ ID NO: 49485 - DNA, 863 bp, Cannabis sativa
tatgaagaagatcttgtgaaaggttataaccaacaaactggacagatttcattcctaaattgtatgactattttattcttacttattggttatctttgatttacagaggttgaacaactattaggaccagaagaaagagcaatcttgtatcagtcttcaactcctaacttggaaaaaatatcaactgtaattaatttaaagtttttcactttcctttgtctgcattttctatgtgagtttctgtggaaaatgtttggaaaattttattcacacacttttctttgtcttcattttctatttgagagtttctctacaacataagtttcaatttttaagcatacacaagaggagatgaatatgttatcttatctaattttgcaaataactatgatcaatttctatataatctgttaatttgaaaaacgtatacattttatcttccttttatgttcaagtatagtaatatttttttcttcccatcttaaaccaattttagttgaattataaaatatttgatcagataggagttaagacttgtgtattacacacaatcaagcttgagttttgcaagattttctactactgatagcaactaaaggtggtttcattgattgcgtatggggtcatcagttcactaacattgaacaattctttgatcaggaaaaatggtccccgttgcacactcttgcactatctggacagattccgttcatggacgagctactagaacaaggtgtagatattgattttgttgataaggcaagaataaaactcgatttagttttacttttacttggtttaacaagtttaattttataaatgctgaaattcctctgattgtaagtcctcatggaatcttatga

SEQ ID NO: 49486 - DNA, 1117 bp, Cannabis sativa
atgtagaatttcgtaaaaaaaaaaaaaaaaaaaaaaaaaaaaactattttaagtataaaaatgaataaggcctaattttttttaatctaataaaaattataaaatgttattaaataattatagttataagctctcatcttattataatgctaggtaaatgggtacacatagtaatattttttattttatgtacaaaaaattagaaatgtaactgtttttggaaataaaatatcgtcgtgaatcacgctattgaaaaaaaaggaaaatatcaggacagtgggactcgtatttggtaagtctaaacaattttacgacataaatgctaaaattctgccaactgatcaaaatgtttatttttattttctttaataaatgaatccattcccatctttatttctcctaaaaaaatcgctatgacaattaaaatacaatatatatatagggacacaattttgtcccgttatgtactttcacggaatgtatttcgtgattcattaaatcggtctcagggtacattagatgagtgtcagggtacattactatttttttaaccctaattacgcctaaatcaatctcagctctcatatcaaataactacgggacaaaatcctatccttatatatatttcttttgacaaagcaattaaaataataatttaaatgggtaatatccacaacaactcaattatttaatgccacttgtctcttatgaaactttattttccttaaaggctagactaaattggattaaacagactaatttatctaattcagtgtttgggcatgctagaacttagaagcctagataactaatccagctaatatcatctatttgagattatttatccatttagagggtgaaataaataatcttaagtgagattttttttatcatttttttatttttattttgttaaaatattttaaaatataataagaattttaacaaaagtattattatatttttttttaaaaaaaaaattattcattaaaattactgaaaatgtaaaattttgaaatatcatacataaatttttaaaatttaaaatattattaattaaataatagttacttaaattgtttctaagagaaacaatataataataaaattatatatt

SEQ ID NO: 49487 - DNA, 1498 bp, Cannabis sativa
gaccttaaaagttcaaggggtatgatttagtacatatcaaaattcagaagacaaaaatactacttaacctaaatagaatagtaaaaaattcacagacattaatgtaacaattagatgtgccaagattttcactttgggtaccaaaggaggaatagtacaaacatcttcaccaacactctacaaaaaagaaggcttttttttaactttgattatacttggatctcaattttttaacatctaatatataattagatttggaagaagtacctaccacaaatagaaagttaattaggacataacattaaataaaatcaatttctgaatatggtttaattaattaattaaaccaacaaagtaggactaattaatactggattagattagccactatataaagataagttgggcctataattaattagctatatagcctatataggcctagctaatttaatgagctaggtgatgacgatcgttaagtgtgcaagcaaaatctacaaaagtagatttttttttttcaagttaatattaaactctaaactttattaattagtactgttattttttttatttgaaaataaaataaaatacaggatctttggttaagttgagggccatgaaaggaatccattgtccacatttgagtgagaattattagatcaaatgtataggtagtgttatattatgtatgcaaagatatttcatgcataaataatatgagatattataattaataagcataatcaactggtatttttaattttttctttaaaaaaacaatactttttatttcatgcaatattattctaatttgagtaataaaagtgtgtaaatgttatagtacatttactcttcatatttatgaaaaccaggatctacttttttaaaaagtattgttaatgttatagtacatattttgagtttatatattattactcttctatttttatatttttttttatctagtactacaaaaaagttactctatatacatctatatagtaacattttagttataatatagatctttttgtgactaaaatattttttagtcaaaataaaaatgatacttgtaactaaaaaaacagtatttaaatccaaattgttattaatctaattttagtcacaaaaactaatttgttgtaattaaaaatacatttagttaataaattttagttataataaattgtaatttttgtaaaaatctttagtcacaaactttttagaaaaaattatattggtaaaatatttacatttttacattgaaagttttatttatttatttatttttacattttagagtattctatgcaaacacaagattcaacaagaaaatcacatgaaattaacatcaaaacaatatcgaaacaacattaaaataatatataaataacatcaaaatacgattttttgtaaataaaatctaaaaaccataaaaacatttaaaattctgtatttttgtatattttttttttatatatttatgaaattatcccaa

SEQ ID NO: 49488 - DNA, 1020 bp, Cannabis sativa
  modified_base (395)..(406): a, c, t, g, unknown or other
taagtttattttttaaaaaatttgtggtagtgaatatcaccattaaatactaattagattattgttgtataaacttgatgcaatgtgatcattcaattagtattaaatagtaatatttaattaaaactaaaaattaaaaaaaaaaaaattaagagattttacttaaaaaaaaataaagagatatataatgtataaaaattaaatatgaaggattcccaccaattaattactctaaatttaaatatacagtatctcatatatttgtactaatagacattaattgttatttgtcttttgcattgtcgttgtcgtatcactgagggtaaatatgtttagtgataattatttgtttaaattatgtatgtggtgtatatcaaagagagagagagagagannnnnnnnnnnngagagagagagagagagtttatatacaactttgatttattagcataatatacgcacggatctgggtagagatacttatgaaaatttggctgtaaattaaagtctcgttccattattgatcacacacctaccatgtgaatgtgattatctgaaaattaattttcaaaaaagagaatgatgtatataactagcaaattattgtagcaaggaagaaatatcaataattagcagctagtttttgcattaatttgagaagagatttggaataggctaatttactattagttaattagttggctaacttaagttaatctcgaacttctaaggttttactttattaaacatatatatatttacgtatcaaaccaattaaaatatatacgtcagtaatttgaatccttaatttgttgatagatctccgcagtacgtctatgcattactttatttactacagtttttttagtagtcacttattgacgtatttaagtaagaaatttggactctttctagtcgagattatgtttttatatattgattaactaggtattatattaattaataaatattttttgagatttttttttataatttataaatattgttgaccgaggtttt

SEQ ID NO: 49489 - DNA, 1300 bp, Cannabis sativa
tcattaaccttaaaacaccagaagaaatccagtctggtaagcctccagatctatctaacttaagggtgtttgggtgtgcaacatatgcacaccagagtatggggaagctagagcctaaagctctaatgtgtgtgttcctaggatactatgagggaactataggctacatgttgtgggtaagggagaaacctggtttataaactatgcttatagagatgtgatatttgaagaagatatattcctttgtgttactaactttacttctagtgcaggttccaattctgaaactaacactacaggtaacacaatgaattttcaaacaagactagatcatggtacaggaccactagtacccaaccctactcaagtggagccagtttgtatggattcagctcaggtggaacaaactgaggaaaaataagactaggcaaacactaaagtgacaaatgatgacactagtcaggtggaaccaaacgaagacacacactagaatcctaaagatcttgtaaactatcaactcataatagataaggccaagagagctccaaagccaaaccaggaattcaactatagtacttaggaagagataatatcatatgttcttacatgtgttgctggcgggaacaaagcagaaccagatcttatgaagaagcattgacaataagtgatttcaagaaatgcttgcagaccataaatgaagaaatgaaatcattgttgaagaataaaacttggatactagtgttaagacctgaaggagtgaagaaggaagggacattagtgagcctatgagataaaaggctagattggttgccaactgattcacacagaaggagggcactaattttactgagattttctcatatgttttcaagtacaaaacaattagaataatgctagcacttgtaacttagtttgatctagaagttaattagatggatgtgaccacatccttccttcatggtgaattaaaagaagatatctatgttgaacaaccaagagatggtgtgcaagcttgccaatttcttgtatgggcataagtaatctgtggataatggaataataaatttcactcattcgtgagtaagaagaggtcactagaagcttttatgattattgtctttattttaaaggcattgatattaatgaagtcatttacctcctgctatatgtaaatgacatgcttataataagcaaaaagaggtccaagatagaattgatgaaaggatggctcaaatgataatttgagatgaaggatcgtggtatttcaaccaagataattagaattaatataaaaaaaaaa

SEQ ID NO: 49490 - DNA, 1104 bp, Cannabis sativa
tggagctccaatactctttaccaaggtagcaagagtatcaaatttggccctttagacatcacttgtggttatatgcatatcagttgaccactttttgttggtgttacttcacatgttcttttgtcttccaagtcgaataaatatgttgatgaatctgggtcttgtgttaattgcttggtcatgtggccttgctacaaactatgaggatttatcctgtatgatgatagagttgtctctcgagcatttgctttgtgagctgctactcgtggtgctatattgactattcccttcaaaatagtcttcctcagagtgacatgtgtcgagcgaagtgaactgattggtcaatctcaatacttctccatgcacccatgggaagtattcatactactggtcctcaagaccacgagcaaattacctacacaaagcaccccgttcatcatggaaatatttctgcgtgtggagcagttctctgctcttcaccctctgaatctcatactctttgctttgattgtagagcttctgagtccctctcccaaggttaactacaggtccttttccctttgtagggtaacgggtggtgtcctagagtcattatatttgtgaagagaattctgtggaggagattggtttctcaccttgttcaaatctcttcgagaaaagttgcagttgatcctattagctgcatgaggtggacctgtaggtctgttgtctcaagtccatgtcctttccgatgcttgcttatagctcgtttccctaataggtgaccactccacattagagaaagaacccatagatcgatatttttgagtctcagtacttttggatgctcgctcagagtttacttccttatggggaatctcagtgcctactgctcgctaagtagtggcacggctaccaggagtggtagtgttgctttgcattgtcatggatgattgcttgcttgaacagataaattccttttgaaataaagttcctagcagagaaatcctactgtaatcgagaactcaggttgtggctctcaatgaaagcaccaaaatattgatgttcaaaagtggccagcacgagctcgctagattggaaagatgaataatgaatgtaagtaaa

SEQ ID NO: 49491 - DNA, 1815 bp, Cannabis sativa
tatgaaacttgggaattgtaagtgactaagagactgtaagtttgtgtgctcacttggggagcacccacactgtacaatgcatcaaactaggacagagaacttatgcaaaggaatttaaatgcttagtataagctaccaaacctgcctctaagtcaagtgcaggcatacttcaacttggcataaaaaaaaagtaaatctaaatacttacatgtcaaggcaacaagaagataaccaggataatcatatgtccatagtaaaaggctttaaggataaataaaagtagtattcgaaaatagagtgcatgtaggctaaaaacaagaacatgaaagccttgaggccaaatttgaaaaaaaaaaaaaaaaattggttcaaatgcataaggccaaggccctgcaagaaccatactgccaaagaaaagccgaacagagttcctataggaaccacatactgggcaaaatcttaagggcaaggtagagttcctagcaggttccaagccaaaaggcagagttccttgcatgttccaagccatagacaaaactctgggcaaggcaaccgtagccaagcaagggtacggtactttacttgccagataatgtcattgtacaaggctgggtaacagcgaagtacaagtctcaagtgtaacaactgggacaaatgttgagcttaagttgaacatttgactgtaatagactcactattatgtttcctacagagcttctaaggaaaccacacatgagactaaggttgtatatgcctacaaggccatgacaggattcttgacgaggtcaaaagaggagcaaaaactggtcacccgcttggaaacaaggcctaggtcaaacaaggttcccaagccttaagagggttcgccatggtcccacggctcagccaagaactgactagggctaccgaacccaggcatgaataggctagcttcctaaggtgaaactctagagctggccaactcccatgactgaatcctagggctagccagatctcaaacaagaccccctagggccatccaagtagttttgaatcgaaatgtgtgtttttttagaaaactcagatgtgttcttcgtgttctcatgactcaaagagttaagaatcacgggaaaggccaaaattgaatctttttcatcaagagatcacacattatgcattctaaaactatcatgtgaatcaaaatactaaaagaagattacaatctaacgtgaaaatcaaaaaatttgtaaaagcttaaaaagcttgaaacttatcaatagaaagttcaaagaagagatgtcaaagaaaataagatgaggcatatatggagagagaagatcaaagatctaaaagcatgccatgcaaaaagccaacacttggctagacaaggttgctcgacagaggctaatacaagcaagacgaaagctagaaagtccctatccgaccagatgctcgaacagggacttgggggaaaatgttatcccaaattttgtccacctgacatggcacgcccacgtaaggcaagactgagtacacatggaatacagccttgccaatagcaagacaaagtctctttacaaggcatggcagaaccatcaagcaacaagcgataggagctaagcaagccgtcaagaagctgcacaaccatgtttgtccatccaaagggagtacataggtcggctaggaggagcttgtatggtcagccaaggtttgagcacaagctggccggccaaaaggtgattatcagtttgcgaatgaaaagctgtactggatttcagtttggtacccatagttcgttgaagactctgctagaacttcgaagtaaattttggatct

SEQ ID NO: 49492 - DNA, 1573 bp, Cannabis sativa
gtgttttaaagttagttgttattgtaacaaaattaattacttgttttattttaatttaggtaaaattataaaattgtaggaaaaaaatggaggaaagtaaagatttttctgccattaatgtgggacaccctaaacccagttataggcgactgttttaaaccgttgggaaacccacataagcgacggttttgaaccgtcgcctattctgcccgttttacgacggtcgtatagacgacggttatagaacctgatgggaatactttaaacgattatttaaaaacgtcgggaaatccctttttgtagtagtttgcacacatttttgaatggaaattcacacgctgaatgaaggcgctatgttaaaatcacactatacggtaaacaacttgttaaaacctttaccaagtcatagactaaaactagaaatttccctatcgataaatattgaaggaacacgacataaccagactatgtgaaaacatcatgaaaaacggtaggtcaagtctgtaaaaatagaagaccgttttttatgtattttgagagtaaaattagtagaccatttgcacagaaatgacttgtcatttttaactatagaaacaaacaaagcctcatctaacccaaattaaatacaaacatgacaaaactctcctatttaccaataaatacctcaatagccattttcgaaatgatagaaaaaaatataacacgatagagccaaatctacaatttttaagccaagatttagtttttaaactcaaactttctctactccacacacaaccagcaaaactagcataatcatgcttcaaataatttagtaagaacaaagaaataaaactccaaagaccacttgtttagacagaaccaaaatcaaaactttgcaagttcaaactctacttaaaacttgaaaagcttaaagaagaaaggtttctaggggttacctttctaatttcttccaattgcaactgagtttccttgattccagcacccaggttgacatccagcgcccaagttgacattccagcactcaagttgacatctgacgtcaaactagaagtggcataagtgtgaaaatgtccaagaggagtcctttgagattcctaagtgatgattttacaccccttagtccttttatatgttttggtgaagttggtctatcattctcgaagatgttgttttgcaaaaaatggaaaactcgaaacttccgactttcgaatgagccaaaattgaagttacgaatttagttgttatgacttcatggatcattagaattgtgaaaaaaactagtcgaataatgtagactacattagattcaaataagcagaacccagcgaaccaggacaaatgttgacctaagcgttagggccttctcacttgagcttcaagattctatttttgatactttcaaggcttccaagacttttaaacttgaggacaaggtttcttcccccttttttgacgatgtcggattcaatggtttaatcagacttggcattccagcatttgaaggtaacgtccaaggttgattatcaacttgggcagtgggcccagtcccaggtatcaacctgggcattgg

SEQ ID NO: 49493 - DNA, 1280 bp, Cannabis sativa
taaccgtataaaaccgaccgtacaatttttggcagttttggacggttttgggcggttttggtattttttggtttaaccattttttttatttcaaaaactaaaacttactgccatgtcaaaaaaaccaacaccgaaatcgactgccaaatttggtgatgacttggaaccgaaaattcggttacggtctagtcggtttcggtttatcggtttttatgaatacccctacctagaaacgtgatacaagtccgaaaaaaaagctcaatgccaagagctgacttggagatctcactctaaggagccaattaagtcttgactgaattaactactcagttgtttgaagccaccgcctttaagattcatatctcgatctataaatatagtcatcctcttcatttgatacaagacaaaaacaccaaatacagactagtgagcaagttctttaagagagagttttgattgagaggtagagagcgatatagagaagagaaaggattagatcttgggttttgttaaggagatgcttctgtagatgaagaagcttctcagggaagagcgttagaaagaaaagagaatcaaaacagagaatcgctcgcaaatgtattgtacatgtattcttgttcaactaataaagaaaattttggtggtattctagaactggagtagagttctagatcaatctatcaaactttattgagaatcatggggttccatctcaaaaccaattggtgatgagtggagtagcccatgttcttatatttagctcaatatttttacattcgatccatgtgggacaatattgtccaatattctatggtggctattttcgttcaccaatcttgaatcaccttatcataagtagtgtcatttgctcacttcttttgtttgtttgttttacagttgggagttccatttgctcgcttattcttgttcgcggttgggagtaccaagcctgctagggatatgactgtgataccatgttgagaatcatgtggttcattctcaaaaccaattgatgatgagtggagtagctcatgttcttatatatgattcaatatttttacatttgatccatgtgaaacaatattgtctaatagacttgaacttgtataattcttggtactaattttacgattttttatattgttcatttctggttttattatctttgatatactcagttggaaatgttgtgaatattttaacaaaatatataagtgtcttagtgtgtgtgagttggaaagagtcccacatgggatatgaaccctcattgacaagggtat

SEQ ID NO: 49494 - DNA, 2545 bp, Cannabis sativa
acaataacatgatcaaagcccataacacttatcatgctctgaataacatgccattctactctgtcaaaagctttactcatatcaagcttgattgctacatacccctctttgcctctttttaaatgtttaagggaatgtaataactcgaaagccaccagcacattatccattatgagtctagactgaagaaaagcactttgggattctgatataacttgtgagagatatggtttcaaacgaagcacaatagttttaggcaccagtttatacaagacgttgcaaaggctgatcggaagcagttatgacattgaagtgggcttcttaactttagggattaaaataatcaatgtcttgttaaagattgaaaaatcaccaccatcattaagaattttcaagatagcacttgtaactaatttacctacaatgtgccagtaattggtataaaatattactgagtaccatcagcagtatatgcacgtgtaagatctctgttcatatcctcaatgattgtataagggacctttgaagtaacatactggagagtatcattatccaatccatctgtagtataaatattaccaaaatactgttgtattatattgccaatgccattatgagaagagtgttcaattccattgtcatccaccagtttgttaatggtattgtaattgtgcctgttattagccttctaatggaaaaaaaaaaagagtattagagtcaccagattccaaccatttgatgtgagagcattgttatcagtagtccacttcttttgcttagagatcatccaatacagcttcactagaccaaagttccttgaaatgggcagcactagtgtcaagagagttttgcaaagcagccaccttatcatgagacatcttgattttcctaggaagctcaccaaattaagaattgtgccatgaatggagctgagatgaacaagtggagagattagtcattacttaagcaatagagtcagtcgcaccagatttccaataattggagataatgttaagaaaaccatcttccttaagccataatttctcaaaccaaaaccttgatttttatttttgaggaggagcttgcagtaaagaaacaatggaacgaaaaaattccaagagtgataaaatgggttttaggaaactcttaagccaagcattattgacaaatctatagtctaatgtttcctcaacgttaaccccattaacactgttattatgccatgtgaatctctcactagagaagttaagtttcagtaaaccacagtagtcaaccatgtcacgaaattcatcaatttatacttcaaaactcaaaggacccctaagtttatcagagtgagaaataattttattgaaatcgcccataaccagccaaggagacaaaggagaagtgtctctaagtttacgtaaaagacctaggtgaaatgcctatttgaaatagaaggagcaccatataaacttgagaaatggcatgaaggaccatcagcaaaagccatatgccaatcattaaagttcattccatatttaaggatagttacatttacatgagacttctaaaggaaaagtaaactaccattaagacctactctagggacctcaattccattaggaaaattaaaagcattgcaaaatttagtaatagaaccaatactaagtttagactatataataaataaaacatcaagacagttttctaaaatgagaaaatgatgttatcggaatgctcttggatcgctcaagccccgagcattctaggtatgatattcacgatgattggcgaggctgagtagcagcctgcgccaaagaagcatcaatattgtctgccactagagaaatattagacagttcagggatggtttcaagttgttgatgctggaatgtatttgtagagtcaattagtggagtgtttctagtgcgacaacgcttcagaacttgtctaacattaccacccgaggaaactaattgccttttcaaaaacaaggatggcatttgattctcagcaaaacttggaataaaagttgatgcagtaggattaatcccaacttcagctctgggcagaagaactgttgaagaagagatgatggaatcaatgggagtggttataacccttagaaagacactaattggagagggaaagacatgagcatatgctggcgggttgccaccaaaatagccactgaagaagttgaattagttacaccagatgtgttatttgcaagaataatggaagtcgcagagggcactaaatcagaggaagaagccatattgttgagcggagagaaagacaactttggagacaaaataacattttggtagtttggactaattggtttatcagaggtaacttccaagttagtttctgagattatcaaatatgcaccagtagagttggaaacacaagcatcaggaagaagttctgcaatggctttcccattttcacgatatgttacggaagtaggcttgcagtggtagttgtctagaagagggaatgattggtgcaatggtataacagggcaaacgaatgatgaaaggccaaaatcttgccc

SEQ ID NO: 49495 - DNA, 1512 bp, Cannabis sativa
attcctgtaaattatgttaatgttaaaattctgtttaatcataagcaatgaaaacccaaggttaatacacagagagatatgtaaaagtcattattcaaagctgaatatggtatataagttaaacaaggtaaaatttgatcacaacctccttgtggtcttgatggtagagtactttaaatctttgcctcaggtcacaagttcgaggattgtagaggaagaagagaagaagaagaagaaaataatgaggtattataaaatacctcctttttgttacaatttttgttaatgaaaattaaaataaatgaaataaaaattttataaagcccatatatactctttttgtcatcacatcatgtaggagtattttgaaatttgttttataaaagttatagattgaacattttattttattaaatgataatttggatcttaagtttttcaaaacaatacaaaatagattctaaatttatgttttttttttaatataaccaatttaaaatcagtttttagtatgaatagatacaaataaatataacttcaagtgaaattattattaagttttaatttgattaaaattaaatctgtctaaattgttatttaataaattaaaagttcaattagtaacttctgtactatttacctttttattaataataatctttgctcaaatgaccattttaagtggttggtttaagggtcgtaaattaagcctcaaaagaggtattgaattattagaattagttaatattgttattagtggttaattagttggttaagttagttaatctttccctaactaactgagtttgccttgctctataaaagagggtgtcctgtattcattttctttcaatgaatgagaaataacagattcaatctctctctctttctttctttctctcatatgaattgatattgtatattatcacatattaccaaaattgacactaaaaagtaccaattgagacatattacaaaataattaaccatctttacatttctcttcttttacgtaatcacttgcataagattgattaagttaatttgtcaacacaattaaattaatcaatcatttacatagtccatattattaaacatataacaaacataaccaatttcatcagcatatgatatgtgatatatatatcatcattgctgatcaatacatacaaacgtaagccatattagctcatcaacttctgaccaagctagtttacagggcctctgtctctgctcatataaaatatagatataaataattaattaagggcataaaacagcattacatataataataatattcagtgtcattaattataatataaatataaagggaggtgagatcagtgtgtaacagcaaagacagatgacatattaaatcgtcattataagctacgtaagcttgatgatctcaccttaattataaattaagatcttaattaccaataaagtacgaatatcccaattattataaatatataaatatgagcatctatctctattctctagtct

SEQ ID NO: 49496 - DNA, 1099 bp, Cannabis sativa
  modified_base (1028)..(1030): a, c, t, g, unknown or other
aactacgattttttgattgatccaggatttggttcttgctgggtcattaatgagggcttggcctttgtttaataatgatttagtgaagaaacaagtaaaactgagtaaggaaaggtatggatcagttgatagagtttttattgtgtgtgatcaagacttaacagccgatgagagttttcaaaggtggatgattgagaggaacccacctcaccaagtcaaactcattaatgggactgatcatatggttatgatcactaaaccacttaatctctttactctccttttggaggttgcagaaacatattattaagttttaatttaaatataaatataattgcttgaaaaatttatgtaatattaatactattgttaatacttgaattaattaataagaagcaagaagaagggctgggcagagttatctctagctatatttgtgaaggagtattgttatgttagatacaaattcaaattgtacacgtttaattattacacaataatacctattaaatattagtcttttttttttttatatatttactatatcacatcattgtttgagaacaaaacccttttaattatttgttaaaaaaaagtttaaatatgagtatacgatgaggacttttttccatattctatacaaatatatttatgttatttaaaatatgattatataataaaaaatatatttttttaaaacattacaattcaaatttattaaactcactacatatatatatatatattttttttttatcttttatcatatattaaattaaatatgattatgtaacataaaatatatatattttttaatattgtagttttaaattcaataactttacatatttaaaaaatatctttctattatatatatatatattttttttttatttttttttttataaataaatacttttgcattccttaatctatcttaacatttacacacaatacatctatattgcaaatctatacatatatacctttgatccccccatacaacatatatatatatctattctatnnnaagtgtgcctatataactaaaattcttggtttatgagaaatttatgggtgattttttatttttatttaa

SEQ ID NO: 49497 - DNA, 2914 bp, Cannabis sativa
gttttttcagctctaacacggaggcaagtttccgaactaggatatgtggtttattggggattgaggaggttggtgaaaatagttcttatttgggtctccctaatactataggtcgtaagaagactactaccttgggctttcttagtgatcgattgaaaaagcgaatacaagggtgggagggtaagattctttttcgggccaataaagaagtccttctaaagacgattgcccaatcacttccaaattatgctatgagcatttttcttttaccattggacacatgtaaagaactggaacgactcatggcaagatttgggtggcaatctgattcttctaaacaaaaaggcattcattggatgagttggtcgcgcttgagtcgtcataaacatgttggagggttgggtttttgtaatctacatgattttaatttagcccttttaggcaaacaaggctggcaattattgactcaaagtaattctctagctggtaaggtgtttaaggctagatattatccacagagttcgttccttttagctacacttggtgataacccgagcttcgtgtggagaagtatctttgagtcacaacaacctcttcaagctggtattcgtagatccattggtgggggtagtgaagctttcattttgaatgagacttggtggccagataatgagcacccgtatgtgatctctaatcatcctggattaattaacaaggttgtctctagtttgtttcaatttaatgatcgtgcttgggatgctaaaatactacaggatctgtttgacaccagagatcgtgaggttattttgaacatccagctgagttctactgctacacatgatgagtggtattggaaaaaagaaacctcgactgtctattctgtgaggagtgcatatcgttttcttcaagagttaaaaggatcgtggtctttagacaataatgcaggcttttggcgcaaacagtggaatttgaaaattcccccaaaagctcgaaactttctgtttcgtgccatttctaattgccttcctacacgaactcaactttgcactaaacatgttgagcttgttaatgtgtgcccaatgtgtaatgcctttgctgaatctaactttcatgttcttgttggctgcactttcgcaagatcatgttggcctagatcttctatttctgtggaagtgttacttcaagttttggagattggtaggccaacttgatgtctcaatcaagttctggtgtgattgaagaagctgatgtgattgcttcagcaatttggagtgcacgaaatgagttggtatggaatgataaatcatctaatgcagcaactgtagtgttatctgctagaatttcacttgaacaatggaaacatgctagtcaaaaaggcatgatgcctttcttgttgctctaagagatgagcactggaaaaaaccagcattaaacaaggggaaaatcaatgtggacggggctctatttgctgcagagggtcagtttgggatggggttggtagttcgagatagcaacggaaaggtcctagaggcattttttcgtggctggactgggagagttgatcctttaattgctaaaatctttggtgtcaaggaaacattaagttgggttaataggaatgagtggtcaaatgttgttatagaaattgatagtcttgtgtgtgttcaagctctttattgtaatgtttctatgccttttgagtttggcctattggttcaagattgtagagctattttgctcaattgtcaaaacgttgtcttttcttttgttcagcgatctgcaaacaaagctgcctatgatattgctagggggtcttgtttctcgccaggtcgagttatccgggagttagatttcactcctgagtttatttctattgtattggaagattgtgtttgttaatgaaagtttaacttatattcaaaaaaataaaaaaataaaaaaagttattaattaactacaattttaagtttaagattgttatttcgtttaactttaaccttaaaaattaagcacgttaactctaaaaaaaaatcaaaattttaaaatattctgttggattaaaattctcaatatgtgctcatatgtatattagtgtattgctatttgaagtttgacccaaaataaagtgatcattttagtaattgtgggtcattatgtattaaagtgtcatgggctaaatgtgtagataccctaagtgatatttctaattgatagagggtctaaattagaaatacataaaattaataacctagctatgaggttataaattggtagtggtcctcaagaaacaagttaaaaatttctattctcatcttcccccatcaagagagaaaattagaaaatcctaagtcttattttcttggatgatcattacttaaaatcaccacaaagattatctctacaagatggattaagatcatgacgatctatggattaaggtacgcttctgctatttggcttcttctttttaaatcaataaaggtattctttacatctatggttatatacttttaattatatgtaatatgattatctataaaattgaatattgttattacatattttatgagtgataaagaaactaacaagtgatatcaagagccagctttaattgattctttgaggacttaaggttcgtctttaaaaatttggggatttctaaatatttgaaaaattaagctttgttcttccatttatgatttggggttataattttgtgatttgtgattatatatttggtacttatcttccaaaattgttatagttaattgatatgaatatattaaccattcaatttattgggaaaagagaactagttatatgcatgcgatgggatctgttatttattttttctttctagaattaattttatgaagtgatgagatagtggttgtttgaatcttattgcttcatt

SEQ ID NO: 49498 - DNA, 628 bp, Cannabis sativa
aatcacaattgtttgctcaggcaagtaacaattacatacatgagtgaaacaatatatttgattgagctgcacacacacctctagtcctagctaatgcaaaccattattagcttatatcatttgctttacaagttgttgttactactgtttaatacacaataaataaatggtaaatatgatttagaccttgtgttgtataaaagttacttattgattttttttttaataaattacaatttgaatcctgtatttttcaaaatggtacataagaatacactgatcttaattgtagttatttttcttttaatacagccaatctgaaactagtttctagcataaggagatacaaaagatgtaaccaacctggtcataacactttcatcttaggtcattatgtttcatttaactaaaattgggtttagggatattattatgttccattctgaataatatatgatcgaatcggtaacttttgtaaaatacaggatccaaaatgatatttacccttaataattttcatttaaagatggtaaacaaattgtattggcaagtatatatttaattactaaagcttatgtgaaatttatattgttctaagaattctaatttttatttttctcttttgatt

SEQ ID NO: 49499 - DNA, 1538 bp, Cannabis sativa
gggaagtgaatacaaaccatttgccaaattcttaactgattaaggcatactatttcaacacccttgtccaaaaatgagtgaacaaaatgggagagttgaacaaaagtacaggcacatcacaaaaactggcctcaccatgcttacacattctagcctaaacttctcttattggtgggatgcatttcataatgttgtctttgtcatcaatagattgctaacaccagtgctaaataacaagcttccagttcagtgtcgctttggcactacactagattattcaattctcaagccatttgggtgtgcttgctacccttatttacggtcgtacaacagatacaaaatggaatacaagtctcagatgtgcatctttctgggatactcttccactcacaaagggtatctatgtgaaaataaagaatgcatatagtatatagcttgtaatgttgtgtttgatgaaaattcttttttggcttcggctccatccacttcacatcatgtatcctctaactcaactttgaatgttcccactgctttttttttctgcatctcagtgtgtaccacaaaatactaatgcccactctatacttgttgtccctgagcaaactataccttctaatatggccacctcatccagtaccaaccccctggtctcctctactcgctgcccacatatgtcacccctagcatctcccccagtacctcaaacagttgtaatacaaccattaaccactaaaaccaccatacaaccttgatcgtcacaaatagatttaccacaaatctctcccctatacatttacccctaccaaatccaccaaccaaagtgtcctcatctcaaccgcaacctaatttacctaagccttctttacaatcttccccttcccttcctcaagagacaacatcaaccataataggtattagacaacatggcatgagaaccaggtcacaaagtggaataactaagccaaaagtaagaaatggccacaaggtatcctttgccagaatcctcacttcccaatgaactaaaattgctcaagacagctattgttggttttatggtactaaattaggtatgcagcggaagagttttaaattatctaagtatcattgtaccatgtcccacgggatctctagatgtgtgtatattaattaaaaacaataaaaacaataagtttagagtatacctcttgaagcctatcagggtatcctcgaaatttctcgtatgttgtatcccttaatccagatgataaggaaattacaattggactcacaacagtatcttccaaattgatccaccacacataaggaatagtgtcagttattaggataaagtgtataacatttattcttgttgagttctcaacacatgagcaagaataattgagagaaaaataattttctttttctctctatgtatttagaaaaaactggttcagaaggagtgagaagtcttattctaatttctcaaatcagactcctatttataatagttaaattcctttaattaaatcatatttaattttttaaataaataaatatct
